United States Patent Application Publication US 2014/0057251 A1 - sequence listing, part 32

SEQ ID NO: 34634 - DNA, 1869 bp, Cannabis sativa
acccgaaatataggttaattataacctaacaatcactcctttatatacaaagcatgtgtcctttgattacacagagattgttttcattatcaatctgtttatacattgaatataacatttaaatcaataaaaaacgtaaatacaataaatgaagaacagtttcagcccaattcactaaatacagcaatgtatgcgacttctatagtacgagttgtctattcatattctttcataagctgacaggcttatgatgcgtacaagactagtcaagtttgggatgtctgcgtcctgttcgagtcacttatacggacatcctgtgataaggcgtgtccttattgagttatcaaggttgttgggtcatccggaccagctccttgagtacagaagcaatcttttcctcttcgcaggaagacctttatagtcctcacatatatcttggtatatgtgagtcttaacctgatcttcggtactgctccatgcaagctacacgaatgcgactagacaatgtcaaggtcacatcatctcactgagtctggttcaggcgaggtttgcactaaagaagtctctctcttactaacatctcagccctctttgaggagagtgagtccacgtgtcatttttttaggagtccgacctcgagtttctaggtgagaaattctcactataacacatgcgcctagtttcatgactgacagcttatgtcatgagggaaactataagcaagaggcaggcaaaagggtgtcacgagatggtgacttttggttgtctaatcgagggttttgaaaagatggctgcaatcattatacttaacccatttgtgtaggcgtggttatggataatcgttggattgtgagaccttaggcattctcttgccacgtgtctccatcccaattaatgtgggataatggtattaaaaccttttgatatggaatgatccttcactttttccctctcatttttcgtttctctcttcctttctctctgattttttaaacctttgaaaacctctttcacaattctccttttttatttttgaaaagtacttggaagcttctgattctaacagaatttactgaagaatatcgacactttcaaggttagtgtaaaattatttgcaaccattttccttttattttgaaaatcaatctttattttgcgctttaggaggtagaaaacgcatgagacaataggaaatatatatggaaccttattttctttctaacaaaactaggcatttctctagaaaatatggacctaaaacttgactaatcacgggtttcaggaagaacaccttgagtgttcgcatttttttattgaatattctaaatactcgcgacgttcgtgatgaacatcttgaatactcgcatacacttctgaatattttagcaaatctgaaatttagctattttaatccctgttagaacttagggtttatttttagccttctaatttatatatgcttttgttgcgaagactggctgagtcttttgaattgtgggtgtgtcacagtaaattaatgttcatgcaagtgtatgcatgttccttgggtcactgtgatacacccagccatttgagacatgcggccaatttttacttttcttgctttttagtcgcatgttggaactgaccaagtttctcgaaatggtgggggtgtcccagtaactctatggtcatgctagaaacacatgccccttggatcatggggaaactcccagtcatttttttgacacatactgttagttacacatgtgcgacttataccttgggaggattggctgagttcttgaaatggtgggtgtgtctcactaccttaattctcatgtagcgacatgatcattatgttattgagatactgttggaaattatttt

SEQ ID NO: 34635 - DNA, 1467 bp, Cannabis sativa
  modified_base (198)..(199): a, c, t, g, unknown or other
caaagatgtatgttagatgtggttgacttgttgggacttcgagatttgcttggttactgtggaaagtgtctttcaacttggaataagcaaaggtttaggtcattacctaagaaagttgtggaaactcagatggagatagataaactcttaaatgccaatgctctcgtgttcgaatggatgaggtgaaagctctagaanntaaattggatgaccttatgaatagagagcaactttattggaagcagagatcgagatcggagtggatgatagtgggtgataaaaacacaaaatactttcatacgaagtgtcggtgaggaagaagaaaaatgctattattgagattatgatggaatctggccaaaaggtgtgtgttgaggaaaagattgttggtgaagtggagcggtattttacaggtatttttcaaacagccaatccaacaaatgagcaaatttagtgtggtacagaggttgttaatttgtgtatttcggtggctaataaagagcatctaatggaaccattcactcaggaggatgttcaccaagctattaaggctattagcgccactaaagctccaagaccagacaaatttcatgctttattttttttagagatttcaggatattgtgggtgaaagggtcagccaagtatgccttgcaatcttatatgagggtgctttggtgcgacagtttaataagtcaaatgtagtgttgataccaaaagtacaaaaaccaaaattggttaaggagtattgacctattactttgtgtaatataatgtataaaaattttacgaaagctttacgattgaggatgaaaagtgttcttggcccccttatttcatctttccaaagtgcatttgtcccacggcgatcaatacatgacaacattatagttatttttgagcttcttcattcactatttaaaagaaataacaagagaaggggatttatggcactcaagcttgacatgagtaaagcatatgaccgggtggaatggaggttcttagccagtatgatgcgacaggttggctttattgagggttgggttagggttatcatggactgcgtgattacctcgaagtacacttttttaatcaatgggcatcctaaaggccaagtggttccagcaagagggttacgataggcatgtcctttatctccttatttaatcatcttctatgctaaattattgtcttcattgttctcccttgcagaggccagatctaaactgatggggtttaggtgttctagattgagaccatgtgttactcacttgttattgtagatgatagccttgtatttggtagggctaatggaggtgatactgaaactataaagcgtatccttcttacttatgaggctacctctggctagaagattaactttgagaagtctgctatcacttttagttcaaatgtgcaataggttgaccaagatggggtttcgagagtattgaggttgacatcagt

SEQ ID NO: 34636 - DNA, 1625 bp, Cannabis sativa
aaatttacgaattagaattttaaagtgatttctccggtagcttaagttgttatacgatttttagttgcgatttaaatttccgctagttgtaatatgaatttatatgtagaattatgtaaaaatgtaaaaaaaaaatatatatatatattttaaggtataaaaataaaaacaactccttattttaattaataaaataattttaaaattttattataaaaatttaaagcaaaaaggaaacaagactaaaaactaaaaaattactttggccaagaaaatgaagagtacgaactaactttttctttttgaaagctcaacctcaacattaaaacccacctcaaaattaatacaagacctgaatttaagaatcgcacaaaaattgataattatataagaaaacaatatatatctaatggagacacagacacctgtatagagttaaccataatcatccggtttatttatttatttattttttacttgcaggcaagtaatataacacaatttgcttcttttttcaaaaataaatctgagttattttaggaattttttcatattagtaatggagtttactttataaaaaataaataataaaaaaaatatcagaacaaaaaaataaatattaattaaaacatgagaaattaaacaaaaattaattaaaaaagttggtaaaatttataatactagaaaaatcgctagagtaaacacttgtgccgaaaaatttgtaagagaaaagttactgaaaaagttattgtcgctaaaaaaatcacagtcgctagaaaaatcagttctataaaataataaataaaaataaataacacagaataactcaaactgattataattaaaatagaaccggttataataaataacacaaaataactcaaattagttataattataatagtgtgggttctataatagtgttataatgaataaaaatatataacacgaaataactcaaaccaataattaaaatagaatcagttctatagcataataaataaaaaaataacacataataacttaagccggttataattacaataacaattataaaacactggaatactagaacataattaaaaaaaaaaactaatttcataataaaatacctcaataacatataatacctcatacaaccggttataatttttttttaaaaaaatgtaggaattaatttcaaaaaatactgagacattataaatatgaacaaaatcagttccataaaaaaataaataataacccaaatataatatgaagaagccagttatatttatcaaatagttaaaaatttgagacaaaaaaattaattttataaaacaaccaagataaaaacttacacacaaaaaccagttaaataaaataaataaattaaaaaccgattccttgaattaactaaataaaaattctattctcaaaataactaaattaaaaatcattccttaaattaattaaataaaaaaccgatttctgaaataaataattcaataatcattttttgaaatgactaaataaaaaaccacttgagaaataaattaaaatagaattggttccagaacaatataattaaaaataaaagacacaaaatataactcaaaaattgattctaattaaaaaaaaaaaaa

SEQ ID NO: 34637 - DNA, 2539 bp, Cannabis sativa
cacattcatttttctcacccaaaatcaatgaataagtactttatatggaacatgttggtttttgttatatttagtgtaagttatatggatctgttcattcttggttgtattttgtctactttgtgtcctgatttgaaagtagactatgatttattttctgtatttttttttgttctgtgttttctattttttagcgacgttgaaacaataattgtcgatttttttgcaattctaactaaagttagaggttagggatgaatccatgcgacatttatacgatgctcttgcgattttgtgcaatttatgggtcatttttgtgcaatatttgggtggatttttacttgttgtgttttttgtgcgatattatgcgatatcattactttcttgtgtgattattgtgcgatattgtttacttgttgtttgtaatttttttggacagatttaacagtatttgtgcctatactatatgatggtgtttgggctgtggagggtttcaactggatattcaattctgcaacaagtatgacaatgatatttgacattaacattacactggaaaaggtgtgtgaaggccatagcaatatcttcccatttccattctggaagatttagtagctgcaacaaacttgcagacctttggtgttcaaccttcacttgctgacaattaaacactttgcaacatattcaactatatcatttttcattccaagccaccaaaacatggccttaagatcttggtacatcttcattgttccaggatgaactgagtaaggagtcgtataagactcatttagaatttctcttttaatgtcatcatccataggcacacaaatacaattcataaaccgtaacattcctgtgtcatccactgtaaagtcactagtctttctagccaaaatcctgccttgggatttcactaactctggatcttgtggttgtgcttctttgattggttctagaagagtagattgcagggtaatgttagccaattgccccacaacgaactcaatcttagctcgggtcatctcatctactaattgcttggagattcgtatgactctgtcctttcctactcagggcatcaactacaaagttggccttcccaaaatgataaagaatctcacagtcgtaatcctttactagttttagctaatgcctttgtctcatgttcaggtctttctaggtgaagaagtatttcagacttttatgatcagtgtatatctcatatttctcgccatataagtgatgccgccaaatttttagcgcaaatactactactgcgagttctagatcgtgagtagggtacctctgctcgtactcttttaactgtcgagaagcataagctattacctttccagtttgcataagaacacagcccagaccctgtctcaaggcatcacaataaacaacaaacttttctttatctgaaggaagagttaatactgaagcggtaatcaagtgctgctttaactcctaaaaacttttctcacactaatcagtccaaacaaacttcaaattctttcgggtcattccattaggggtgcttcaattttcaagaaaccctcaacaaaccaacgataataactatctaaacccaaaaagcttctaacttcagtagccgattttagtgttggccaatcctgaacaacttcgatcttggccgaatcaaccatgaatatcccatctttatccactatgtgccctaggaaagaaacacgtgataaccataactcacactttttaaatttaggatacaacttgtgatctcgtaactattacaatactgatttgagatgtagttcatgttcttcttttgactcagaatagaccaaaatatcatcaataaacactatcactcacttgcccaggtaattcttgaatacccgattcataagatccataaatgtcgctggggcattggtgagttcgaaagacatcactagaaagtcataatgtccataccgagtacgaaatacagtcttagggatatcctcttcccaaatcttcagttgattgtaacctgagcgaaggtcgatctttgaaaagattgtcttaccctttagttgatcaaataggtcatccattcggggtagaggatacttgttcttaatactgagcttgttcaattcccgatagtcgatacacgtccgcagcgacccatctttctttttcatgaacaacactagagcaccccagggagaataactcggtcttatgaattccaagtttagtaactcttggagttggatctttaattctttcaattctactggagccatttgatacggtgccttcgatactggttctgccccgcgaaactaattctatcaaaaattcaatttcacaggaaggtggtaatccaagtaaatcctcaggaattcgtacaccaatctcatattttcagctccatatgacactgattggctagtatccaccatagtgactaagaatcctaggcaatatttgcgcatcagatccttagcttttaagagtgttattttaggtatgcgcgatccttgtactttacccacaaacactg

SEQ ID NO: 34638 - DNA, 1128 bp, Cannabis sativa
tgttaatggaaagcttccacaacctgatgaggagcatgagaattatgacagctggtgtaggtgcaataacacagtcatttcatggattcttcatgctatttcaagagagatagctaacagtataatgtatcatgataatgctgcatagatttgggaagaattacatgaaagattcaatgaaaaaaatgctccaaggattttcgaagctaagaaaacgatgcagagccttactcaaggatcaaacatagtgacaacctacttcactcgactcaagtcactatgggatcaaattagggaatatagaccacaacctgtttgtagttgtggtgctatgaagattatccagtttatttcgtgcggattttaaatcgtattatcgtatctggtctaaattactacccctacttttactgttttcccattttttttttaactttttatgaattttcttgtaaataactttgctaataactttgtagagaaaaagccatatttttacaaagtcatcttaaaaatcataaaatgataattctgtatatattttgaggttggaaaatgatcttatattttgcagccaactccaatatcggcccaaaatattataaatttggtgttattcggcccatttattctgatggttaggttgagggattgccattgaagaatacctttttgtgatatacattagccaaatttatatccaaataaaatttaattcaaatatatcgtgtattgtacctaaattactttcacaccctcacataactaaaatacaatttcaaacataatagattattttatttagagataaatgtgcatgtttgtgggaaagttagagcaaaatttttgttagagaagaattgagactatcgtaaaatgataagagtaaaatgtaaaattagtagaatgaatgaaaaaagtgataaacataataaattttaaaaaatgaataaaaaattaaagacatcaatttaaaaaaggtatgcaatgtaattttctcgccatttaaccatgactctttcttattcaacatacaacattttttttattatttttttaatttatgaatttttttacataatttcaaaaataaaaaacacaaagacaacaaaaaaattataaaaatac

SEQ ID NO: 34639 - DNA, 2130 bp, Cannabis sativa
aattctaccacatctttcttcatttcgcaccaccaggaaaagggttttaaatcctaatacatctcggtagtgctagggtgcagtgaataaggagtggtatcagctttcttgagaatctcttttctaggttccacactacttggaatacaaactctagttttatacaacaacatccaattacctaacactgtaaaatctatagcttgaccatctaaaacctcctctttgatcttcactagctctggataagttaactgagatgctttaattctgtctaaaagatcaaattacaatgtcaaattattaagttcacctacaataaactcaatacctgatctgaccatatcatctgctaggtgatttgaaatcttgatctaactagtcacttgccaaggaccctttccactaagggcagctgccaccacattggccttctcgggatggtaaaggatttcacaatcgtaatccttaaccaaatccaaccatcgcctctacctcatattctgatcttcccgagtaaaaaatatttgagactcttgtggtctgtgtaaatcacacacttttccccgtaaagataatgttgccagatcttcaaagtaaaaactactgtggcaagttctaaattatgagttgagtatcgctgttcatatacctttaactaacgggaggcataagcaatgacccgatcagcttacatcaaaacacatcccagtccctgtctggatgcatcgcaatacatcacaaacttctctttatcagatggtaaggctaatactggagttgtgatcaatctctgtttcaattcctagaagcttacttcacactagtctgtccacaaaaatgctgattctttttagtgagttcgattaagggtgttaaaatcttagaaaaacaaaaacccttaacaaaccgacagttataactagccaaacccagaaaacttttgactttcatatctgtcttcggtctcagccaatccctgacagattcattcttccctaaatcgaccttgatcccatccttactaataatatgtcctagaaaggacacctgagatagccaaactcacactttttggacttggcatacagtttatgttctcgtaatcgctgcagaaccatctagaggtgttgctcatgctcctcttcttattgagagtacacaaggatgtcatcgataaatagaataacacatatatcaaggaaatccttgaataacctattcatcaaatccataaaaactgccggagcattgtttagtccaaaagacataaccaaaaatttacagtgcccatacctagtacggaaagcagtctttggaatgtcgtcctcttggattctcaactgattataagccatttagagatctatcttagaaaagaccatcttcccctgaagctaatcgaacaatttgtcaattctaggtaaagggaatttattctagatagtcagtttgtttagttctcagtagtcaatgcacatgcgtagggattcatctttcttcttaataaataacacgggagctcccaagggtgacacactaggtcgtgaaaaccctaggtcaagtaacccctaaagctgaatctttaattctataagctctgctggagccattctggaaggtgccttagaaactagttctgctcgcagtgctatatcaataacaaaatctatttcttgatgtggtggtaaaccttgaagttcattaggaaatacatctaaaaaaatcttgaacctctttgatatcctctagccgaattgattcaagccatgtgggatctaataccactgccaaaaaccctaggcatccatcttgtaattattctatagctttcaataccgagattactggaatttgggatccctaagctgatcccacaaaaacaaatgattcctcactctcgggttggaagatcaccatctttcacttacaatcaatactagctgagcacttggagaagaaatccattccaagtatgataataaaatccgctaaacccaattctactaaatcagcactcaactctctatcctcaattatgatcgacatacacctaacccaccttttggagataactaattctctgccaggcaatagggttccaaacctcttgtaacaccctaactaaca

SEQ ID NO: 34640 - DNA, 901 bp, Cannabis sativa
tttacttagacaaatttttattttatttttattttatttttagagcggcccctcttgctaatggaaattggagagttttggtagaatagatcgggtttgggaagattgggctgggattgaacgagaagaagaagtagaagaagaaggaaaaaaatataaaagatagaaaaaaaacgttaataaattagttttgaaaattatttattcatttatttatttattttaaattattttaaattaaaattatgatttggagcaataaaatatcaacacgtgacatttttaagaacaacaaatggaacagttaaattaagtatttacggactaatgagaatcttgagttttgggctattactacaaattttcaaaaaaatggggacttatctgcatcaaagtaatttttttgaggacttataccacaatttaatatcaacacatggtatttttggagcaactaacgaatctattaaaatgaggatcaacagacttacaagaatctcaagcatagggactattaccgttattttttgaagttggaaatttatctgcatcaaaataaactttttgagaatttttgccacaatttttctaaaaaaaacaaaggcatttgttactttattaagtgccaacaaatgcaccataagtttattatttcacttaatggcctctaaaattttataattgtcccttggccctgaatttttaacttatgccctcagattaccctatttttttgtaaattattgcaaatatagtcaactttttagacaaacaatacacaaatgcaaacgcatgactatctattaaagttttccaattttactattttagaataataattacttactgatcaactgaaatttataaaacacgacacaataattgattactaatttttcaa

SEQ ID NO: 34641 - DNA, 1447 bp, Cannabis sativa
ttcatttgaaacatttaccgaattggagcaagaaaaccaattgaatacggcaaacctcatgagagcagcatgttgataggtgagctgagacatatgcatggtgtcagagagttccacatcattatcaccagtgagatacctgaacaccttttgacgatcaaactccacatcagttgtctcaattcccataggcagattgagagcttcagccacatccttcacagtaaaggaataccagtgtcatattcataagattacatattgggtcataaaagcatcgacctagacatggttagggagtccctttttttaattccgattaaatatgattttttttttaataaatcatgcaattatattaatagcatacaatttaatcgggacatctctcccgttagagacacgaccaggattagaattagaaaaataagtcaggtatcacttgcctaattcttagatcgtttgataaaaaataaaaaaaaaataaaataagatgaaaaagattgcaacatcacagttaaccttaagagcacttgtgttcaatttcatctaccactcagaagacacaatagtagaattattgttgtaggttcattcaatctcataacttgagcacttagctattgtgcaaggcaagtaactgcactactaacaactccttcagtcgcagagaacttgttattcccaaccactaacagcgatttgatgacgagccattgaagaactaacaacaaaacaaaataaaacaaaaccatgtcacacagacaagactaatatcagtagcaaaaatcgaatcgcaatagcaaaacacaactccgaccaagctgcacctatgcccagggaaggccggtgggcctggtaaaaaaaaaagacaatatcctatagctataaatttaggacgagaaaccctaattttattattattattattattttggatggatacacaattaaagatgatttaaatgaaatacttagaataataaaatatttgcataaatatgtggcatattaattattcgaaaactatcaagcttcaaaaatcattaaagttgcttttgggttctctaggcacgagttcccacagcattgccaaaatgttgttggccacagtattcagtgatcagcaacacgttcactggttgcagtattgaacgagcagtgctccattctcccatataatgtagagaattactaaaaggtactactgtgcttaacaccatcctcggtgtcatactgttattagtgtaattaaatattaggtaccatataatttaaaaaaaataactttttggaaatatcgataaccaatcgtgagtcgtcacctataaaaaataatattatgatgactaatagcaatgctctatatctattctatataaagtgtgtctatataactaaaattcttggtttatgagaaatttatgggtgactttttatttttatt

SEQ ID NO: 34642 - DNA, 1660 bp, Cannabis sativa
ttgttttgaaaaaataaataaatacttttgttttttaatttaaaagtagaaaataaaagtatattctataacttttatttttatttttattttctgattttatttaagtcgtatctaggttcgagtatgggattggaattggggccagagtttggctaccaatgttcaagttggagtcagagtccaaaatattgattaagaaaaaaaactatttacaaaaattttgaaagtgattttttttattttcaaaatttttaaaactttgatattaaaaaattgaaaaagtgaaaacaattttatagaacatttttcggaaaatatttttacttttctaattataaaaataaaaaattgattagaaaagtattaccaaacgtactttcagttttgacaatttgatttatctttttgtactattacattatttttttcataaaatttgttgttacaactttattctttcaactttttttctcgttctctttttgagttagtgatagttaaaaaacacctataaattaaaaaataactaaaaaataatataaaaataacaaaacaaatgcacatttatactcatatttgcaaagtaaattttggtttaagtttcaaaatatattgatctaagttttggccaagtaattcttttttttttctttttttttttttttgaaatgcaaatggaaattccatgattagtaaaattgaatatagttcattacatgcaaataatcgaacagattaaataaaaataggctacaaagtcctttacatcaaataggataaaaaccctaagagtatcttcaactaaatgacatataagtcatcagcaataaagcatcaaaattatgtgaaaaaaattatattttcatcacaaatgaacgtataacgaatcacacctataaataacaatcaggtaaagattttccaaaaaattaggtagaaacaccttaattaatcaaacaataacaaaacagaataatataactattacaaggagatttacattcttacttgtctttataaaagattctattataataatcttgacatttgttgttcgtttcaattcaataattaattctaaacaataaattaaaagaatttatatagacaattataataattttcgttagtgaatatatgcaatttataatttaatttgtatctcaaattaatattgtagttgagctctaatctaagactactctcaagtctcaacagcttctctactatattttttaaaatacattaccaaaactctactttatttattttacctcaaacttttacatttatatcatacatcaacttctctattttttctctatatcattcaaatattatatttttaatatattttatttattttatattaataattcatataatattacacatatataaaaacgttaaagaaaataattttaaaatatgtttagcttaatgaatagttatctctacatttagcttagcactattcattgagctaaaaaatatgtaaaatagctaaagtttacttcacttgttggaagctcaattttgtaaatttttctgaataatataaaaattgaactattttaactcatctaatttgaataggaataacgtaatttaaatttaaattgtctttatatttatatttatagtgtgtatatttata

SEQ ID NO: 34643 - DNA, 2390 bp, Cannabis sativa
catttatgtaaaaaattttgttactaaaagtagcaattttttataatgattacatgtttcattataacatataacatcttttagaatgtttatatagactaaaacttaaaaagaaaaattgttgataagatatatattctcacttgatatggactgtattgattaattagttgataagacatgaagtaagagtgaagataattgttaagaaaagatataataataataataataataagtcatgatcatgagatttagagcagatatcacatacaaaaaattcaaataacacattttggacaaatatataaattagaaagtgaagcattccatactatcctgaaatttaaaattaattatatcacataaaagcttttctagtcatgaaccaaattgccataaactttacatatacacaaaatttcataattgcatcaattcaaagatatatcacttcaactttttgataattattgcaacaacaatacattataatatatatgattaattatctaaaaaaataacaaaataaaaacccattataatattgtgaataatataacatgggaactttcatttttgatgattaataaaatacctcatatcaattttgactccccttactaatttgtaccaattaattcatttgattacatgaactttctattttacccttttttaaaattaaaaaaaaaatgttaaaaacttaaatgttccacccctctctctctctctctctctctctctctctctctacattgacaaaaactgaaaactaccacccttctctcttccctcttgtgtgcttttctctctctctaagctcctccatctctctctctcttggtggtggaaaatcggacaacacccccaatcactcaagaatcattcaccattataatgggtaagttgtgttttaagcatttattagacattagtaataatatgtaatttgctttcgttatatccgtggtatttgttggaactggtattttttggtccgaaattgtagatctggttttctgttgaaatttaggttttccagaggttatcgacagtttatcgatagaatatcgatgccatgtcgataatatgtgaaggaatgtcagggatgaccattatcaacatgatatcaacagtttgtcaatatcatgtcgatgaaaaagtaatttaaataatttcatttatttggcaatgtatcgatagtttgtcgatattatgtcgacatttattcaacttatgtttgtcgacaatatgtcgatagaatggtgatatattgtcgactttaagacaaaaaaatgaaaaacttttaaacagttgataagaaacaagtgaaattttttaaacctaagtaaagactaaacaaacattaaaactgaccactaaacaatcataacataacaatttaaaggtctttattatgtcggtgagactcgcaataggggcataaagatccaggtttcactggttcgccattaaaataacctaatctgcaacgacgacaccctttggggaaccctgggtttggaggcagccattcatttttttttttttttgaagttgtaggtacctccattcgttcgctagcctttctttttcaaaacttttaaaccaatctatatattcttgcatttctggagtaatttcatcactagattctgtttgatctcttcaacagatagaagtttgtgtttgttcactttactagacatttagaacttataagagaaaagcactctagggttaaagaataagaaacatatgtaacttatgaagtagaaatttgattttatagagcagaatagttgttgggaaggtagaaaaatttaattagcattaaatgtccaattgtacacgtgtatggaatgcaatatgcatttattgatataatgtcgataggttgtcgacaatttgtggataggagaaaattgaggccacatattatcgatgttatgtccatagcttgtcgatatgctcaacagataaaatagatgttggaaaggtgggaaaaattaattagcattcaatgtctaattgtacatgtgtatgacatgaaatttgcattttcgatacgatattgacattatatcgatgatatttcaactctttgtcgatgatgatgccactcgaaatcctgacaggccttatcaaggggatatcgatggaatgtcaatagtttgttgaatatgttgaatttttgactttttttagttttttttatattttttggtattttttccacttacctttttttgtttgaaattgccggattgactatatttcttgttgtatcgtacgatggtatctgttgtgttgaggattttaattgggtttataaagccgaagacaatttgacactgacaattagaactgacacaaccatacaacaa

SEQ ID NO: 34644 - DNA, 1951 bp, Cannabis sativa
agggcacaaaacccaacagcttcaactaaatgaattagaagaaatacggaatgatccttaaaaaaaatacaaggatcgtatgaagctctatcatgaaaaagatattttgagaaaagacttctctcaaggtcagaaagtccttttgtacaattctcgtttgcatctattcccaggtaagttgcgttctaaatgggctggtccatacattgtgcgcactgtttttccacatggagcaattgaaattgaaaatcctaataatggtaatgtattcaaagttaatggacaaaaattgaaactatttttaaaattaaaatctgctgaagtggaagagatccttcttgaggattctgtttaccaaggtcattgatcttttccatgtactcttagtaaggtatttttatttagtatttatgttttattataagtatgtattttattttcggttactttctttccctttattcaaatgctccaaggtgaggtatgaccattctaaactctaaactcttgtacttttctatctttctctctatttttgtgattgcatgcattgaggacaatgcatgaattaagtttgggggtggtgagttttcttggttatttttcttcactttatcatttatttaagggggtagaatagcctaattttttttagcttatgtgttttcaaataaaaaaaaaaaagagtgtttttaatttttcttttgctcgaggtctagcaaaatgttaagtttgggggtatgataactctacaaaatagagttattttaccatattttataagaaaaaattggattagttcttgactttttaattcttttattaagtttttaagtatttttgaatttttttagtcttaatattatttttatagtttttttgtgtgttttagaataattatattatttagtattttttttttttgatcaagaagaagaatacttcattaatctacccaccaaatacaaacaatatcacttcttaaaaagaagcaaccaccacaaccaacaaataacaaatcaatttgtgaattaaattcttctcctccctaaaacaattcctatctttaatcaataagagcctatacttaacttcacatttgattttatttacaatataattcacaaaattagactataaggaaaacaagcaagtgttacggttgctccacaagtgatagatcacagctggaaggattaaaactcttatcatgtccaccactttcggtcttaaactactcaaccaaatagtccaccgatcatagtccatagaccacccagctgtgcccatccaaccaaacactctgtacagcacctgaagagaaagattaaacttgaaaaatatatggttgtggctctcaatttcaaggtcacagaccacgcagttcagattagatataggaatgttcagcttgcttaattggtccctagttaacagcttgttttgagctgcttgccatagttggaaagcatgtttcagcatgtttaggccattccaaatcgcccctgctgctaggaactccctcggcttcagtatactgttatagagcttgctggttttgaatttttctccacccgctgccagaaaatcagctatgctatatgttgtttgcaacctacaaagtttcctccaataccaactagtatccatgctcatcttgtaagaccagaaatcactccctttgagataaattgagttaatccacttaacccaaagaaggtcttttttgttcatcaaatcccaaataaatctagctaaagaagctttgttacatttagttccatccttgaaaccaagaccaccaaaggatttaggaaggcaaaccttttcccaactaatcaaatgaactccagcaggattatcctttaaaccccaaaggaagtcccgaaaaagtttctcaatctcctgtatcacactttgaggcaaaaggaagactcccatccaatagttc

SEQ ID NO: 34645 - DNA, 3526 bp, Cannabis sativa
  modified_base (52)..(63): a, c, t, g, unknown or other
aacatgagttcatgattactcatgatgtagaccgatctactattgatcatcnnnnnnnnnnnnattaggtctttatagtaaatggcatgttgataaagatagcttaatttatatcgatctttttcatatataatctctattatatacatcaccttcacttaaatgtctctctacatcaataatccaaactaagataacttgcaccgtagaacgggcatcaataaaatgtagtagcaaccattaattaaatattccataactttaatatgttactaattgttttattcatatagttaagtggtcttagttctctgtacagctacaacgtcatacataaataaagaatacatttatatataaaaattattcaataataaatattaataatttaacattcaaggatatatcaaatgttcaactctttatttaataatcataaatgtctttattagcttttcagggcataaaccccaacatcttcttcttcatagccttttgggtaactttcgagcccatagtcttaatcattggcgtcatcttcttcagggtcaactcaggacgccacgtctttgtctgggcatcgtggaggattaggttaaagaaggggcctctagttattttgggtgacgaccatgaagaaattttcccccaaggataaaaaagagcagtgtaagcttcttacagttctcaatcaaagcaccaaaatgttgaccaagttttcgataaccaaattgatatataattagtagtaaaaaggaaatatttaagagtgaggattttttcaacaatattatttcgtaatccttgaaatccttccccttttaaaagtggacatggagttctatttataggaatacacatagacttgttagtataactaaaggcctttctcctttacaattccctattgtttgtatcagtaatggatggtttccttagtgtgaagggttttccctatgtttgcttgccgaataggcccaaagtaggtgttttgtgagaaatggcaaggcttgtccgcgactgatatgactattgagggcatgaactgcatgaacgtgtctggaaaagacgcatgtaagaaaggagagtggagaaaattcctaagtttattttctttgtgagaaactcattttatcgcttgtacggaagggataagctacaatactttttctaagtatacgctacaaaagtgggaccacatgcgtcaagggagatccgagaaatcttgaccttaattccgagacattatttgttccttcatatttttcttgagtgaattccttgggctgacgctactctccggcaaagtgcctccctcccaggactatccgtacctttcccaggagatgattattactaagtgtcactaggtcggaatccacttgccacatagctaactgcctgaccaccacttgtatagtctgaattttaagataacacactcttagatatataaatgaaaattattattttattcacttgatatagaagatacttttattttaacagtgaaaaatgttgtcgcgaaaacactaattagagatgttatgcatcaatttctaaatcaattgcataatttatattaacttgagatttgataaatatatttgttgtattctccttttataattttttttttattataagttaaggtatttgctaaagtaattttagttcttgttgattttaatatacattttaatgtaccaacaaccaggttactatttagttttatttttattgttagctttcatatatgtttttaagtgttatgttacttttagtcctctatttttgttgatggtttttaaatggatttaaagtccatgttacttcatgttgttggttttctatggattccaatgtatctgttactttttttgttgttgattttatataaattttaagttaccatgtttctttcttggttaggtatagtttacatcgtaccaagttacttttatactttaagttatatatcattgttggtattgatataatatatacctaattacgttacttttatcttgaaaagtaacttggtactgttatgtaatctaacaaaaagtaacttagtacttttatattatttaataaaactaattttatactgttatttaaagagagaacctggtacttttaaaaaaaaattgacttagactgaagtttacttttattttaaaaagtaacttcacacttttatgttctcgaaccaaagtaacctaatactgatatactatttaacaaaagtaacttaatactgttattaaaaaggtaacttggtactccaactggtaacttaatctgaaacaaaaaaataaccaaaaaaaattgacttacagtaaactttacttttatcatataagtaacttgacacttttatgttatctaacaaaagtaactaataattatagtataatgtattagaatggtaacctggtattcctcttcgtaacttaaactgaaacaaaaagttaaccaaaaaaattgacatacagtaaagaaagaaagagaaattctatttgtacccggcaaaaaaataagcacatcttaatatttaaaaaaaatcaagcttacaataatttttactgttcttataactatttgtttactatttcaaaacaataataataggagatgacctcggacaaggatgtttgagacctaatacaacaattaaagcaatggagaacatgatgaagtaatgaacattaactaaatatgtgatgaatatatataaagtagacaaagaggactaacctttggagaaagatagagtcgacaatggtaaaagagtcttttgattgttagcaggcaaagttaaagttaaaagagtcttttcattgatatgagatccatgtttggtcaaatggtgaatgtttgtaaggatatgtttaaggttttaaaatatgttagtttttattttgttagacgatcagctaatatagtgtggctcataattttgctcgagcctatattctaccctaattgcactttcagtttggagtctattacaactgatttgttacctattttggtagcagagatagttatttaataaaacttattttcattcaaaaaaaaaaaagtcaaagaaaatcaataatctctctccaaatcttcatttctagggctgacgaaaccaaggattatcaaggtgagtgagtcccaaaacgaaagcccaccatacaatgcatgccatcgttaaacgacatgatcaccaacatgagaaggtaaccgatcgcatcgcctactaattgccaaacaaaaaacctcattaccttaatttggatattccaatcacaacattattccctctaattccaaaaatgaacacataatttataactaaacaataatatttattatttctcattttttattttctcaccatttgtgtttttccatttcaggatttatatatttttaattaattttttaaatataaataagtttgaatatgatttttttttttttttttgctttaatacgaaatctatatttgtttgggtaaaattaaaaaatt

SEQ ID NO: 34646 - DNA, 1897 bp, Cannabis sativa
  modified_base (1113)..(1114): a, c, t, g, unknown or other
atttagagtttaatggtccgcttccagatctggttccaatttcgggtcacagggtacgatttaaggttcgggtgtgggtctgggtctgagtcctgatttaggtctaggtctgtgttttacgtcaggtctgactcttagtcccaaatccaaacacaaaccacatgtcgagtctagtttcgagttttggtacgggttcgagttcttgtctgggttgaggtcccaaccttggtctaattaccagatttagacactgaatatgggtcgggtccaaacctcgggtcttgggtccagtcctgggtataaatccagatccacgtcaagttctagctcatgtgttgggtcttggtctgggtcttatgtccaactttgggtctaggtttgggtcttcggcctgagtcatgggtctgggtccccaattcaggtaaggtcctaggtcctgatctgggttagggtcccagtccgagtgtaggtcccggtccatgttcggaactggtccttgtctcgggtctttgcctggtctgggtttatttaacagttcggttttgaggtcccgcgtttgagtatcgggtcccggtcccagtcccagtctaagttctagtcctaggccaagttcaggtctcggtcctagtctgggtctaagttcgagtcctaatctatgttcgggtctgagtcctgagtatgtgtctgagttttggtacgagtccgggtctaggtccaggtgtaggtcttggtttgggtgtgggcccagtttttagtccgtgttcgtgtctgggtcttggtcttggtctgggtctgggtctatgttcgagttctggtacgggaatgggttctggtccaggtctcaggtcacgggtcttaggtcccaggtcatggcgcatgtctgggttagcgtacagtcctgggtcctgttatttatcccattctaggtccgagtctgtgttcggttccttgtcttgattcgattttggatcgaggtccaattcctattccagggttcttattctggttcttgttcctatttcgggtctcggggtctgagtttgggtttgggtcctggtctagaaattgttcctggttcgggtcttggtacgattgcaagatctagacaccaannacgggtcgggtccaagccccaggttgtgggtcaacatccggatcccaatctttggtcccggtctcatttccattcggatcttgggtcccagtctatgtccgtgtccgggtctgggaccaagtccatggttgggtctttggtttcagtcctagtcttgagtcttgattttggttctaagtttgagtttgggtccccaatctaggtttgggtccttggtgcaggtctgagtctcccatccaagtctgggtcctgggtttgggtctaggtccaagtccgtgtctcggttcgagttcgtatctcgagtcccaatctgggttttgattcagataagcgttctgatctgggtccgcgtcctgatctggatctggggtctgggtcctagtcagattctagttcccgaattcaaacctagactcagacgcggaccttggtcttgggtacgggtctgggtctaggccagggtcttgttttgactccgggtctgggtttgagtccgcatatgggtactagatccaaacactaactacgggtcaggtccaagccctgggtctagatctggatcacagtctcgagtccttgtctagttccacttggggttcaaggtcccggtctggctcctaggtcaaggtctgggtccaagttcatatcttgggtctcagtcccaattttgatgcctgtgtcccgggtctatgtctgagtcctaggtctcggtccgagtccaggacccgatcagggttcaagtctttgtctgagtctagattcaggttccgatctcggtctggg

SEQ ID NO: 34647 - DNA, 2313 bp, Cannabis sativa
tttatgatatcttatctaagttcaatatcggtccagtctgatgtatactctatacatccgatactagtatactttaccaatggcttggaaatgtcatatcacttatccaagtgtgagtaaactttatcgttgattgttatgtcagggtaaatctagtgcatttataaatcacgagacttaaactttgaagcatataatcacagttactttccactgtgatgacaccactgtaatctatgaataactatatattttggatttatcaaaaattgtatattaaatcataaacatgaaaataacatgtaaacttaaatgacttccaatcttctattgatagcaaataatattatattagaatagttatatttagggcataaaatcccaacaataattagtgggaaagatattttagcatgggtgcaagcaatagaagaagagaaactgtatctcttgaaatacaaaaccttgatcatggttaagaaactagaaggtcagaaactggtaagcgacaaatggctcttcaagcataaagagagcatacctggagttgaaaactctagatacaaggcatgattagttgcaaaagggttcgcacagaaggagggtgtgaatttcaatgagattttctcacctatggtcaagtaaacctcaattagaggcatgatggataaggctgcaaaatccagtcttgaggcgtacttagatggatgtaagaacaacattcttgcatggagaatcagaagagaaaatgtacatgaaacttctagaagggtttgaaagtaaaggtgagaatcaagttttccttctacagaaatctctatatggcctaaagcaagctccaagacaatgaaatttgagatttgattcctatatgatcaagattggttttagcaaaagtaaatatgatacctgtgtttatttcaacttccataagggtttgaaagtaaaggtgataatcaagtttgccttctacagaaatctctatatggtctgaagcaagctctaaggcagtgaaattttagatttgattcctatatgatcaagattggtttcagcaaaagtaagtatgatacctgtgtttatttcaagaatcatatctacttattgctatatgtagatgtcattctaatcattggcaagaaaagattagaaatcgataatctcaagcagaaactaaatgaagagtttgaaatgaaagaccttgggaatgccaaaagaatcctgtgaatagacatacataggtccaaatcaaataccattatgctatctcaaatgagttacatgcaaaaaatcctagataagtttggtatggacaaatccaagcatgtacctacaccctttggctcaacatttcaaaatgtctgcaacacaatctctaagcaatgaaattgagaggctcaagatgtttaaatcccctatgccagttatgttggaagccttatttactagacctgttctagcacatgccatgagtgtggttagtaaatacatctcaaatcccagaacaaaacattaggaagccctgaagtggatcatgaggtatgtgaaaggcactctgaacactgacattatgttcaacaatgacaaccagttcaaggaagaagtaactggctttgttgactctgaatttactgcaaacattgacacaagaagaagctgcacaagttatgtcttcactgtgcttggagggtgtgtcagttgaaaatctaatttgtagaaagtagtagccctatcatccacaaaagtcgaatacatggctgcaactaaagccattaaggaagcaatatggcttaagggactgactggggagttgggatttaatttagagaacactacagtcccttgtgataaccagagtacattgcatctcatgaaaaatcctatgtttcatgagaggtaaaagtgcattgacatcaaacttcatttcattaaacaggttcaagtgagaaaaatatgcacacatgagaatcctgcagacatattcacaaagacaaagtgtgtatctagagataaattttctcactgtttgaacctactcaacatcatggattgcaggggctctcactagctcctgctcctcatttttttttttggacagaagtaagtgaatcaaatcaggtgaaattgttgtggattcgatccacttactctatctacatcagcactctcattggcatgtgtcaagagtggtagttaagttggttacatttcactcttaaatcaactaatctaactgtcactctatatataaatcattacagctaaacactcaagagatatcagcatcaagattagtcctctccctgtcgagaa

SEQ ID NO: 34648 - DNA, 1316 bp, Cannabis sativa
attagggtaacctagctaatcatgctaaggaaaacacagaaaaccatttctttttcttctcctttttttaataaaatgcgtaaatatattaaaactcaaaaatgttagaccttatagtcattacataataatttatttgctatggaggacggatcgaccttacattactggcaaaagcccacttaaccacattatgggccacaaaattacacagtctaaacataaacgaaaagttacgactaatcaaaaagtttgaaagatttttacattgaagcacatagttaccaataccccaaacgaaacaagtcccgtgagaatcactctcaattatcacaaacgaatgcttccaaaggatcgctgatttcaaggctaacacaaacaggtcgttgcttctccaatgagtgagtcaaagaagttgagcatgttgatagccacccacaaaactgactccgtgtggtctttagccaaagccgccacgcacattgagtcacaaccaactttatcgtcacagttgattttgacccaatcttctggagggagagaccaagcaggagtcgcaactgtcatcggcgaaggaaatagacaagaactaaaatctacgtaacatatagaaatagaatcaatacaatgcttaatgttacatataaaattattatgaatcttatcgtttcagattttctaatggtgttgaaagatggctttaaatattttgtgttcctaaaggagtaacctttaataagagactctaaagagagtaccctctttctgcaaaaatgtttactcatttggatagaaataactaagtaataattttttatttataaaaatgtttttttgtttctagtactaaattgggttgcaacatgttctacccacatttccatttagtttttctcttgttggattttcttttgttagtttattactcaaagagagaggaaataataagaaaatacattcttttcaaaataaaaatgttttattctctgagtctcatggatatatttactgagcatattgaacccctatgattttattatctgaggagagaattcgtaaaagaaagagtttatgggcatcaaataatcttgcaaaataatgaagttaacttgtatttataggctcatagatgggtcgtagatctcaacaacgttattgttaatatttttttaatcaattttttattttttaattaaaaaagtaaaaatttattcaaaatatatgttctataaaattatttttactttcaatttaaaaaataagaatcaaaataaatttttttaaaaaatcactttcaaaattttttttaaaaaaaa

SEQ ID NO: 34649 - DNA, 1078 bp, Cannabis sativa
  modified_base (761)..(769): a, c, t, g, unknown or other
aaaaatgcagaaaattaaatcttaattttgcttaaaatcccttttatgaaccttactccaaaatgacaaaattacacaatcgcccttatgaacataaaacacccacataagcacttgaaaggtaaaatagccacttgcacacacaaaaaaactcaattaatttttcagattatttccacataaataaaataccaataattaaacccaaaattatatttcggcccgaaactcaatttggcccgaaatatccggttgtgactatactgcgccaacttgtcagaacacacctgaaaaatgacaacacaagcatactatataataatatagtccataagcacattaataaattaatttcactcttttacccttctcgtgtcgaaattactaaaatacccctagctcacctacagggtcttaatatgtcttatctcatattatttcacatataataaattatataataatataattccacaataatactcaattaactagttagggttttgctaatccatttccttaattccaaggtgttacactaatggacgttcctccattagggagatcgaatgtctcttgattaaagctcattatttttttaagaaaatttatttttatttaatcatttcttttaattatattttaatgatgaaaattataaattaaagttggtccgaaattaattgaaaattattttccaactttaatttaatttttgaaaattatatttaaatatataaaatttgaaaaataaataaatnnnnnnnnnaaaatataataaaataaaatttgtaaataatctaattcaagttgttctaaaatatctaaattttcaacttaaattattttcaaacataatttaatgaaataaaaaatttactaaccacctaatttgaaaaatattccattttacgttgatccaaaattaacaaactttcaacttaaaataatattccaagagtctctcaataactaattcactgaattcctcaacttaattttgaatttcaaaaatattcaaattcaagttgattcaaaaattagttataagtaactaatttacaacttaaatagaaat

SEQ ID NO: 34650 - DNA, 1167 bp, Cannabis sativa
ttggggggttatgtcctacatagtataatagttatctagttgtgatatattattatatttgatttgatgttgtgatattattatattttttttaattactattacaaagtataatagtaatttttatttttatttacaaagtatatatgttgatatatgcatgcaagtatggtatgaattgatttgatgttgtgatattattatatttatggctatgttatctagttggggggttatgtcctacatagctcttcttattgggtattagctcacaggtactctgtgtgcgggtaaagaaaaaaccaaacagtgaagatgtgagctcaaggcatggattacatgttaggggattgtcacgatgttttggttttaattatttcatttaagattatgatacggatatttttgtaaagctttataatttaaagattacgaataaattaatgttttatttttaaaataatgagatctcatgcttagttatttttcaataaagaagtctttctttgtgtttatcttaaattattttgtacggactatcgtgtgtagcatcttgggaaatcgggatgttacacatcattttggtgaagtaaccgtttcagataaggataactagcggtttccagtagtaaatggattcatcccacatgtaataaatcaaatgagacgcggagattatccacgtttcatgaacgattatgaagataagaacaagaggaataaccgtcgtcctcaatataaataggagaagagtttcctgtgggaggggtatgaatgttaggagaatgcaaagatctttacgattaatacttgtatgatacttgtacttcgtataaataaaaaaactcgaaaataagatagactcgtgaactatgaatatttaacttcaaaactacgtaaaacttctttgtctattatttacagtcatctttctgaattatttaattgttaattaaagctcacttattagttatcaaaaaatggcgttaatatgctttcattgagagcctttgagaattaaactcaaaaaaactccattagcaaaactttcatcatcttcccatcatggaaaatactccaaatgataatctcgtattaaaaagggggcatcacaccatcttgggaaggagtctcaagtggcaaaccctcatgaagacagaaatactg

SEQ ID NO: 34651 - DNA, 1132 bp, Cannabis sativa
gaactcgactcaatttgaattttaataaacatctttattcatgtattggtcgaagttatgtctgttaccatagtaacttacatcaaagctagtatgttgatctagtctgatctttagcttagtatacacaaaacaaattgaaaaaaaataaaaaatcgtactttcaaaggtgatcatccgacctaagtacttgataattttatctgaaactttgggcatggttcgctcagaaggccattcacttaagagcaaatgttcttttattttgtacttgaaatggtcatccgatctggtatttttatttgtagtattttcttaagtgttcctcgttcaaataccttggtagtaaaacgagttgcatcttttcgtcatacttccccaatttgtatgcccctgattctagaacttcgaccacttgatatggtccttcccaatttggtccaagcacaccagccgtactgtctttcgtgttcaaaaatactcttcttaggaccatatctcccacaaaaaattttcgtgctctcatttgtttgttaaaataccgagctacattttgctgatgggctatcagctttaggtttgctgcggtttgtttctcttcaagttcatcaagtgattcttcaagaagtacatgatttacttcttggttgtacgctaatcttctgtgggtttgcggttagagttgtacaggcagcatagcttcatatccatatgtcatggaaaatggagtttgtccggtcgttgttttctcaattgtgcgatatgaccataatacttcaggaagttcctccggctagtttcctttagcatcctcaagtttcttctttagggtgtccttgagtgtcttgttgactgctttaacttgaccattttcttggggatgtgctactgctgagaaactttatatgatcccatggttcgcacagaaatcagtgaaggaccgactgtcaagttgtttgccattgtccgacactatcttgtatggtaatccaaaccggcaaattatgtttttcacaatgaagtcttgcacttttttggacgtgatgttcgccaatggctcggcttccatccacttggtaaaataatcaactgcaatcactgcatactgcactccgcctttgcctttaggtaa

SEQ ID NO: 34652 - DNA, 5597 bp, Cannabis sativa
ttttttttttttttaatttaaccaaacaaatctcacttatatgtaattaaataattaaatttgaatttaaaatttaaattttcttagacagtttgatcgtactgattaaatgtattcaaaaaaattgaatataaaatactaaatatgcatgattttaaaatatagggtaccaaattagtatggttgaaaacacagagtacttaatttatatttagataaaacaaaaattaccaaatgtgtttttatttttgtgatgtgtatttttaaaattttataaattaaagaaaacaacttattaattttttaattttttttaaaacaatatagttttaaaaatttaaaaaattttaaaaataaatataaaatttatgaatattaaaattaaacatactctcaatattaaaataaaaaataaaaaattataatattacaaataatatattaatatttatatataattaaactaatttataattaatataaattcaattaatatataataaataatattaaaattaaaattttatatatttataaaattaatccaactaccactattaaatttaataaaatattctatatcaaaattcattattttaacttaataataattattacaaaatatcaaatcccaccagatagcaattgtcatcatcacataataaattctcatcactgatagatagtctgcagttgagcttgagcagcaataattattggctgtgatcaacacgctccattaaatcgcgtagactagcccatctttagttcgacaccgtcaaaaatgcatatttatttaatttaattttaaaaattaaaaaaaaaataaaaatgtttatttcgtctcaaaattattagattagatatcaccaaacactaaaatcatataattaattaatcagtccttcttcaacaaaaataatatgaaattaaaaacaaagccaacatacaaaatcaccatttgctcaaaattccacaatttggcaaaaaagtcaaaatcttcataaactcaaaaaacataaatatcagtagccatttttgctctaaatttaactatgaaattttcatcataacagatttaaggtcttcaagtttgttgccctcaactactactcatatgttcctttctttaagctcgaaaaccccggctaagactcaccatgcgtgtggaagaatccatctgggatcccctcgaacccgaaccggttcttcctgaatcttgataccttgacccccgaccagctcctctacgatcccttggagcttggccgaattgcattgctctaccaccaccgccatatcctgctcgtccagtaccgccaccttgcttaccttgattgtaagaaaagttctcttgccatctactaccaccgccaccaccaccggcagcagcagcgtagtcttgaccatctctacgcctcataggcagctccaatccaccgccaccagttcgagcctctagtgccctctcattattctctgcaaggattgataacttttcagtcaattggaatgctaaggcctgcagcctagagtgctcaacatcttggaacacaatgcaattagttggctgatcccaacttgcatagagttcctcgttgatcatcatcttgctcacgatgctgtgtatctgagcttccgagagatcaaacaacttggtaagctggtccaaactcagagattgataagacgaggcataggtaaagaggtaggtcctcagtgcctcttccttaatcttagccttgagcatttcgagaatgctttcacgattccttaggagcttccaaacatcgagggagataataacatcaaaagactgctggaagtcacctttgaggagggccctagttgcagccattacatggtctctgacattttcagggggaccggtgaaagtttgcttctcactaacctcaagcaaccgccggaaattcttacttataaccttcctttttgcatcgtgcatgttggctgccatgttaggcacttcaagcaacatggcgcatatcagatgaacagcttccaagagttcgagatttatatgcatatggtacggcatctgtcgtctcctttcctgtctttcctgtaaaaattaaatattcactgcataagatcggaaacaaagcactgttttgtaatccaaaagtaccaaactgaaagtgggtaaaaaactattgcagggttgttaggtgccattaaaattgtcaagggcaaaagcataacaactcataaaggtgtagaccccatatcataatattggagggtctacctgtattagtttgtagtgctccacactccaatagcaatacttattttactaatgtcctctcatgaaacaattttcttttagttctttcattcaaaacaataaaaacaaaagagacagcatgactcgattgttgtacgtttcaacagtcaaatacaatgataatgtatcaattattagattgatgatgatgatgagtactgcattaaccaaggaacctttaatgcaataacaagtaggatgaagaatgaccctactaaaccaatgattgacaaactgacagcatagcatgcctataagcgaccccatcgtgtccggtaataagcataggtcaatgcaaaaagaaaaagtactcccaagtaatatgaccccctgagaacttcactattaaattaaaaataatacattattatcttactacaattacagaaaaatattggtgtcaaaatccatttacaaacatttgatagttcaaacatcaatgtctaagaactaattagagcatttataacctctctaactcataactccaacactgctgaagatatcattcttctaatcccacctccaactgtcctacatcctaacaacacagcattgacactaatacaaatcgttcatctacgaataattaaaaaccaaccaacaacaacttcatctttcattttaaatcttttattctttttaatcaagatgagagaaatacacagaaaaatctttcaacatacaaattagatgaaacctccaccctgtaagcaataatcgaagctaattctacaaaaaaaaaaagacaatgacaataatctacgaaataatttcctactaaaaagtatatttagaaaagaagtacctgttcaggagtcttctcatgatacctgctttgtgaaacaccttgagcaagcaattcctttacccttccaccagaatatagctcggcaagacagctatgtccttcagtaactagtccaacccgaaatgcacatagaccaagttgtgccatggctctgttaaacagtatctgtgttgagatgtccatgtgctgaacattatcctgcaagtgactcatcaacagcaaatcacgggaagttgaaaactcatccaggagagcatggtggtaaatatcacaaagcatagcacgagctttagtacgctcatctccatgcttatatataagggataccaatagatccagaaagatcctgctactctcgggaaaagtgggctttcggggaacaatctcaggcgtagcaataaatgcagatggacctttactttcttcgacctcctttggcccctcaggtgactcttcaccattatcagtcactccagtatgctcagctaaattcctcatggcatcgtaaacttcttgtggcttataatagatgtgttcaacccgctttaaagctacctttgaagcagctttaaaatctccagctcgctctaaatagtcttgaacattttgagcgagaaccataaataacggctcatcccttagtctttccacatactcacgtgtatgtgggtcaatgagctgcaagctcttaaaaaactcattatccacccgttccaaaaaggccactagattaccccaaacccgaattgttccatcatagtcttttcccttctgggattcattctcatcaggctcaatcgtgtcatcaaccactatgtttgcattctccacaagaatgtcaagtatgagaagcatgttctgcacacacttcttccacacagttataggcatgtgtccattgagccctgggttgacatcaaactgagcagaaacaacactaaagagtatttcaagcttttgagcaggggtcttagcaacctttgtcaagaaggtaagctgctctacctgttcaaaccttccggttccctttctgcccctagcagccacaacctccttaaacttcttgttaactatgtcccatgtgatttcactaggatccttcatgagttgcttacccatgagcctttctctcttgctcaccttagtctcccaccccgcttcagctaagttttctccatcatcctccccatccccatcctcatcttcactaccagactgaacaatcttggtaatatcctcttcaatttcagaatctgtttcttcctcctcttccgactcgtccccaacatccctatcctcttcaacctcaggattctccctatacttattgatagcatcctcatacagcttattgttcttcttcaatttttgtttcatcgagttcaacgccttggcattgctactgctcatcttcttcttagcctccttattagccaaagcttgagtcaaaaaatcctccagcatcacaagagccttgatatatagcgtaggaaccttcacagcctcggtaacacgcataaccttctcaagctgtttattcatcttgtcaaagctctcctgcaagctgacccaatcattaatcttcattgcattcttcatctgatcaacagttaaagccatctcctcgaaacgcttgtctttcgccgatctaacaaccctcttttgcccatcagaatcatcactgtcactggcattttccctaaggtacctattaacagtaggctcggaggttggctcaccacctccaatctcaatttcctcatcaatgtcactctcttcctcctcagagtcacttccaggctgaaattaaacacaaaaaaaatcatattttcaaaagggtttcttaatttaatttcattttttctaaatccaacacaaaaattaggttttcattcaaaaacaatacctgggtccagaatcgcgatgccatattttcgcagaagaaaaactattcaaaatcaaagcgcaaaaatctgcattcggaaaacaagggttcgattgtttcaatcaaataagcctaaaatatgaagaaacataaaaacttggttcctaaatctgaagaattacaaagaacaagacgaccaccttgtttgtttttgttagcgaaaaaagagaaaccaacaacagataatatatagcaacaaaaaaaaaacctagaagaaagggctcaccggagaagagagaagagagaagagatattagatctggggagagcagtagtaagaggaggcggcggcggcgagaggtgtaagagtgacgatacttggtgagaatggagataacagagggtttcgcggtttagctaggttttattggttatgtgccttttcttttttcaatggaaatgattattgttttattttttattttttttttaattatttacttggattatttattgtttttttaggctaattagtaatttttcccccgaactttacatgtactaaatcgtgcccttgaacttttttagccgtt

SEQ ID NO: 34653 - DNA, 2479 bp, Cannabis sativa
agacaaacaaaaatcctcagaacctgtcagcattcattgctacacctgagatggttgaggacgatgcctggtatgcagacagtggcgcaagtaatcacaccacttcagacaccagtaacatgagtcagaagactaagtatactggtaaggagacactgtcggttggaaatggtaataaactctctatctctcatgttggatctagttttattcctacctctgctcaacccttaattttaaaagatgtgcttcatgtacctgagattaccaaaaactttgttagtatctctaaactaacagctgataatgatgtgattgttgagttttctgctggttgttgttgtgtgaaggacaagggcacaaagaggaagcttcttcaagggagacttaaggatggactctatcagttcaagaccactccaaccgagtcaaatcaaagtcataacacttactccagtaaacaatctgcctttctagttagttcctctaaatgttttcaatcaaatgtaactcagtctttcatctgagcaaagtagtctttcaattaaggataagtggtataggaggttaggccacccatccaatagagtccttgatgtagtcttgaatcaaattattgaaaagaattttaaaaatgctactcatcatttttgtgaagcctgtcaatttggaaaagctcatagcttacccttcaaaataaataacagtagagccacacacttgcttgaccttatacacacagacatttggggactagcacccattatgtctaacactaattataaattatacatacacttcatagatgaccatagtaggttcacctggatatatccactcaaagctaagagtgatgctctcactgctttcattcagttcaaaacccttgttgagaatcaatttgacaggaaaataaaaagacttcacacggattggggaggtgaataccaagccttttccaagcttgttgttgaaaatgggattgcctttgatcactcttgccctcatacttcagcccaaaatgggagagccgaaagaaaacacagacacattgttgagatgggtctaaccctcctagctcaagcacatatgcctctcaaatactggtgggactcatttcaaactgctgtttatttgataaacaggctacctacaccaatccttaatcataaaactccttttgaaatagtgaactctaggaaattagattacaaatttatgaaaacttttggtgtagcttgctacccttgtctaaggccttaccaaacacataagtttcaatatcattccaccaaatgtgttaaccttggctatcactacataagtgttacaagtgcttgagtagcactgggagactatatatccagaaatgtgattttcaatgaggatgagtttcctttcaaaactggttttctcaacacctacaaaactgagtctcctgttcaagttatggttccattctggtctgcctctctcaatactcattgtaaataatacttccacacactcatactcgcaacaaagccaaacaactcgaactgatagtatgcatcttgaggaatctcgaagagatgctactgatacaagccttgtctcaacagacaacggccaggtaagaattactacaattactaacagtgatgatgaaatggtggatattgaaaatataccaggtattgagcaagaggaggatggagacaacatgggtgtgaaggaaaaacccgaacttactgctgtaagtcaagtccctacaacagttcctacacatcctatgatcactcgctcaaaggatggaattttcaaacccaaagcctactttggaaagactaaatgtgctactgtgcttgaagaaccaaagtccattgaagaagctctcaaacatcctggatggtcaggggctatggatgaggaagtcatagctctcaaaagaaacaaaacttgggtgatggttcccaaaacagccttcatgaacataatagggaacaagtgggtgtataaaattaaaagaaatgctgatggattggttgaaagacttaaagctagattagttgcgaaaggctttaaccaaagacctggaattgactatggagaaacctacagccctgttgttaaagcctcgactgtaagaaaaattcttaccattgctgtagcaaaagcttgggatgtcagacagcttgacatcaacaacactttcttgaacggagaacttgaagatgatgtctttatgtaccaacctactggctatgaggaccttgagaaaccaggctatgtgtgtaagatcacgaagtcactgtatggactcaaacagacccctagggcctggtttgagaggctgacatcaactttgctgaagtgggaatttaaaaattccaaggccgattcatcactcttcttttacaaagcagattctgtcataatctttgtgctgatttatgtcgacgacataattgttacaggtaacaatggagaaaaattgaaa

SEQ ID NO: 34654 - DNA, 2715 bp, Cannabis sativa
  modified_base (370)..(380): a, c, t, g, unknown or other
  modified_base (568)..(569): a, c, t, g, unknown or other
agcaacataattaattttaaaatatatgaaaaattaatttttcattagataattttaaaattaatttagaaaaacatacttagtttaaatggaataaattctagatagtgatttctagtaactaatttattttttttaattaattaagtagaaaaatgtatttaagttcaaaattaattttaattaattttagagcaactgaaattagaatattttttttttggatataaattagaatttataaataagctgattttattcaagatacttaattatttgtttatattttaagaaaattaattaaatagaaaattatatttaagatagaaattgatttttaatttcatatcaacttaaattagaataattnnnnnnnnnnnttttattttattttaataatttttatttatgcaatttttgaaatcatttaatttttaattggagatattttaaaattttaaaaattagattaaagttaaaaattaattctttaatttcaaattaacttaaatcaagtaatattcattaataatttattaaaatcaatagactaaaatatattatattnnaattagaaaatcaataattagtttatgaaatatgtggatagctattttctaagaagactatattagtatttttctagatatatttaattaaatagaaaaaattaatatttaagttaatttatttaagatacataaatattagataatttttaagaaatttaattaaatagaaaaattatatttatgttaaaaattgatttattaattaattttagaccaacgtatattagaataaattttagatatttattttatttaattttaatctaaattcaaaaatgttttttttcattaaatacattgaatttataatttgatgatatatatttataaaaaaaattagatttgagttgaaaattaatcttcattaattttggaccaacttaagtaaaataattttcattatatttactgaaaaataatactaaggataaaaaaattaattctatttatttttcagatctacctaagtgaataattttataaacattaaattaaaatttatatttagaattaattaaatttgtaattttaattaaatatatataataaaataaatagattaaaataagatatcaaatgaaaatacaatcctttaaagtaatgagttttagattaaggatattcgatctccattgtttgttctacatggttcttgttttaatgagattcatccctaatagatgttaaatcattagcaatttaacaccatagagtctcaagagataagtattattgtaatttttttattcttagtaacgatctttgactgctaagagtagggtttacaaagtatgaaataatggtagaagctcataaaatgagagtgaccttaactctcgcctaaacgagacaacatcagattcttattttgatcaaataaaaggttactaaaatagtgtccattttggatgagctgacaactttatttaactaatgatacatttgactctcacctaaacgggacacttatattatttagttgaaaatcttagaattataatattaagaattgatatcacagtggcgcaaccgtagtgtcaggttagtagtacgagcatagtattgggtttgactgatatccaattctagttagtattaattgaggctatcatagtgatacaagcatagtactagattggtagtacgagtatggtactggttaaaagtgatatcatggttaattatacttttaggtattattgatgctatcatagggtacgaacatagtaccgagcccgcaacgtgatcataaaactggtagtggctgatatcatggtcgatagtaccaaatgttaagaacgcttttgatcatctgttaagccttgtagacaggtgtctaggcacctaaatacaagttgatattatgttatgtgttatatgcgtttcttactaagtatgttgactcacagatattgtttgcatgtgtaggtaaaggagaggataaggctaaacaccaatgactctagagcttgggggtgattgtacatatcaagatggttagacctggagagttcagtctcgagacgacttattttatagtcattgtgtgacatgtttgtaaatcgtaatttgagtatggatagaaattttagaaatgggatcctaactttttgtatggatatttatatatattaataatgtttaaaagattaaattttatacattttttgaaaagccatttgattagcaaaggtgggcacagtaattagaaaatcattgtagcgtgcttaagaagttgggcgttacaatttttggtatcaaagtcgccaatatgtttatcgaagaccatcaagatatgtacaatcatcatcatagataagctcgactcatggttctataagcttttgcgtattagtaagttatgtgattaaaaaaaagcatgttaataatatgttagttatttaaatatgttgtcttaaatttcatgattgcagtatttgggttatatgtgatctgtctgaccaacctgacttatgggttcgcaaggcaagtcttataatatggacacccagcaaaacacaaggagttatgataatatggttgagactggaggtggttgggaaggtcagaatctcacaaatccccgtggacatggcaaaggccatggaaggtttcaagaaggtggttatgaaaatccacgaca

SEQ ID NO: 34655 - DNA, 1318 bp, Cannabis sativa
atcctggtaaaataatttcagcagaattttagtttcgtagtagtttttctgtatttttttttcatgaatacgaaacaatccctgttttgattaatttcgatcgtcttctcagatgaagtgccagaattaatggtggttctttttctagttgggtttcgtttcggctgtgttgggttgctaggtggttgatcgaagatcgcatcacatgaaggtttcaatcctagaaaacgtggatcgtgggttgaaggtgtgtgtcaaaggtagttgtgtaaatttttttatttgggctgtaaatttgtttatttggtcaactgaaattttttttgtaatattattacctttttttggttaaaactgaaaaagtcctaattctttccttatatatatattttacttatggattaaaattttaaaaaattactattgaacaagttttctaatatatggaacacttctcaacatatattatgtattattttagttgtatggaacacttctcataggtaatacccattcataggtattatatttactaggtattttttactttatttaaaagttatacaattaataattaaaaaaatattattaattattaggtgagattattattatgtatatttaaataatatatttcataattttgacaattaaaagaaaatacacgatacaatatattagtgtttaagaaagcttgataatttaactgtaatatacttaggttgatgttacgtgcaatacacgtataattattattatttttttaattaggttcaattaggtgatgttaagtgcaatacatgtatattgaattttttctaattaggtaatgtatttttaaaaaaaaaaaactcaatggggtttgagattttgatctttaagaaaaaaaatttagctattgctacattggagtgtcatttggatatgattatacatatatattttaaaatttataaagttttcttaattaggtttcgtatcagataatcatattgtaacgcccatatttgaaaacttgctaaaaaaaaattagtcttatcatattataattatataaccatataggtcgggattccgagtttaaaacatagtttaaaattacctttacaatatatagttaggtaaattttttttatttacacaaaatacagggcaactcaaaatgttataaaatcgagactttccaggttgcactgccgcgatgtgtacaatcctgaccgagctcaaattcactgctcctccagcttagccttttccttacctacacatggtagcaaactgatgagtcaacaaactcagtaagatatgcataacatat

SEQ ID NO: 34656 - DNA, 1643 bp, Cannabis sativa
atttaaaaaaagagataaaaatgaactttaaaaaagagggtaaaaataaaagagagcaatataaaaagggtataaagtataatttcctcaatatataattttaaaagaaaaacatgtttttttggactcttggatgagcccaaaatgcaaaactttttcattttgctcagcccagtcttgcatttatagtcatctcaaatattatgtcaaatttgtcataatatttattatgtgacatatttgtatttttgctagatgaattatattttaatcatgcatcatttatttacatcttcattaaagatatggtaaaagaataataatatatattttgttagttatactaaattgatgtctttttctttttttattcataatggttattgaaattatatcgaacaaaataatttatatattggatataaaaaaaatgtagagaaacaaaatatacattgaatataaaaaacacgtataatattatcatgagttttatttgcattttaaaaatttataaatacacaacattttaataatttttttatttatctaaaatatatatctttaattttattatttatttttatttttttcttctaataatattcttaaaaaatatacttatgttcttttaaatattataacaaaaaaattaaaatgagaaattatataaaattttatgtaaataaaaactaaaaaatatatacatggtttaaaaaaaacaataaaataaatttaaaataagtattgaaaaaattaaaaaagtataaaaagtgactttcaaaaattattttaaacttcacttttttaaattttgaggtgtactagctagtgtgtggaaattggactccgcatagtactaacaaattaacttttctatgagaaaacaaattaattaattaaatctttctaaaaaaagtaattaaaaataacgtgataaaaaaaaataagtaattcattataattaatcaataaattgataatatataaaaatatctccttactaaatactacctggaatttaaattagttaatcaattaattatatcatcaattaataaatatcctatatattatatctagtttaacattaccgaagggtgtgataaatacgctatatatagagagagagtgatcatagaaggggtaacatgactaagtactgaatttgttatataaatagatcgatacctataattttgggtgaatagctctctcccatcaaaatcagatatatatggcttcattaatgaaaaactacttaccatacttagtccctccaatttttgtcatactcttctttttcatctcattctcctctccattaaacaaatatcacacattactaagcccttctcatcatcatcttaaaccacctgcttctccatcaattaacaattttagtaaccctaatttcacatcacatcatgatcagcagtactcttcttcgaacttttctactcttgctagcagcaaccacgtcaaagtataacattattattataattattattattattaatatgattactatatatctctctcatatatttattatttatatgtggttgtttgattagttatataaattaatttgtattatatatatttgagcagaataagagcagtgtgcagagacttgaaga

SEQ ID NO: 34657 - DNA, 1466 bp, Cannabis sativa
  modified_base (158)..(162): a, c, t, g, unknown or other
  modified_base (201)..(201): a, c, t, g, unknown or other
tcaccaataccctgatatgctaatctgatggctatagatttgcgtaacatatatttgttggtatcacggtgcaactctatgtacacctcaccgataccctgacggcaactaacattacactaaacatttatatatatatgcatatcattatactaatnnnnncttgattctgaattcaggtgtgtcggccaacctgagtgnaacaactgctcggcgaattataggcccttaaatcacatcgttcataacatggataagtgacacactaaatcacaactagggacttaggttttaaacaaaaacctatctactgtaacttaatatggaaataccctaaactatcagggaattaaccaaccaaagctctgaaactaacacgaatcgacaacatgaattttcgagaatcccacctacaaaatccagtcaaccgattttaggttacccggtttacaccagaaaaccccaaaaattctaaaacctaaccaaatcgattccaatccttaccaaaccttccagacctacatattataccccaataggcatattccaagcaataaaacaactacaaaaacttagaatcaattttcacaattaaagagccaagcttgagttctaaaactcaaagcttgctcaaacaatcctacagccaaccaaaccagccaaaaacaacataatacatcacaactaacctccaaaaaaccaaatcaaacaacaacatcgactacaaaactcataaacccaattcatgcaaaatttcacaatctaaagcttaagaaactaaagagggatcgagttgctagaaactttacattcatttggatactctataagcttgtggaaaatcacaaaaattacagagaaaagctagaaccctagctgcttccaagaggttcaaaagagagacagagagagttgagagaaaatgagttttattcatgaattttccaattttgtaaaatgagtaaaataaaaatggttttctgttaattaaatatcaatttaacaatcagattactaaaccccattaaaaccactaaaagacaaaactcaaataggcaaaatgactattttgcccttcccacactaaaagtcataaaaggccacttaggggtattttagtcaactcaaaaatcttgactattcctgacattctcaatgtctaactataatgtcccgctaaactaaaaatactaaaatgtgattctaatagccaaacaccgcgttccaatgttgtcggccacaaaacatgcaaaattatgaaattccatatatgacatataaaatgtattctaaattcaaataaatctccgtaaattaataattaaaaactaatatgcaagtttcataattaaaccctaattatctactaatttctaaattaaagctaagctgtctttacaaagactactagcaccagaggttacaaggcaaacatgttattgattagtgaggctgggagctggaca

SEQ ID NO: 34658 - DNA, 1267 bp, Cannabis sativa
tgcgtattaaaattgacaacaaatttttggcaccgttgctggtgatttgtttaaattgatattacaaaaattagattcaattctactttggttaattcattctaattattgctaattttctttcagattgtcttattttatttcaggcattaggggtgcatgcgatgtcaaggacaaagtgtaatattgtcggttgatcttaaaatcgaaaagacctgcaaaagaaatagaagaaacaaaaggcaagaaagaagtgcagtaagagctgaagcagaagaaatcatggctgacaactttaatggatgcaacaactctaataatgggggagcagtagaagaccaagcaaacggtcgtaatccacccgaccgtagtctgagagactacattatccgaacattgacgggggttcagtcttgcataagaccacctgccgtggaggtcaataactttgaaataaagttggccatactacaaatggtgcagtcttcaatccagtttggtggatgctcttctgaagacccaaatttgaacctgtccaatttcatggagttatgtcagactttcaaagtaaacagagtcaacgatgatgccatccgtttgagactatttccattctcactgagggagcgagccaaaagttggttaatttccttgccaaccaactccattgctacatggactgacttggcgacaaaattcttgtcaaagttttttcctccagctaattaataatttttgtcaactgacaataaatctctctatgaggcttgggagaggttcaaggatctcatcaaaaaatgtgcacatcatgggattgaaaagtggatgttagttcacaatttctacaaagggctgattgctaataccaaaacaattatagatgtcgtagctggtggggcatttatgagaaaaagtgcaaatgaggcttacgatttacttgaagaaatggctatgaacaaccaacaatggccaactgaaagaagccaaatgaagaaaggtgctggtatgcacgagatagacgccatcaccaagttgacagctcaagtggaggccctaacgaagttgatgactgctcaagtggaaaaggctcaagttacttgtgagctatgtgggggccctcacacatatgacacatgcctggtggatgtgaacagtttgccaatggatcaagcaaaagccattgcgaactattctcaaaacaataattatgggcacaagcaacaggggttataccaatagagatatcagccccaacaaaaccaacaac

SEQ ID NO: 34659 - DNA, 1934 bp, Cannabis sativa
aggcccgatgcatcatgatgaaaaaattgaatctgggttgaagacaaaggcccgatatagggcctgatggtcagttaattttttggaaaaagaggaagagagagggacggttgggaaaaatgggaggtgtattttgggatttagaaaaaagttatcccattttacaaattatgcatagtattagtttagggaaccaatttatgagtttattaagcatggaaattcaaatttccctttttattttactttttttttttttttgaaagaaagcaactgtcttttcttacactatttcctttttattatttaatatttatttttttaaggtaacttattgctaaattccttatattttatgtttattatgatttaactcccttacttgaaaaattacggctatactctttggactcgacaatcttttgctctatagtccttccatctattttggtctgttaagtgctaaagtggactgccacagtgtacatgtagcaaaatttcattagtccacctaattttaataatttatatgttaaaaaatagtttaaaatatctaaaaaacaattaatgtttttttttttcttcatctttctatttcttcttcgtttgttcttctcagaaattaacccccacccccacgaaccccaacccaaaaattgaacccaaaaaatctaatcccaacccaaataatccaaatataaattaccccaacccaaaaaactcttaccctaacccaaaaaactcaaaaccccacccacgaacccaaacccagtaaaccccaacctcatcgtcctctctctctcttggtttcttgtcatctcgtcaccgtccgaccgtcctcaccttaacctcgccatcctcatagcccacccccagcttggggaaggaagatggttaggagaagggcacgaagggttcgagtttgaaagggcgcgacgacgtttggtttttaggggtcgacatgtttgggttcgcagggggtcaacccctagaaatgactaaaatacccctcaaaatagatattttctttctatattcgtgagttgttaaggctcaatttgtggtctagcttgctgtccacgtctgaaagctgtgtactgaaatcttgtcaggccaaaggctggctggccatgcaccttcaggatggatgttggctggccatgggatgaccagaatttggctggcctatgctggccatagggccaaccaacccccttgaggtggttggttcgtcactttgtcgtctcgcttgagtactctgactcctcgttggttgaagtgctgattagatgacttggtcttcttgttagtgagttgtatttccatgtggcactgatgttggccatatagatatgccacgttaggtggacaaaaatcgggataacaaacttaatctttttttaaataatttattattttttttaaataatttttattaattttcttaaaactaataaaatattataattttttaaattatttttttttaattaaagggagtaaaattttgtattcatcaaagtttaggaggtaaaaatactaatgcttaatggtaaaataatcagaacctaacaaaaggggtataattatgtaacaattacattttagagagaatttttagcaagtcgtatattttaaggggtaagatcaagtagcgtcaaaagtttacaagacaaaaatgttaattattccaaaaaaatatgtatatcatatataatatattttttcatgcttttgtaaatatctaattttttcgggagggttttataaaaaataatattagataaaagtttataattttagtgtcgcgcgaatttttttacaaaaataatattttttttataaaataactgtaaaataataaaatagaataattaaaataacaacactaaaataataataaaagtttaacacaatatacactataaaaacta

SEQ ID NO: 34660 - DNA, 2211 bp, Cannabis sativa
aaagatggaatcaaggtggatcccgggaagattgaatccgccagggattggtggagacaaaaattagttacagaggttagaagtttcgtggtactggctggttattaccgtcagtttgtagaggggttctctaagatttcaacacctttaagtgagcttaccaaaaagaaaaggcagtttgtgtggacggataagtgtgaagcaagctttcagaagctaaaacagagattaatcacaactccaatgctagctctaccttcagataaagaaatgttcgtagtttgttatgacgcatctagacagggtctggggtgtgtgctgatgtaggccgatcaggttatcgcctatgcctctcatcagttgaaagaatatgaacagcgatactcgactcacaatttagaacttgttggggtagtgtttgctttgaagatttgccggcattatctctacggagagaaatgtgaaatttatactgacaataagagcctcaaatatttccttacttagaaagatttgaatatgagacagaggtggttagagttggttaaggattatgactgtgaaatcctttaccatcctgggaaggccaatgtattggctgatgccctaagcaggaagggtcccgagcaggtaactggtatgattaagatttcacctcagttagcagaaaacatggtcagatcaagcatcgagtttgttgtaggcaaacatcataacttgacgctgcaatctgatctgttagaatgaattaaagctactcagttaattgatccaaaattattaaggatcaaagaagaagtttcagctagttaagccaaagattttacggtgtcagatagtgggatgttgttatttaagaccaaggtttgtgttccaagtagtgcggaacttagaaatgagattcttgaggaggccgataccaccccatattcattgcatcctggcaccaccaagatgtaccaagatcttaaaccctacttctggtggagcaggatgaagaagaatgtggtagaatttgtatcccgatgcctaacatgtcaacagatcaaggctgaacatcagagaccgacaggtttattgcagccattgacacttcctaagtggaaaagggaggatattaccatggactttgtggttggattacctagaaccacgggattgcacgattcaatttgggttgtggtagatcgattcacgaagtctgcacattttctaccggtaaaaacaacctttatagtggatcagtatgtataattgtacgtgcaagagagagtgagattacatggtgttctaaagtccattatatcagatagagatttgaagttcacgcctaagttctagcagagtcttcagcgggctatgggtaccaaagtaaaatttagtacaactttccatcctcaaactgatggacagtccgaaaggacaattcagatactgaaagacatggtacgagcctgtgtaatggatttcgagggctcctaaagcaagtacctgcaactgatagaattcttatataataacagttatcagactacaataggcatggctctctgcgagttgttatatggcaggaaatgtaggtctcccattcactgggatgaaacgggagaaaagaaatacttaggtctggaatcaatacaatggactaatgaagccatatagaagattaaggccagaatgcttgcctctcagagtaggcaaaagagttatgcagattcgaagcacagaaatgtggagtttcagataagagatcatgtatttttacaggtgtctccaatgaaggggatcaaacgttttgggaaaagaggcaagttatgccctaggtttacaaaaccttttgagattctcgagaaacttagactagtggcatatcgtctagctttgcctccagctctttcagtagttcacaatgtatttcatgtttccatgttacaaaaatacatttcagaccctactcatgtgttgagttatgagattcttgagctgcaaccagacttatcttacgaatagcaactggctcagattttagacaaaaaaataaggttctgcgaaacaaaaccatagctttggtcaaggtgctttggagaattagcaaggtggaggaagtcacctgggagttagagcctgacatgagggctcattatccagagttgtccaggttagatttcgaggacgaaatccttttaaggtgggataattgtaaagaccgct

SEQ ID NO: 34661 - DNA, 2018 bp, Cannabis sativa
  modified_base (635)..(637): a, c, t, g, unknown or other
atataaaccccaacactatctttcccaaaggaaaaaaacaaaaacaaactcttatgtctctttttgttttggattagaaattcgtgctatcattgaataaaacaaactacagaagtatcaacttgtagtatgtaataagggcagtgtgaagagcagaagaggataatgaaaatgaaacaacacttatagattgttgtttcttttgtctttctgagacaatgattgcatttttttccccaaagaaccatactttcttacccttttttttttttttgtatctatcggatttgttttatcctaaaatttttccataaaagaaaaataaataaataatttaaaatttaaagagtaatctttcactttaagttattctattattatataatatctcctctcttcatatgtggcatgcatatattcattcatttcttatcatctcagtttgagtaacttcattttactcaatcctaatatctaacattgctcaaaatgaacaaagtttttcttttggctagtgcatcttgatttaggacccatcaaccttctgttgactggccttcttagtttcactagaggaaagacaacttttcggtcttcttttaaacacacacacacatacacatatatatatacannnatatatatatatataaatacatgttctcagtttccaaagagtacttctgcaagtaataatggttcataaaagacaacacatcttttacagatcccttattatgtctacttaaacaaagtggttttccttcaaggcatttacaaatagagaggcttgcaatggcatatacttctaatacaatagaaacatagcttattaaccaaagatgactgtagagcttaacaagtagaactggtcaacccaatggcgtttccattcctttctttttttattgaaccatgcaaattatgttcaatcaaaataaccattcattttacatgaatcgcataattttgtttatttgtttcttctccactaaatggcagtccctccaactacactcctcaggtaatgcttcttcaactttctcctcctttgattgttagccctaaatcgtgaccaaaatcagagttagttcagcatccattaagaacaaaattatcgcctacattttccaactgccacagaattgtcaaaaagaagaaaattgaccaacaaagtaggtaactagctccacaataacatcatgtttaagaaacctcatagatggaccaacttagtttctgaacttcaactactaagagtgtgataaaagtgatcatcttttagttaaagttgtatgtttgacaagttttctgaatgttatttttggtttagagatctactcaccagtactggttgcgcagtacaaaggcatcggtggccaacttcttcccatcgtcattgcggttccaatggtaaagtgcatgtgtccggttcataatttccaatgttgaatgcccataactcgcttcacggaatgcagaatactctggttgtggatcaaggaatctacattttccacagaatcacaaaacattaattaaggatcgtaatttattatgtggactgcagcagttggagatactttcaacactcattgaatttaattccaccccatgaattgccaaaacacaataaataatatacatattcataagaaaaatggcttttacctatcagcaagaccttcttgatttcctccatcaccgactgttatgtaaactggagctgatttgtcaggtacagggtaagcatcaccacttgtaatgttgtacctaatatttgaaattctatactgaaaaataatggaaaaagaaaaaaggaaacaatattagccaaatgaagaaagttattatggaatcaacataaccatgttcatgtattaacaaagagctagcagcataaaaaagaggatttgttttcttttcttttcttccttttctaaaattgctagttctctaaacgttctaatatttcaaagcaacttgttgtgtttttattgacataaaaaacaatgtaa

SEQ ID NO: 34662 - DNA, 2037 bp, Cannabis sativa
tgtttggtatgccgtattgtattgaatagtattatattaaattatattttatgcaatatttttatgtaaaattatgtggtattagtttttatgaacacttaaatatctaatattttagtataaattaaatatagtattatataaaaaaaaaataatatataatctaatttaatataatacaatacaatctaatacgacgttacaaacgagctctaaatatgactaaatcttacaaacgcttaagggtaagttaaaatgtcaaatcattttcaaaaagagcgaacaagcgacaacaaagtgaatagaccgacatatacaagcttagtagaaattttctttggagagaaaaaagagtatagtaaagtatttggcctcttgagagctagtgtgtaaaccaaaaatttatggaggaggtggtcttagagagggtactgatagaataagggttccttagcaaactatgtttgggcactccaccaaatttatggattaattcgatttacttaaaagattaagatttttgggcttatgaattgaagttggatgtgaattgatataggagaaagtttgttcatttaaaactcaaattcacctataaagatatcttcgaagctagaaaaggtgagaaattttgaattagtaagatttacaacaatattctcttacaagctagtaacaatcatttcttaacaaaagactttttgattctccgtagagtgcctataaattcgaggcaatgtcctatgtgtgaatcaaattttttttttattaaaaaattcatttagatttaaaaaatatatgaaaatttaaatatttgtaaaatttaaatttgttttgagtttatttttttctctaaaaatctaaatttgtttgagcaaacataccactttctgaattaggtaaattctattttggtcatgtgttttgcaaaagttactaattagaccatttgttttgttaaatgacaaaatgaaccttatattttctaaaatggtaaaaatagaatcccgagctcaattttcaacaattttattttttaatataataaactttaagaaaatttctagcactaacagatacggaaaatgtaactagtttcgtcataacatctctagatcagattattgttaagttttattttgataaaaaattagtttaaggtcctatttgtacaacatggaaaatatagtgtctattttttcatttaacaaaacagagagtccaattgataacttttgtaaaacacagagtccaaaatggtatttacctttcttaatttaattttaacttttaaaacaattttatatttttattcaatttttaattatttttctttatttttaaggtatgagtttataaatataaataagtttgattttttcttcaaaacatatttgtttgatttgttaagataagtgtttataaataaaataaaatttaaaaatattttttaagaataattaaaatttgttaagtaaacttaatattttttaattaatttaatattcttattattttttttttaataattattattagttttttcttcaaaattaaaagaacattataattttaatttttctttttaataataggagacaaaattgtaatatttgtaaaattttaagaggtaaaaatactaatttttaacattaaaagaaataaaatttaatagaagggacataattatgtaattattatattttatgagaatttttaacaatccgtatattttaaaagacaaaatcaaataatgttgaaaattaagagagcaaaaatactaattattcataaatatatacaacaattattaaaaagaaaaattagtcaccaccattttctttattgaggagtgccaattactacttcctataacaacctcttagcaacctctatgcccgaaatcatatgctggaatattttttctcaatttttttcatagtggtatccgttatagttacagtatcattcctgtaaatttttgaaaaattctgaataatttacaatgttaaaaatagagtttctgatattccagtt

SEQ ID NO: 34663 - DNA, 1472 bp, Cannabis sativa
aattctcatatattgaattatataataatataattcctcagttattcataattatctaattagggtttttctaatccatttcttaattctagggtattacatattacgactacttgcaacttttttgtgacattttctgatttcgatttctatgtgtcaaatttggcacaatactatatcttgagtcaaatttggtataacttttagtatgagctacgatcggccctaggctaaaagcaggctagacacgcgcctagggcccacccatcttaggagcccatataaaaagatattttttttaataatttttaagaatacaatttatttttataataacgactcactttttttctaagcctatttcaactcagggcccgattggcatgagccaaatttaacacaccattaaagagcttattttttaaaaaaaaactaaaacataacactataccactattttaagccctcttgatatgctcaaccccatttatttgtacttattaggagtataaatctatttcgctcagattttactaattaagattacttgtttgcacttgtttttaactactttttcccttttaattcatctgattcagttatatgtatattcgaaacttaaaagatttaagagataaaaatttaccatcattctttttttattattactttttatctaactctcaattttacattagtttgtgcgacatgatatcttctattctatttaatttttatacataaatagatataggtgaaattgtactctgattagtatgatgtgtacaataaatttaaataattttatattaaattgtgttattgaacaataaaaataaaaataaaataatcttacacataatagaatttataagaatttataatagaagctatttatttatttatttattttaaaatggcatataatactgaaaataaaattcaaatattttgttctactaattttttatacatgtgataaattactgtttgaatattatttttagtattgtaaattatttgtaatttttaaaaatttaattttaattttaattaagtacaatgtataggattataaaaaaataattaaacttaaaaatgatataggatgcaaaactaaataaagaatgtactgaaacacccttaaaaagggtatagtatcaataattttaaaaaaattatttcatattttataccacctgtaaaatataagtttatttcaaatgtttgactataaattataataatatatatagttattcatgccatgaaacaagaaattgttaaatttaataaatttttaaaattaattatgatttatatttaaatatttttttaaaataataaatacaatttaataattttgttaatatttaaatgtaaaaaaataaaaagtataaattattgggatattagcggctaaaccacctgaactttacggtttgtaacacttaaccacaaaaactgaattt

SEQ ID NO: 34664 - DNA, 2249 bp, Cannabis sativa
tttgtaaaaaaaaaaaaatattttcattgttagaagaactatctgttgaataagatacaataaattaataattatttttttaaaaaaattaaactcttattaacaacaatcagagtttaatacatcaataagaaaagaaggaaaatcctcaatccaagtcaactcaccatccactctaagtgcatgtacaactaattcatgagcagccttattggttgtacgtcgaacatgaattagggatacctcaggaaaactagaaaacaaactagcaagatcatctaataaggaacctagttcattacaaaaggaaaaacacttcgggagacttgaaaccaaggctaagcaatcctacttcaccacatgaagaggaagaccaaaagtgagaccaatccaatggaaccattaatgctaaccaacaagcagagaataagttcaaaaaagaaattacaaaaaaggaaagaaagtaaaaggtcaatcctaataagtgaaagaaattaaaataaagaaaaaaacaaaactacaaacccgttaaacaatgaccatacaccggagagaaaattctccctccggtcaactcactccatgagtctaacacaaatactctataaaagtaaactgcctcccaaactatacttaccaaaaaccataacctaccatcctgagaaaactaaaacatttagcaaaaaaactataaatcctaacagtaacactataagattacctacctaaagagaacaagaattacaatatctaaaaggtgagaatagcagcaacttctcaagattggacaaaacatacaccataaaagaaacaccattgctcaccctcataacaaaaaataccataaacaacaaagcaaaaaaggtacacctcctgtcataaaaccattaatgtcataaaccataccaaataaggatctacataggcacccaagcacattcctagtagtatctcgaactattgcctcaattcctatagtattagaattaacatccagcgacgcatcaacatttagtttatacgctcccaaaggcggcttaatccatcgttctggagacaggcatttcgacccctttatcataagattgggtctcgaacattaattatattcattaaataacttaaagatttgtgagaccacaacatcaggagggttggctttgcaaccatggacaatttagttcctttcaccccaaatataccaagctgcaataaggaacaattcgtagtcagatctagaaagtacctccgaagcctttagaactatttgcatgaatgagatatccattgagagattgtttaatagagtaacacgtaattccttccaaactttcttaaaaccacaacataggaacacaacatgactatttgaatccacactaaagccacataaaggacaattagtatgatcgactactttccttttttgaagtcctaggtacataaggagagcatcatgaaacccacgccaaataaagattaaaactttctttggcaaataagtttttcgaaactctttgcaccatactgagaaccaactcttagaaggggaaggattaaaatgagccaactgtgttgccacaaagtatccaattttcacataataattaccttcaactgtatagtgccatattcaagaatctgctttcggaaatttactaactggtaaagaacaaatgctttgttgattagtcgcattaaacaactcactcacaatttgcatattccaaccactcattgacacttcaatcaaatcacgtaccaacaaattaggatttgcttgattagaacagtaaagcctaaatgtgaccggccgcaacagccaagggtccttaaagactaaaatcgtatcactcgtcccaactcgcttacgcaacccttttgttaaaagagaccttccccaaattatgctcctccaaacataactaggtgcatgtccaactgtactcaaaactaaagaaaactcgtaaattaaaaaaattatattcacaataccatccataataacagattattaaacgtcagatcaacacaccaaaaagagcctaaatagaggaaccaacctccccactaaaaaaactaaaagaattcaagcataacattgagaataattgatttagatcctttattttaagaaaaaactgatcgcactcctacaaaaataggcataaaaaccccactctaaaattagaaaaaaaaaacatcaaagtcgtaaataagtcaaccataatcaagtctatatatatcct

SEQ ID NO: 34665 - DNA, 1518 bp, Cannabis sativa
aacttggttgacttaatgacgtgaactaagaccgtttctctcaaaataagtaagtaggcatcaattttgataaccttggacaattgtttctgttcttcaagcattcccactgagagtagggttttgaacccccattccctattgaatacggaaattcaaaattttatgttgatgactccttgagtgatcatgctgacattagaacgtcaacatttactctaatctttggctattgtcttagcattgactcttcttgtcacactatgtgtttatgtgaatatagatttagtctttgtcttctcttaagttgtagtcttgaagttattcaacattccctcacttgtgtttcaacgaaggtagtcttattcatctcctcaatttgatagtagaggaggtctttgtcaatccttagctttacagcatcggaggctttcatcatatcctcatcttttcattggaggaggtcttcaccatcccctcaactttacaatggaggaggccttcaacatcccctcagctttgtagcaaaggaagccctcaacatcccctcgtctttgtagcggaggaggtcttcttgatgactgtcaacgatgtattgaagtagtcgatggtcgttctttattcaattgaggatgtgaccaactctgaattaatatccctaagatgggggtgatgtcttccccgtctcgagtacaccttagagtgattgtaggtgcggtctccattttgtccttagtctttaaccttagaggtcttcatcataccttttgttgtattcacaacagaaaaggccttcttcttcaccttggctatcttgacagcgaaggaggtcttccacttccccttggcttttatcacagcaaaggagtttttcctcatcccctcagttgttagcacagccgaggaggtcttcttggtgaatgccaacgatgtattgtaacattcgtattcaactatttggttaccaaggagatggtcgataccagcttctgtcgagaacttgtcagacaattggtgtagataagggagatggctcggaggtcgctaggtattgaccttccaagaagacttagtgtcgatcactatgaaggtagtcatagtgatgtttgccatggggcagttccgactgtgagtggtaatctaattttaccacagggagctatgttggctcgcctgaaactatacatgagctgcttgcatgaggagcgagagacacactacgatttcaagtagtaactagttgtaattagttactaaatactgagatttgtttattgggatttttgttatataaatcatggatgcgtgaggagagagacacactgcgatttcaagtaggattcaatgcatttatagagtttaccttacagaattttagaaatcctgaacgtattcattgtcgatgtgtagattattataatagatctaaaggaaatattacgatgattaaggatcatgtgtatttaagaggtttcaatagaagttatactacttggtattggcatgatgaacatttag

SEQ ID NO: 34666 - DNA, 3839 bp, Cannabis sativa
aatcaatatctatcaaatctctaaatttagctcataattaaatccataattaaactaaacacaaataaaaacataagaaatcaagagaagagaaggaaactagatggaggaatttcacggatcgctcatccttgctccaagagccttcttcttgtatttctagggttctattctgtctatcatctaaaattcgtgaccccctttcattaaaatagagttttttaacccaaaattgagaaaatacgaagttatccttgacccgtatggagtcggtgcagcggtgaccaatatcctcactgcagtagttgtagaaaagtaaaaaaattggttttttgtagtccctcgccgcggccattgaacccaattttttttttttttttttttgctttgatctctcaataaaatatgcataactttcacataccaactctaaatgagctgattcaagatgcgttagaaagctaagaaagagatctaaaaaattttttgctttgactttttctaaaatttaattagaacatagtcgaatttaggcttgaagttttaactttatttttttacaaaattttttctattttatagatcacagtttttcgaaatttaaccaatttatacattccaagtgttgaaatctgaaactaaagaaaacaagtgtaattctattccaaaaataactataaaaccaacttaggctaaaaatagcctaatacttatgggctagggttttgtgctcttcattatctcaaagtccaagagatttaaataaaactttcctttttatttatacaataattaatttattccttgcaattaaataatagtttatataaaataattatatcaagataattatttttcataaaatattatataaatacttattattaatttctgagagcaaaatatctaattaataataaaatttttattattttttttcttctttatttttaccaaagtggcggaatattctcagaattgacaaaacagtaatgtgagtattaattgattaaataatcaattattgtaatatactattaagtattattctaattactgcgggaaccatgggccgatgaaatttaagctcccaataaaatatatccgaaatttaacaaataaattctctaacttattattactcatgactccactatagacttgaaattgcactcttaatttcacaaaacactctctatatatcaaatatagatacgttataatattatccattgtttctatcatatcgatcaatgatcctctatagacagtctataattaaaagggactaaaattaccggtgtaccctttaattatgttttatccttaagaaatttaattgaattaatgatatttcagtgaactaatataatcactaaaatgagcgctctatcatcaaatacttaaacttagctcaaaggaaagtgctatcatttcacttataacataaaagctatagattacatatctataatcaatactcccactcaattatgctaccgagttctcaagatttaagtatggactagaccctaaggtaagttagcaacgaacaagttaaagaacttgaataacacaattagcttaaagcttaaaattttaggataaatattgaattgatctatgataaactcagtgatattgaataaaaataggcataatggtaagatccattattctttcaatattagtccagtttgatatgtgtaccaatatatctaatacaattctatcttgtcgatatcttggaaaagacataacacatatccttagtgtaaatagaccacattgttgattatcatggcagtgtaaatcctgtgaactaataattaagggacaaatactttgaaacatataatcaaaaatatattctattgtgatgacatcactgtaaatgtgaataactatatgttctgaatttaatagaatttaaatattaaacatataagcacataaaaaaacgtgggaaccaagcaattaactacgtcataaataatttttgaactttattgatttaaaatattaaaataaatttagtttttatttagggtataaaacccaacatacttccacttgcactaatataaaacaagaagtatattttaatttatccaatatatttctaatgtagttgatggaaatgtgagtgtaaaaagatattttaggttgtcttcagcatcaacctatattttctattacatctcccttatccataatattcccgataatgtggaatttcctatttatatgcttactttcttatgggacctagtttatttacaattgtcaattgcatctttgttatcacagtgtatattagaagttaatccattcttgagatgatgccaaaatttatatagaactccttgtgtttgaataattctttagctgcctcaaaagcgattatgtacttagtctttatggtaaagcttgtgattctggatttgcatgtgtaatcacacctccacccccagagtaattaccatcccagatgtagactttctatttttagcacaagtttgaagatttgagttgttgtgccctaaagggtataaaatacctctcttataatctatgcatttagtttctagtcttctaaaagtatttcaagatttgttgattgttttctaatgttccagtcttgcgttaggcagaaatctagtcacaactaccactatatagtagatctctattctaatcgagtgcgcaacaaagtgtacataagactttttactgctaatgtgtaaaaaattcttctcaaggtttctaccttttctgagtacttcggggaatacaccttagatagataaaatctatgtcaaacaacctaaatccatagagaagtgctctagaaacttttcaaccaaggttgcttgcatgagttcaaggaatcttctttcagttttcatctagatttgaatgtacaatcattattttacatctgacaatatcctaaaatcatatcgaatgacttagacattatctacataaatcactaggagtaccacagttttgatttttcacaaggcttattaatcttttgtttgaaactataagtttcgatgatcacatacatcaaatctatgattctagctaggaaggatcaggaagttttcttaagtccatgaatgaacgtcaaatattccttaaaggaaagttgtttcacgtccatttgtcaaatctcataattgagaatgacaactatggacacaagtatatggatggttccgagtatggtgacttgattaagactttactcatagtccacaccttctttctaggtgtaacccctttgctacaagtccatctttgtgagttttgacttgtccatcaacacatcttatacttcttgtatatttgcttgcttctaatgattctaaagtcactcactgctactagaagattttagaacagagttaacgcatgaaattcatttccagtttcactacaaattttagttccttattaggacttactatttttacttgaagaataatggtttgtcgtcactagttttaccaaccatcaagttaatttcactgtccaaattataacaacttgggttccttaaagccattccactatgatgtggtactgtaatagtctgatgagaaacaatagtaatattttcctctttgttttagtacggcttgcgttgattcaatatagagagagtgggatcatcatctacatgtgtagaagatgaaaaaatatctataggagtcaattttgaaagcttctattctactacaacttaagttgtacgcaatttgagtgaaattccgtattttaatatttccaatttaattatttaattaagtgattaattaaatgcggaa

SEQ ID NO: 34667 - DNA, 3105 bp, Cannabis sativa
ctctctctctctctctctatcttcgtggtggtcgccggtggtctccaggctcgttggtggctccgatgctgcacaagaaaagaaaggggggggggtcgggggtggtcgttggcgttagggttaatttgctagggtttttagtgatgaagaaaaagaagaaaagagaggaaaggaaaaaaaagaaaatatttttttttatttttataatttttaaattattttttaaaattaacattacgtggaccactaaagatttgccacgtgtacaagtgtgtacacgtgaacagtccaccaagacacttaactgatttttggacggagaggtacgagcaaaatagaataggagtttaaatagtttcgcctccaaaaaatcaatttttatagttaagcgttaaaaaatttaaagttaatttaggcaccaatatctcattctaatatttttgtaagtttcgcttaaaaatttatgtagaatatttttttgaatttgattgtattgggtagaggagaggagagaggagagaaaagtgatccaggtggacaagtgggtctctagtgtagaggagtaccaaatcaaatcagtagtagcccgttaagataaagtcctctcctctcctcatgaattttggtttcgcgcgcgccctcaacaataactccctccattttatttgggttaaatattccaaaaccacgtccctaccttgcacacgccaaataaatattttaaattgaattaatcttttttctttatttatattttaattattaatataaatataagtgcatatataataaactaatcgttttgtgtatcgagcgaaactgaaacggaccccctgtgtgtgaggaggacacacagctctctctcgggttttctcttcgccaagaattcgattaactttcctggctaagttttcctattgatttttcccaagaagattaagcttgaatctgttaacctttccggttttgagatctgaatttatttatttttcttgattttatgtttcgtctggtttgcttttggcggaagagaaattggtagagacgtttaatgattcttattggcttctctcagtttcattgattggggtaggttttcgcattataacttagggttttgtatcggaaatttttaatcgttttggtacgttagagaacacttttattttatgtgtcctaaatttgtgtttcgaatgtacggagcgtacagagttcggattgttgggtgtgttttctatttactttgaattgtagtcgaattagggtttggtttcggggttagaaggtggatttgtttgagttgaatgtttcgaagatgattatcaaacgaactttgaaagtggagatgcctaatcttaagcggtgcaagctcgaagagcctgacagtgaagattttgcgaattcgggtagcgcgaagaagcggcggactaatgtgtatcattcgttatgcaatggtgacgttgaggatttcagtagtggttcaggttctttgttcaacgacgaaccgtattggggtggcgatgttgagtcgaatttgaagagtgtccgatcgctgaatcccaatcccaatgagttcagcaggtcttcgcgaggtcgtattcggatgctttcttcgaggtttaataattcggtcctgaatatctggaagagcaagcccaaattcgatgaaattgatactggctttgacgaagatgataatgctgaagctgctgtagataaatacaaagagaaacttgatgggatgagatttttaagaaagcccaagaacgaaaataacaggtacaaaaattcgaagccgaaacgtgctgtgaagaaagaagatggcgaagtagctgctatagaatttggcaattttaattatgccaaatatattggcatgcaaatcgatgcgaaaaatttcccgtcgattgaggctgaagaatatgcttctagttttggctattcaggtgttgagaggctaacaaaagcatccattggaaggaggaaagatgtgtacaggccagaggattttgctttgggtgatatagtttgggccaagtgtggtaggagttacccagcatggccagccgtggtgatcgatcccctaatacaagctcccgaagccgttcttaggtgctgcgttcctaatgctatgtgcgttatgttttatgggttttctaagaacggaaagcaaagggtaaatgcctctttctctgtctcatgtgacccataaatgtttattctagattctaatccaatgttggtgggcaggattatggatgggtcaaacaagggatgattttcccatttagtgaatttatggacaggtgctaactcttgacttgtgacactttaactgtttgtagttaaaaatgtttattgataaattttgttttgttcagatttcggagtcagacccagttgtataagagcaagccaagtgagtttcagatggctatcgaggaggcattattagcggaaagtggctttcaaaacacaccctatggttctgacaaaataacttgttcagaaggatatccttatgaaatccaaggagctactacttcgaatcagaatgttgaaaattattcacagaatcaggcaagagtcctatgaaacttttcatctaaagatcctttcttttgcgaatgcctacgtgtaactctcagttgtctaccccactagaaaaatgaatgttacttcatgtttttttttgctttcgatataatctctaatttgaggtcgcccttgaagtcggtcatataaaccttgaaaggaaaaaataattttgttcgtgtaaaactgtaaatatgttcttgcaaaaaaaaaaatgttaattatatattcctggccgatcacacgatacttattattatatttttgaaaacagagaaatttctaaattaataactcgactctaaaggaagccttttttttgcttatagctagtagcattagataactaaaaaattatagtttatttttcctttttgtagaattattatgtaaataattatttttttaataaaaatttattagtgtttggatattaattgaaaaaaatatattttatgaataattaagaagtataaaaattattctgatctagaaaatagtttatcgaaa

SEQ ID NO: 34668 - DNA, 2504 bp, Cannabis sativa
aaattttaaaaagttttaaaatgaggaagaagtttaaaggatctgatgtgtatatttttaatttgattctttaaatattttataacttctcacttgctagattggcgagaataaattacgtatatataagatagacataagaaatttatagtagttcactccctatattgtgacattaatgaagctatgtctacttcaagttttatttctcatgagatggattacaaaaaaaatagttaagtttggatgctccaatttctagagagaaactagaaagatatgctctgaccttacgactacttttctagacttaaaaattgagctagtggagctctctttttatagaggaatgaggtcctattaaatgggaataaaataatccaaaaaataggaaaaatacatttaggctattttgaccatagattatgatctaacgatgaaaattaacttcttacagctcaaattcgtaactcccttggggtaaaatttgtagtcaatagcttcagatttgtaaatgaagtcttagacatgacttgatggagcattgatatagcttcaaacacaagttgaattgtgtcaatcagatcaatatttagtgagttatgaccattttattgaaggttattttaggcccagcatccagattgtccagcgcccaggttgaccacctggacgctgggtgagtaagaaaatgcgccagggatgtatcttttgatgtctaagtgatattttgacatcacatagtccatttttgtgttctagcaaagttagtcaccagttctcgaagatgttgttattttgcagaaacgagagactcaaaactatccagtttacaagtaattcaccttgtcggaaaagtaaaaaatatgaagttgtgaatttgactcttttgaattcatagctcttatttattatgaaaaactagatgagtggttaagacagaatcagaatcgaataagcagaacctagtgcaccaggccacatgtcaacctgggtgctgagtgattatttcgaagcttccaggatgatgttttaatgcttccaaggttctagaacttgaggatgaggtctcttgccccgtttttgaccattttggagagaattctcaaagccaaattggcatttgaatgatcaaaaccagcgtaccaggttaattgtcaacctgggcattgggcataactttgatgcccttggacttgtggttttcttctcgagtttgcctgtatcttcattatttatgatgaccaaaaaaatacctagaacactttttggaaaaactgattggaaatagcccaggttgacaatatgtcaacatgggtgctaggcctagtggcaagtgtcaacttgggcactagatccagtttcaggccatctggaaattccgtttgatccccgaaaatagttgaatcttaatctttgatgaagaaagagaatattctcggaagaattttcagaaaaattcctctgaattagtccaggttgacagggcgttaggccagccccaagtgtcaacctgggcgctggtcccttgttttggcacccaggatgggctatttcttccccaaaagaacttgtttccccatttttgatgaagacgaagaagttgcacaagtcaatttttcaatcttatacttggaagtggcccaggttgacagtttgtcaacctaagtgttggagtgtccgggtgctcaaaaatgaaagttctccgaatttgattctgatgcctcaaatatgtctgtggtatgtctagttcatgtctcaatgcaaagtttgatccatttgcactaagacgggcccaaaaactaaaaccctagttggggttgttaacttgggtgctgggtgaaaccctagatgtctaagttgatttttgaggtgttcattcgtgtattttcagctctcgtggcctggccttggatgcttcatgtcttcatggtacagaatactaaaagatagtgagttggaaacgacttatcggagactcctctcaggtcgaccactatgattcgggactactcaactccgagatattatctttcttgccagatatcaaatattggtgtccacgtcatgagaaaaaaaatttcaagttaacaacttccattattgaaactccaaatcttaaatcctgagaccttaaaacactcttcagcgtctattttaccttcatttcaaagtgtcatttcaatcctaaaatccataaatcactcttatataccacaaattattcttttcataataaaaacacacaccaaagctagtttattctaactttttcaaaatctaattttcataaaagccaatgtaatgtttagtttttctctaccagaaacaactgggatcaaatcatttaactcttttccatgtcaaatattttgtttccatcctaatttagttcctttcgccaaaaattgatgaatagtgaagtggtgtttataagtgtcgttttaaggatattcatggtcgttttggtctgtgttgtagatgataagacaaataaaccccag

SEQ ID NO: 34669 - DNA, 1470 bp, Cannabis sativa
tatatacttatatatgtcaataaatatacttatatagatatactaaggaaaccgctcaattcgttcacttaaaaaaataggaattatgttctctcatctaaatccaaatgtctttctccgatactcaagagccggacagtcggatccaaacagatacattgtgaaatgataacaacaactacaacaataattacaataatactaatccgacaaacacatatgaggttgtgttagccagattggaaaagctccaaaagccctaagacggcatgatgcagctactgagttcgcttctaccacagacacaccaagaagcatctgttaaaaggaggggcttacttgaagaatgtgcaatgaatgaatctttgataaggcaagtacatattgttgaacaacaaactcgggcaacacatgataatgttcgaggaatcaaaacttctgagattgctgaaaggattggtgaagaggctcatcttcctctgagtttgtcacaaaagacgaattgattggtctccttaaagccaaaaggggtaacacatcatcatcggtaacttccatcgactttcatccaccctaccctgtggaagttgcagtcaaaccttaccctcgtggttacatgagtccagtatttcgaaaatacaatgggaaatttggcaatgccaaagaacatatcattcaaattatagatgatttaagtatttaagcgcatgattttgaattaagaatctgagaattttcaaagtctctcactaatcgagcatactcttggtatgcaagtttgccatcagagagtataaggagttgggacgacatggtctctcaattttgtgcaaagttctttatgatcgaagataaatggagcatagatgacttattaggagaaagataaaaccttggagaaagactcgttaaagtgtagggaaaaagctcttgattgtgctgagaccgtggttgaaaaggatctggtcaaaatgtgtatcaaaggcaggttggatgaatatcgcttacacattgaaaaccatgccatatataattttccaaagcttcagtaaatctcatgccaattagagtatattctgctatgaaataggtcaaaggggggttaatcccgcaaccaatcacactcactggatttgttgccaagtttgtaaaaactatggactgttgaacctagaggttggaccaatcagaggacccactcggttccatgtgatagaagtagtttcgtaccatctcttattgggacgacagtggattcatacacatcattgtgtgccatcgacattgcatcaatgtgtcaaggcacacaatcagggaaaagatgttcatatcacagctaccaaagcaccgtttgctagagaagaagctcacatggtagaggcaatgttctttgaagagctttcagaaaataacatggaaatgatcacaaggccatgtgcggtgcgattaccaaaatgggaagaatatgca

SEQ ID NO: 34670 - DNA, 2519 bp, Cannabis sativa
agtgggtccagaaagaaagcctccatataaatgtttgttctttataagtatctatgtgcttattattatttggtatccatagaaatgtggaaatttttatttgtcaaatatatatatgaagcaatttaaattttgcgatgttattttttaaaaaaagattagatgaattattgaatattaatatctgtaaagataacttttttaatacatgatagatagtcagaccactaaacagtactaagaatagaagttatgacatatttggttaacaaatatgcaaccacttgaatagatcgaggcaatacaaagaaaaaaaactcctaaactatttttagtaaattattaacattttggaaatattgtatttttttttttgtataattatataattattattttttaattattttaattatttactggattggacgatttatatatatttttctaaaaattatgctttttttgtatgtggttagttttccttaaaaaagaacattataattactcttatttatttatttatttatctatttaaataagatattttttaataatttattttcaactattttatatttcgaatttacaactaaatattttattttaaattttgataggattatttttgatataaaaaaaattctaatcattatttgtacactcagttacatataaaaaaaatacataaaaatagaaaacaactatttcagtatttttttccttctaaaactttaaataaaaacaaaacttaaaatttaaaataatatgaatcttagtcctctatatggtaaatatcataatcaatctatacttttcttttttaaaaaaaaaaagaaaaattcatatagttttagaagtaaaatatgtatattcaactaacgtttttttggtaaaaatatattcataaataatgttatgaaaaaaacttcatttattctaaaaaatttcggtaataatatgttctcatttattaaaaaaaataactttttgcctatcttttgtatcttgatcttttggcttgatgcattttaatagagtttctctgtttactttaaaaaaaaaaaaaaaaaagaaatagaatgtccttattatattttagcagaagtggatttttcgattggaagttcgtaaaaaaaaaaaaaaaacttttaaaactataaatcctatattttgtgactaatatacattataaatgtaaatatattttattagccatatctctaaattttttaggttttagtcacattgaaatatgtaattataattgttataaagagttccaattaaaaaaaaaaattgttatacaaagagtatatcatattaaaatgtataattgttaagctctcatacctattcatggtgttctctatcttttttttttttcatgtcttaatacaacggcaagcgaagcttaatttgtgttaatatgtatagatatataaatatatatatatatatacataaaattaagtataaaatgatgatatgacactttaaaatggtttcatatatctctactgtaaataaaatcgttaaataaatagttgtttatttatttatgtttttctatcaaaaggctaatttatttttaaaacataattcaatatatattcataaaatgttattttacaatttaaaagacaatggtgttaatagcatatttataaaattagttgagaaaataattgtagtcacgcgtacttgaatataataagatttagttttgaatattatgtttacgcttttttttagttaattaattatagtattatcgaaaagttttaaatttgagacgatattcaagttaaaaaaaactactaattaagtttcactagcttgcacatcaagtggtaagacgtaactttacatttatgtttagttttgatgatacatgccaaaatgattataataatcagtcttaagtatttcgggcataactcttactttaaaagtcaggactcgggattcacctctatataagttattttgcctaaaaagatagtttttatttacatatttttaaattatatttacaaaaattaagtaatatttttctaattaattattttaccataaaaaaatatcgtataaagtgtaattttttaaaaaaataaaaatttaaatagccgtgcaaagagcaccttaattttttagttaatatttataaacataataaaaaattaaaaaaatagagaattaaggagagaaaaaaaatagctttacaataattttaaagaatcatgtcatcgcctcatatattattatgtatatatataacataatttttagtttatgagaaattattgggtgacttttttttttaaaaaataaaaaaaataaaaaattattagatgttgccacgtaaagggtcaacatccatgtacttagttaaacttaaatataattaatgcacctaaagtgttacaattaatactaaatttgttcatattgtttatttttttattaaaaattattttcaaatttcgatatttagaattagttaaattttaaatatt

SEQ ID NO: 34671 - DNA, 1297 bp, Cannabis sativa
  modified_base (820)..(822): a, c, t, g, unknown or other
tttacaaaatttagacttctacccattctaaaataaatttttgaatacttaattaatttttaaaaattacatctaattattattttgcaacaaccgcttgacccatcttcctcctttattaaaaaaaatttaaaaattaggattttaatttgttccaacctaacattatgtgaattccgattcaatacaatctcatacatttatgccacaaacccatttctctattcaaccaactacagttagatttttccttaatttttaataatttgcttgctattttcctattgttatacttatttgtgaaaaagtagcaacaattttaattattaattggtaatctactttgacaattttttttttataatctttagattgatgaagatgatttcaacgaggagcgaaaataattaacaatcattaattttatagttgttattatattttttagcttaatttttcattttttaaaagaaaaaaaaataaattacttgaactaatcttggactgacacactaatttggcacttaaaagtgttaaaaaataagattgagtgtaattaaaagtacctctaattagaggtcattcatactattttttataaataaggttatgtgtgtaataactttaaattataaagagttttgttgcaaatattttaattatttaagttaaaaataataattgctaaaagatctttacttattaacaaattgcataaaaataattaataattattagtaatttaattttaaatataattaagtttttataaggaaataaagtatcaagttacaagttatttattattattatttttttnnnttttaaattaatcacaaccattcaacaatgatctaatggttaaaaataaatgtaaccatgatggttatatatttgatgtaaccattgaaacctcttccaaatatatatatatatataaattaacattaaaattttactttttttttttgattacatggatccaatccaatccaataaatactgaatggattcgatccgatccaaaaaaaatactaagtctaaaatatttgctaaacccaaattactgcaatagatatacatgaaatacaaccaatggatagaaccgatccaatcgatcggatgaaaaatctaacctacaatatatgatcgaatttggatagacctagaaacattggatgttgtccaatgaacacccctaattattactaaacaaaatacaatcacgattctttcaaaaaaaaaaaataaaaaaatacaatcaccatttgtgtccttgttacactaaaatatggtt

SEQ ID NO: 34672 - DNA, 2268 bp, Cannabis sativa
cccgccgctaatgctaattaaaaattgaaaaaaaataattttgtaaataacgttatttaaatatataaataaataattaatataaatacataataaatccaattacaattaatataatttaaatccaataaaatttattactaatttaaaattgtctcaaaataaattactttaacattaattctattacaatattgtctcaaaattaaactaaattattaaaaaatataaacaaattattccataacatcttcattaaggtctcgaattataaagtcttgatccagattattatcgttacgagttcccgaagcccgtggcggagaagacacatatgcttgatctgatgataaatccagtgttagatttcccagctcaacttggttaaaaataggagttgaataaagcacatatgcacatatggtatatatttataagtatactcaaggattgatatattcttttcaaccatttattattaactattattataaaattttatgaatattttatgaattagacacatattatttcatcttaaacaataatattaacaatttattttttaataatttaaataaaaaatttattcatttatttacaataaattatttaaaaaataacatattactaaacatattttctaaacttaaataaatataaattaataatttttttaaacaaattattattatttgaaaatttatataattaattataatttaaaataattttttatttaattcctaaaataaaaatatttacttttataaaacaaaattatattaaattatatatttttttaatttttcattattcttaattttttatgataataaaattaaaccaacataaaattatattaacaaattatttcttaaaactttaaataaaaattttattcatttaattataatttatattaaaattaaaaaataaataaattccttttatttaactttagaattttaaatattaaagttatttattaatttaattaaaaaatgtcaaattactaaacttaacttctaaacttatataaatataaattattaacttttttaaaacatattaatataatttacaattttatattattgattaaaatataaactaatttttaattaattcctaaacttaaaattttatcttaataaaataaatatattttaaattatacttttttaatattttcattattctcattttcttaagatattacatctttaacaaacccaataaaaataattaaataaactaaaaataaaaaataatacaaaaaaagatacacattaataaaaacatacatttcacaaaaaaaaaaaatttgtgtccacttccttaaaattcttaaaaacatacacaaataacatataataaaatatatatatataaataaactgtataaaatatatttagaatataaataaatctatcataattacatataccttatatatatacaactaaataaaagtcacatatatattttacatatacatttaaataaactatatataatacacaaaaaaatatattatctttcaaaaatatatactgatataatatatatatacacaggcagagcaaaaatatatatacacagatatatatacaaagaacaaatatatatatacacagacagagcagatcaacaaaaaaaatccaaaaattaagaattcgaaccctaaatcatttacagtgatcttgaaacaaacaaagacatttttttttaaaaaaatgttaaaaacaatggagattggagatgacttacatgagttgtttgggactttgtgtccgtttattttgaatttttgcacgaaaacaaccctcctccgtctgtggctggtgctaggttcaaaaataaagaaagtaaaaaaatatcaattgaagcaacaaaaagaaaaacggaatgggagtaataaaattaaataaaacatatcaatctttaacaaaaatcaactaaaacaacaaaaatgggtggagtaataaaatacacataccttgggaggatttttgaggaagaacaacaagaacaaaaggggtggccggaatggggatgaaaaattagtgtttgagttttgaagagaaaagatggggaaatggggaatgagggtttgatgggatatatataagggtattagcggcgtatcccgccgttaatagtaataattttttttattatgtttttattttttaactattattagcggcggggtccgccgctaataaaatttgaactgaatgggcgggaaaaattccgcccgt

SEQ ID NO: 34673 - DNA, 1026 bp, Cannabis sativa
taaaataatttccaacagatcttgctcatagaagagttggttaagttagttattgtctaactagcttaacaactttgattcttccagccaccaaatttaggatctcaatcctaagcttataaataccacattgacttttcattttacggaaggcgattcagattgagcttaagagtaagagagagaagagattgagaggtagacagagagatactgagaaaagagagaaagattggatttgggttttgtatgaagaattttctatagatgaagaagattcttgagtaagagtgtgagagttgaaatactttgggagaactcaatagagaatttgtctcaactgtaatgtacatgttcttgctcattcaataaaggagacttcagtggtgttccagaactgaagtagagccatagatcatatcgatctatcagacttgaactagtatatatcttggtgttgatttctttattttttgtatttattgtttttttttatttttcaatactctgtttgctcctattttttattcgattattgttcttaattttttttcgctaattgtttgaatgttaaagtttcattgatttaattctgcactgttagtcgtaattttttcacaaatcagagcttgataatcaattaagaacacagatacaagattctttctggtgtaattcttgaagaaactttaaatgtcatcaatggcgagattcgatgaaactggggactttgcactatgaagagaaagtctaaaaggaaatcctaatgcactagaaagtctctaaggttcttagagatgataagttattgacaggaaaagaaactagaagaggaaaaagtataaatggaggagatggcgtactacacgatcctcgtgtgtctgtcaaataatgttcgaaggaaactcatcgcaaaaaagacagtgaaaggagtttggaacaaattggaagaattatacttaaaaccatcaatagctagcaagatcaattttctataaaggttatacgatttcagaatagtttctt

SEQ ID NO: 34674 - DNA, 1004 bp, Cannabis sativa
aaatgaaatttttgtgggtaccattgggcctcccatcgggcccatcagaccccggcacaaaaatgaaaaattttagggtaccatcgggcctatatcgggcccatcgggccttcacccctttcaactatattgacagggcattgggccccccatcgggccagatgaaaaaaattctagaaactaggaaaaatccagttttcacaggcagcaaacattttaacacaaaaaacagcaacaatctacagatcaagcatcaaaacaacattctaaactaagtataacaacaacaaacaagattacacaaacaaaaaaaaaaattacccattgcttgtagaatgttgctccttgtatgatgctccctccaaattttaaagaaaataagtagataagcttgtagtgtagtatattatagtgtaatgaagttaagaaaatgagtagagaatgagtgaagagaaaaaaaaattatgggtgggtagtgtaggaggggagttcggttggagttattgaatgaataattaagaagaagaagagagaggggaggggggtaatgtaaaggggtgtaaaattgggttttagaaaaaagtatcccatttacaaatgatacatagtattagtttaggggaccaatttttgagtttattaagcatggaatttcaaatttccctaattaaaataataatgggctattatggtaatatagatttgatcttaattttcagtttcactttcctgttgtgcatagtgtctcttaggctttactgtgctctgttaatagtagtatcttaaaaatagctttgctatctgtttttagctcaaagttttataattattgattaggattaattaccaaatatgatagggtacatatatgttactgtcatttactcatttatgaatgattttttttttattcaccattatgttttataattaaataataagggacacgattttgtcccgtgatgtacttttacggaatgtattccgtggtacattagatgggt

SEQ ID NO: 34675 - DNA, 1463 bp, Cannabis sativa
aacacaactttaggcctaggactaaaggacaaagagttgttaacagcaattaacacatcatcacaaacactattattccagttacaattattaagcttatcaaccacaaccttacaatcagaatacaagggatgaacaggcagattaattaacttggtccaagcaactgcaagagaaacaactttagcttcagctacaactggtgcaattaacccagcaactggcttcaccaacccagcaatcacctgatccgaatcattcttcaccaccacacttaagctaaaaacctgcttcacattatcaattgtcgcatctgtgaaaatctgatacctgcctgaaggacacctttccatatccaagatattctgatcacacagagtgagaggagtaaatcatttctgttgagcatccagatactgcagaagaaagctttgacaccaagcaaacatatcctttggatcaagagtgaaccgattaaagaaagcattattcctttgattctaaattgtccataaaaagcacaacactaaatctgcagaacctttatccaaacttgaaaaaatattagaaagaaaatgcataatatccaaatgtttattttgcaagtaaaaatgagcaagatctgaagccttccaagctttcctagctctaaagcactctagcaatgcatgcataaccgtttcaggggaatttttgcacaaaggacataaatgagaaggtataatatgtcgttgggagagcaaaacagcaaccggtacagaattagtcacaattctccacacaaaatgtttgactttaggaggaatatttacatgccaaattctagcccagaaaggtgtcatatcaagggaagaagatgttgaaaggatgtctccagattcaagagctaagtgataagcagattttacagtaaaaagcctagagttatccctcccccaaattttctcatccttaccctcaagcccaaaaaaaggaacacttaagatatcattaacagtagaatcatcaaagcaggatcgaagtctatgcatattccaagaccccgaatgatcaataaaataagatagcttcaattgctgagggtccagatcacaaagggtctgcttatatctagaattaggaatccaatggtccttaagggtatcaatagcctctccatcatccactttccacaccagaccagacgctaacaaatcccttccccataggatactccgccaagaaaatgaagggttatgaccaactttagcatcaagaatagaagagtttgggaaatatctagccttaagagttaaactcaataaagaatcaggctgggtaaaaatacgccaggcatgcttagcaagcatagcttgattaaaatgaatgagagaccgaaaccccaaaccccccacaaatttagaacgatagagagattgccaatttttccaatgaatttcctagaatctccagaagaaccccca

SEQ ID NO: 34676 - DNA, 1986 bp, Cannabis sativa
tttaaaggataaaattgtcattatatattttatattaaaaaataaaataaaaataattaaaattactcttaatggcattccttacaaaattagtagaggaagttctctttttcttttctcctttatttaattaagttctccattttctaattttaataatgtaagttctcccttttttttctttatttaattaagttttttcttttttatattatatggtagttattttataagatatattttgagtacattctcattgtgcttggagtttaactcaagcacatccacttggataattgaatattgtttttaagttttcttaaagagtaattatcacatttctctctttatacacgtcagaatattttaatatattgtattaagaattttgtgaaaacaataaataaaaataaagagaagtactattattcatagaactcaaacaattaaatattgagttttttaatttttacatgcaattttttttttttttttttttttttgcatttatacaaaaatatgtagaataactaaccaagcaacttaaagggtaatctaaattcacattgcaactcactcaccaaccaccgaataacccaaatcatgaaaatgaaaaaataaaataaaaataaaaaaataatatataaaataatttcccaaaatatttcttttttactttcagaaactaaatttccaaacaaattaaaactcaggggcatatataataactaaataaataataaaataaaaaactttgaaagttttaatacaaactcaaatattaaattaaagaaaaaatattatattctatgatttatctaatagaaaaaccaatgattgtgttgttatatgaatattattttgccataaacaagctaagtcagttctgtaaggcttctacttctgatcagtggtatgcttgcaaatgggttctaagataccttgttggtacaactcattatggtatcagctttacaccaactcaaaatttagatatccaaggatctatagatgctgattgggccaactctattgatgatcgtcgttcaacctcaggctactacatattttttagaagcaatttagttagcttgtcttcaaagaaacaataggttgtggctagattaagtacagagtttggataccattctttggctctaattttttcagaaatcttgtggtacttagtacttacagagtttaaatcctgttttctatgctcggatgaagcacatagagattgacctcgagtttgtgcgagaccaagtctttgccaactctcgggacattagttatgtgccatccaacctccgaataacagacttacttaccaagcttcttgccatctctcaaactcaatgcaacttgtttgcttccaaattttgaggggaaatgttaatgatacacaagaggcttccccaagtagttaaaaattaacttgttagttttgtaaagctgtcattacatctgactaactattcttgtaactgtttcgtctacttcattcatctcagtataaataaacaaagtcatcactgattatgtagagctaactattcattcaattcattgtgttattttcatttcatttcaccattgtttcttaaaagctcacttttctttgttgtgctctaacaatctacttatagaacttcatgatcataaagttgcaaacaaaacattcaaatcttatgccactgaatcctgcaccaattgccaatgctaataactctttcttgctgcgctcttttcctcctggattttgagtcatcataagcacatccccttgggagatgcatctatcaacagagctagtctccggtacagttggaagaatagcctccataactataacatttccgttgtcgggaatagctttgtaacaattcttcaatagtttcaagcagtattcatcactccagtcatgaagtatcaactaaattatcaacattagtatacattagtcacagaagtactatcaagaaa

SEQ ID NO: 34677 - DNA, 1808 bp, Cannabis sativa
  modified_base (129)..(129): a, c, t, g, unknown or other
  modified_base (1639)..(1643): a, c, t, g, unknown or other
tttgcatgagtaatccctataactttgggatcagattacaaagatatggcaagctgtccaaatcccacgactagtgaattctgatttactatgcaatctttctgcttatatcaattgtaacgagaaggnaaatacttcctctccaagctcatagccctataaatagtgattcatattcactaggcaaaggttcaaaagatttggtctaagaattcatattcagagatactgttgtaagagctctaagaaaaggaactattctccttgttcttaagtcaaaacaaataacgaggattaggctattaccgaactactcagggctgaacctctataaaattcttgtgcctttatttgctttactatatttcaatcgtgttaactacttgtcgcttataaagttagactcactgtcgttggctaaaagtgaggtcaacattttggtgctttcattgtgagctgaactcaaggatcgctatttattccaaatttaatcacaagtacgattatggtacatactcgtaggggcgtggttgatccagccaatccacaggcggtggatcctgcattgctgaacccaggaaacacatgggttctgccaaccgtaaatcccagacagcccacaactgtaggtcacagtgtgaggactcctgtagatgaaatcgcagttggtgtgcaagagactgggaacaccagttcagcagccgaccagggcaatcataacatagccgttccgcctgctactaatattcaaacaacaattggacttatgtagggtcatactaacaccttgcatcatgatcaggaggaactcagcactccggtgaacctcgcgtttggggagcagaggcgcatgtttgcctaatggagagacaaagaaatggaaacgttaagggctcagcaagaaatgattgacaatcgcagtcggcaagcaactgcgctgattcgaaaagcctatcaaactatggggcagcagcctgcgaatgtcattcctttgggtgaaacagacgaagatccagcgatgaatacttctcagactataaatggtcagcaatcaaatccccggtcacaggttgcacctgtgggccaagtggtagtgggagaccttgtccagtaattcatcaggagaagtcatacccaataattccaaccaagttaatggtgtcggtcaactaattggcaaaccaaccaatcactgagacaaccaggcatttccgtatttgataggttggggatgacccatgatctcaaaaatgatctgaatgggaggagaggagtggacgatcagcttgacatgccgatcgtgtagctaggaactcgcgctcaaattcccactcagaaacatgctaatgtgactcagattggccaggaggccgaacaggttattctagccgtgcaggcacagtaggacgaactaaaaagtatgttccaaggcatggccagtcatatgaacaatgatctcaagttggatcgagcacgacgaacccctttctcccccaagatcaatatcctagagttgccccacaagtttaaaatgccaaccttaaagatgtatactggaaaggaagatcctttgtccaacctcaagtatttcgagatacaaatggatctgcaaggagtacaaggagatgtatgttgcagnnnnnttcctgccaccctctcggaagccgcccagtaatggtatttcaagttggcacccggaaagttcaatttgtggaaagctttctcctcggagttccatgcacaatttgttgggttttatgccataaataaaactctaatttcaatgtaatctttatcttttaaatatc

SEQ ID NO: 34678 - DNA, 6848 bp, Cannabis sativa
  modified_base (1825)..(1826): a, c, t, g, unknown or other
  modified_base (6820)..(6821): a, c, t, g, unknown or other
aatggtggaaagaccattccattgcaatgacattccaacactttaatatgtaactaaacaaaggaatggaatgaagattgtttcctttcctttctattccatttcatatctccaaccaaacgccacctaagtgtactctggagagtgtttactaaggtgtatttttgttttcatcataaatagttttttcacctttctacaggttttgggtctttggggctgatgacatcagtgctggtacatttaatcatcacttctgtatctaagctgcttttttcactttatattgagaagttggattgcaatccaggtgtgccctgatgggaagacgattgaagctgaggcagcccatggcacagtcacccgtcattatcgagttcaccaaaagggaggggaaacaagcacaaacagcatagcttcaatctttgcttggtcacgaggacttgctcacaggtatcacatcagtatgataatacaagagctgttttcccatagcaataattgtaatttttttatgaaacaattttatttcaacagggcaaagttggatggcaatgtcagacttttggattttactaacaagttggaagctgcatgtgttggtactgttgaatctgggaagatgaccaaagatctggcccttctgattcatggaccaaagtaagtacatttcgaacaaatttgttccgaaaattatgagaaatgcttttcatgtaggacattacatagaaattttgatgttttgtgtagggttaccaggtctaaatatctaaatacagaagaattcattgatgctgtagctgaggagcttagatttcgattatctagcaaggcaaagctgtaaaatcttggtcactgactcacaattgctcacaattgctctcaatttggttgagattctcaatgtgtcatcagcttcaaacataaaataaaaatctgcatcatttcatggttaactaagaaataaccaaattactttctttagatggaaatatgtgacactgatcgaatagtacgcaaataagaataagagaataaatgaaatgagtttgtctttatatttcaagaagggtttgtaaatttttggaccattttgatggaggtatttatcctctatttatagggattgtaagattaattttagttggcagaagatcgtgcctttcatatgtgtagttgggtttgattccttttgtttgagcaacttctctttatcacatttgatcgtataaacatatttcaattatagcaggataagttcacatttgatacgttttgttttggataattaagattttatccctcgaactttgatatgtaccaaattatgctcttgaacttttaaggtcgttaaaaatgtctcataaattattgaaattgttaaatttgagaacttttgtctaatttagtaaaaaaaatctaacataaataaaagtttaggaggcacgattttatgcatgtcaaatttcgagaagtataatttggtagatgtcaaagtttaggaagcatggtttagtacataaacaatcattgaaatagtaaaattgaatgacattagacaaaagtctttaaatctaacaatcttaatagttcagaattaatttttaaccactaaaaaagacatgatttggtacatgttaaaatttaggagtaaaaattctatttagccttttgtttttatcaaaattattaaggggttttttcatttttacacttcaaaacagtttttttatatttttacgaaattttacatagaaacccctattgtaactagcgctgcaacctaaattgcaacaaaaaaatcgtatagaaactcctattgcanntagcgttgcaaccactttagaaattcaaaccgtaaatttaaaacaaaaaaattaaaaaaaaataatatatgaagtaatttcccaattattaatccgtactttgatacttaggaggttgaattcagtcaacaattgatttgaaaatgatcaaattgtactcataattacataattaagcttactttgacaaaactatattgccacgagtaatattttcattggtgttttagaattataaaaaacatatttaaataataaaatattttattaattactacaaaaccaattaaatttattaaaataacaaaatcaataatcaaattaaattaaaactaataaaataatctctctctctctctcttcctcaacaatcattaaaaaaaataacaacaatcaaatccccatgaacatgaacatcaaatcagtatattttgttataagccaattatcacagcctcaatagaagttaaaaagttactcaaatataatctgtaaaacatgccacttctccaaaatcttaaccaacttgaacccatcacataccatacccaactcaatgacctctccaaactttgaataatgcaaataggtctaaatttaaatgtgtagattttaagaaaaaaaaaattacattattcaaaaattatgtatagagtggtgcatgtaaatagttgttaaattttacaagtattgttaacatgatttttgttgaagtcgtttattaaaagaaactaatacttttactattcttgtaacaaaaaattgtatttttactattctatttattcagaacaaatgatcaagaagataaaatgcttttattgaaaagagatatacttggaaatgtgtacgtatattcaatatgaagtacaaaacatcatcaaatttcaaaaaagaacattatagaaaaacccaacatttccaaatttaaaaagaacataaagaacaaacattataaagaataaagtcatgaaatatgagattctctatttcaatgctagaaaaatgaaaaccactactagggctcatagaaagaaatagaaaatctcatattcttttacaaacattaattaattaatgtttgaatcttgttgttgagcagttgcaggcatacccaacatggcctccaatactttttgtgtttgttgataggaattctgttccaatttgagaattttatacaatgccaatagtttcactctcactttaagtttgacatcattgaaaaattgcttgaggaattcaagtttcttaagttgtgaatcaaattcttgattgaaatattcctcaatggatccaactctgtcttgagaatgatcataattagttgatccagaaatattaaactgtttcttgtactcttttaccaccttcttagccttgttattctgatttttcaacttcttgttctccttcctcttcctcctcttctctttcttcttctccttcttttcctgttttctcttcatctcctcctccctcttcctcctcctctcctttggcccttctctcctctcttgattctccattactgataaaattacaaaaccaatgtatatattatatgttgtagtggcgagtgggtaatttcgtacggttcttggttgttggttgtgagttcttgcacaaaggtttttgaggtttagaaacacatgcaattgtctgtttatgttaaaaggggttacttaagacaacgtcttatattaattgtctttcctttgtataaataatattaacaactttaactagtgagtttttaatgaggtaattggtgcttacaaaaatatagcctttctctatttcttttttatttttattttaatattattattaaaataattttattattattcgtcaattattgtccttgacctttaaatgtaccaaatcatacttccttaacttttcaggctatcaaaaactatcaccgaactgatgaaattgttggattctgacgtggatgaaagttcaagaggcacaaattgcgattggtaaatattaaagtttgcgatagaatgatttggtacaacaacaatcatcacattagtaaaatttaatgaaatttgagtacttgagtatcttgttgcctcctactataaataaatgatgtctctcgagaaatgcacaaataattcagattgagtgcgcgaaaaataaaacacacatgcgtggaaaacgtgtatttgcttagaaatgacacatgtcattctcaaggaaactaaagcagtgttgcaattgatatagctactcatggacgtacatgtctcaagatagaataaaggatatcttgagcaagtctccagtacttccaagattattgcaagtgagttagaacttgaggggtaaatattatccctaaattcatgatagaacacgtgttaccatctaagcattacacaagactacgtgggacccttcgtgggaaaactccacttaatcatgtattggataacaacagtgtgggaagcgtgtagctacagaaggtagtataatcggataccctccaggaggttcctagcatcatgagaggaccattctaggatgttgcaaatgttgaaaacttattttatcaaaatctagatttactaacatgtatgttgattatataactataatctaacatcctaaatatgaaattcttaaaaacgataaataaacacataagaggtatagaaaatattacattgatggcagcagaataatatgactccttccgtttagatctataaccttgatcctttctgttgcagagtatgatcaaaatctaaacctggatacactaaaagcaagtatgactcatgtgtgtatttcaataatcaaacctacttgctactctatgttgatgtatactgatgagtttgagataaagatctgggcaaagcaaagagaattcttgggatagacataaagagacctaagcctggcatgataatactttctcaagttgcctacctacagaaagtattgaataagtttagaatggtcaagtgcaaatcagttgcaacaccacttgctcaacacttcaagttgtctgcatctcaatcaccaaaaatagatgcagaaagagccaatatgagcaatgttccctatgcaagttgtgttgggagtctcatgtactctatggtgtgttctagacctgacttagctcatgccatgagtgtagtctgcaagtacatttcagaccctggccctgaacattgggaagcattgaaatggacaatgaggtacctgcaaggtactatggacgctggtattgtgttcagtaaggagaaccagttcaaggaagaaatcacttgctttgttgactcagattttgcagcaaacctagatgctagaaggagcctaacagggtttgtgctcactactcttgggggctgcatcagctggaaatcaaacctatagaaagtagtagccttgtcatctatagaagctgaatacatggctgatgcataagccatcaaaaaggctatatggcttaaaggattaacagaggagttaggtttcaaatctgaggatatcacattttattgtgacaatcaaaatgctttgcatctcatgaaaaaaccaatgtttcatgagaggtcaaagcacattgatatcaagttacacttcacaagggatattgtgtcatccaagtaagtgcaagtgaagaaaataagcacacgtgataaccatgcagatattttcactaaaagtgtaactagagacaagtttaggcactgtctaaacttgttgagaatttgggacatttaatgtcctcactcatttcttttagatcagagattaagtgagtctaatcaggtaaaactgttgggattaaactcacttaacctgtcaagtcagtaggttcatctatttactcattagatgaatctgaagaaagttgttattagttataatagttggctttaataccaacttaaaagggatcccaccaacaattataaatatgagtgtatctactctctcaaggagttctgatctctaattccaagctcatacttcagatttcagattcaagtttagagagagagagtgtccaagaccataatgagtgtgtgtggagggatgtaatgggagtatcactcttgaagtaatttccatcaatgtgagacatttctttgtaattattcactgtgttgagttttattcttggacatattcaattgtgtactactgactattcaagcaaaaaagatccatgattcattcattctcgagctaagttttctttgtctaatttcaattaagttctacttttgattttatgattggttttagttttgtttgtgcattcttgaatattgttactgctataacaacctgttttgagggtgagcattcaccacaatttgctaagggtagttttgatcaatataggtgttctcaagataaaaattttggttcttctttgttctttttacaagaaggggaagggcatgagcattgcaccagttggtaatatgattaaaattaacgttgatgaaactatctttagcaatctagataagtatgggtatggttgggtggcgcgggacgcttctggttaggtttttatggttgaacagtaagccgaataggggtggtgatcatgttctcgctgaagctatcagggttaagaaggtcttgagttggttgaaagaaacaggacggcatgatgtggtggtagagtcagacagtttggtcacgatccaagctattcgaagttcattagatatggcttttatttttaggttctggattgatgagtgcacacatgttctttctagtttgaataatgtatttttaatttttgtcaagtaaactgttaatcgtgttgctcactatttggctagagcttcatgattaaatgattgttgtagctattcggattctatgatttcaaatagtttacgtgatatccttttgagtgatttgtgttaactattaaaaatatatatataaatatattaaagactaattaggatttttttctcttgaactttgacatgtannaaatcatgccccctgaactattgagat

SEQ ID NO: 34679 - DNA, 2939 bp, Cannabis sativa
  modified_base (172)..(181): a, c, t, g, unknown or other
aagaagaagaagaagaagggtgataatgatgatgtttgggcttgcagatagttttgggcttttgatgagagtttagtccaaattagataaccaaagcccaaatataacaagtcattggtggattccacatactaacattttaagggggttatttcttttattattattattnnnnnnnnnnttattattattattattataaatccataatttgttcaaatgaaatcattaattataatgcataatataacatagttttgggatttttatttttgtgggtggtaatgataacgtcatacaacttaaagatatacttttttaaaaaaataagagatatctgttatatagtccattcaaaaaaggaataatttccaaaaaatacaaaaaaaaaaaaaaaaaaattacaaaaatacggttggtacggaatttttaactttttttttatatagttttttagattttatttacattgatatttttatgttgtactcttgttattttattgttaattttttattatttgtactcatatactatttttttaacttttttttttctttcaaatttacagtttgggtttctaaagtagttgcagcgctagatgcaataggagtttttatacgattttttgttccaatttaggttgcagcgctagttgcaataggggtttctacgtataatttcgtaaaaatgcaaaaaaactattttgatgtgtaaaaataaaaaacccccattattttttgttatttttatgtgattttttgtgtttttataaatatttttaaatgtaaataaaaaaaatattaagtgtaaaaatataattttttttacaaaaattaatatttaatgtaattatcccttcaaataacaggtacactaatccatgaacaatataaattaaggatactcttaaaagttcaacacaaacttgtgataacattttatcaaagaccaaagtcaataaaaatataaaaatcataaaaaagagagacacaactgataaatatgacaacaagtataaaaaaaataccaccgtgaacaccacacacacacattaaaattctctaaactaaaaaaaaaacttacaaaatgaaatcattaatttcaatgcctaacataataacaagacttaagatacaataatatcgatattaatttcgtactgtttgagaacaaatttcgttatatattagcaattttaaatcgaacaaaattcattctttgccatgacataattgcgattaaaattgaaaccgtaaaaaaatgacacaagaacaaaatggtttaaagagtgaaagaatcatagaaacaaacacaataggttagaagttttagagttttgatgctaagaattgttacaaacaaaagtacttgaaaacacaacatcataagagaatcattaaaggaatcaagctcaaataatttttttacatcataaaatataaagtgaaaaagtacagaatattttgataaaaatagcaaaaacatgataaagaatcaatggtatgaatcactcttacattaactttcctatgtataattttttttatcctataagttatcttaggtcacttatagtgtctcattattttgtttttatacttattcctaagctggaatatgaaaacaattgatcaagacaagtctccaataatggggtccaaaaatttgtgccctaatggggaccaatcaaattttgaatgaaatgccaaatagaatttttgatcaaaccccactaaaaaagattgaatttttaattttaaactttttattgtagagaattgctaaaaaaaaatattattagtgtctagtatatttttcggtgtcatattgttattggtgtaattaaatatcaaaatataattttaaaaaatatcgcttaatcgtaaggcgccacttataaaagatgatggatattattggtgctcaataagaatgttttttttttattggttttattttgattagaatgacaggtcatgtgagattgggctaaacctaagaggaaaaaaacatgttatattcagaggcaaagtgagagagacaaaaaggaaactgcatgagcatattgggaaggcaaaatggctttggactaaatgacaaaaagaaaaagaaaaagaggaccagattgtaataaaaataataaaaaagtaaattatagtaataaagagaaaatattaagactattactaaagaagtccaaagcattagaaatgtatttatataatatgttgatttgattgatcattgttgagcatgaccttgaacttcacaaatttttagaaaatcacttgtgaaacctttttagattagtatagggtaataaaaaaatttagaacaaaatttaatataataatgttaatagtaaacttgtacaaggtaaggcactcttataaattattagtgatattttagaaaagaatattcatgattagttagtgatatactttaaaagttattttctcaagttatatgagatttgatatttaattataccaatagcgatatgacaccgaggaaagtgctaaatgctgtgccttttggcaattctctttacaaatgcaattacactcaattatgtgagacttaatatttaattacatcaataataatatgatatttaggtggtgttaagtattactagtgtattttatcaattctcttgtatatagagaaagagatatattaaaagacactggtattatttaacatcctccaatatatcatatcgctattgatataattaatatcaaatctcatatacattaatttatttcattatagtaatgttcttctataaagtattgttttttaataacaaatatggtttatttagtaaaaaaaagatggtttaattcaagaatttgattgacattattatttttcttaacccaacttccttgtaattcttttttaccaaaacacatcaaaagtattat

SEQ ID NO: 34680 - DNA, 1997 bp, Cannabis sativa
aactttttgctagtatatatataactatgtatcatgtatcaaagtttaaaacctttcttcaactatatctaaactaattgcatatttttttaagacttgttaaattgtaaaagataaagatgataatgaatacaatttaattagtatttattattagtgtaaagaaaaagtagtaatttcaacaaaatagattatagattaatttctaaaattaacttctaattctttaatattattggttggaattattgtttccaagtttataaaaaataatataattttaaaaaatattttaagttacttgctatagcaaattattagattgccacattataaatttttttaatacccatcaacgggtaatacctattaaaaagtgttccctagcggactaaaattaaagttgagtatgcaaaaattaacactttgctaggatttaaaccatgattatatctctaatgaattgtgtaaattttatattaaatttgattcaaaaaatagttaactatatatttggtctaaattttataattgtactccaatatactagaaatgataaaagaaatcatattttaataaaaaaaaagtcaacaaaaatatttaatttttattaaaatataaaaattatattaaatgtataaataaaaatataaaaagttattacaagtagcaaaaaagtaaataaaaaagtgataatcattgtaggtttgtgtaaaatttgactcatgctatatttttgtgttaaatttgacacaacttaaacatgtgtcaaatttaaatcacatagacgcaggtattgcattaatgtttgcttctacagtgcacccactaaagttttggaattcagaaaaaaaaaaaaatttactttaatttttttttcatattcatgtacattatagctatttaagacattttaaaaaatttcgaaaaatttaaaataatttacaatataagaaagtaatgttcaaacaacctatttaacacgtgtataaaataaaagagtcacgtgcaacagacagtcactacaaaaaactgctacttatagtgacaactttttagtcacaacattttgtgactaaatgtgacttttaatcacaacaaatgttacttatgactaaaacatagtactagttacaagttgtcactaattaagttctagacgtcatcacaacaagttttgtgactaaaaatacatttagtcacagcaaattgtaatttttgtgactaataatttcagccacggacttttagttacaacataggaatcatgatttataatcagtcacaatttttttaacttataatcacaagtttggttgtgactaaaagtaagactttttgtagtgagtttaaaccttatttttagcgtgttaaattttttaaaatttctcaaaattttgcaagatgtcttaaataattataatgtatacgtccataaaaaaaattagattaaaaaagtctcttggatgccgaaacagataaggttgcatcggtgcatcacttttatggggtatattgtaaaatttcttataatatatgtgtaatattatttttttattttatgttagagagtttcacattgctagtgtgtgaaaagataatacaatatataagatcaatggactacttttcttattgtcaattggtttgagatagaaccacatatgcatcttacaattctaacatggtatcagagcaaaacaaacaaaaaaaaacctctaacgacgtctattcgacccaaaaagaactaaaaaaaattggttgaagtaaagccaataaaaaatcaattggttttgagataaaactttatgtaccttatctaattctcattttatgatcactttgtatgtactaaaattcttatatagatatatatatttgacaaagtgattagaatctttcatgaatttacaacgcccacgttcgccaccagcgctgaaacctcctcaaaccaagatagctcatcgtctaatcgcagagcatgctttgccaagcca

SEQ ID NO: 34681 - DNA, 6323 bp, Cannabis sativa
gactgctgaagttcaccttgtcaccaagaactgtgattttcagatggagcattatgtcttcaagcgcaggaacgacgaggcttacattatcaatatcggaaagacatgggaaaagctccagctcgctaccagggttattgttgctatgtccacagtgagacgtcccagaacaatatgatttacaatgtattaaatatgcatttatattgacccgataaaagcgaacctattactgctgtgggattttcaattaaccgcatttattttatgcggtgtgatcaaaccccacaatttcaggggataattgttgtcagatatcagtcaactatgtaattatctgccccctatgtaattataaataggaggatgttatactgaaaaagggacgaaaaattcataagagaaaaagccctagaattgtatcagaaatctaataagattgacacgtggactatacagaattttaactacaaaatcacgtaaaaacctgtgttcttattttttttctttattgcttttgttttctgtgcaaatctatcaccattaggctcaaatatatagttaacaaaaatctgcgttaacagtttggtgctttcattgagagcctttgttaaaaaagctcagaaaaaactgtccttagatacaaagaacaattttctccatggttgacaatggagaaaacattgacacacctcaagaagaggccactcacagtcctggaaaagagccaatgggctctcggatgccttccaactcacaatctaaatggaccactctctccaggaggacccaaccagaagatggcccaagcacacgaaccactcactccagaagtaaccaacctgagggtggccctaatacacggccacacgttcaaggagaactcaacatgaagatggccaaaatcttggagtagtggatgaagaacccaatcttggtggtgctcagcccatggatgatggtgcttatgatcctacaaggtacatacctattgtcgaattagaaaaccgccatctcaggcgtcgcctggatgaggccaaccggtagaatgctgagttggagcatgaggcagtcgcagccagggcggcacaggggaataatacacaaaatcaacctgaccttggagtgagaagacatgaggcaaacctcatctcacgaaccaggaggcaggagacagctcaatataaccctctaaacactcagcaagaataacccgtggaaattgaggttccctttgaaaacgagcaaccaaataatcagccagaacaatctcatagaaatgaaataagaggcaaccaaaaactagggaacaggaaattcctcgtggaaacgaggaaaatcctgggacacaacttggaagacgtaggtcaccagcgaggaatctccagcgttcttcccaaacccatagggaaggggctcgcacaaatcccagtagggggaacacaacgaaccatgcccaagggagaagaacaggtcgtgaagaggcaagtgtcatcttgggacgcaaaagaacccacagtcgatcaacgcgaggaggagaaagtactcgtcgcaacaatgatccagaaagcacaggcacaagtaagattgtaagacactcaaggacgaggtccataagcaagacgaggtccgtaagtagaacaaggtttgctagcaattataaccaaccggatctgcgagaacacttgaaccataaaaaacctgatcttcgccaacaactcagtccaaagaaaggggatccaatccaattgcggatagatgagttggaggataaattcaggaggtatcaagctggggagcaaggaaaaaaaatctggatatgactcagattaagaactcgagccatatcatccaaatatcatgaacactccttttccccagtgatttaaaacccccacgtctcgtcatatgatgggaccaccgatctgatctcacatttgaataattttaacactataatgcggatagcaatgtcacaaacattctgcattgtattttgttttcccacctcactagttggggcagcaagtggctggttcaataaatttactcatcactctatcacttcttcgtaacagctgtctaaggacttcaaaaagcagttccaggcaacaagggataggcgacctgaagcatcctcgctcacaaacataaagcaacaacctggcgagacacctaaggcatacttaagtcgttttagcatggctgctgcgagagtaagaaaacatcactaagttcaatgagaggactcaagtgtttgttcaaaaggaagaagctcgaaaagagatgaacttgttaaaaactggctcagaaggtaaacccaatattttttcaacaagtactgtctcgactaaggctgataattcaggagcctctggctcaaagagagaagacgactctaaccgacgtccaaagataaaaagaaacaaaagaagcacgataagtacgtgccaatttactccatttatagcgagcttaatgaaacacaggagaatatctacttcgcgcatgagcacaaggttgcatttagtaaactgaagcccatgaggcatgcgaggcataaaagagatccaaacaggtactgtaagtaacacaaagacatcgagcaaacgtcagacgagtgtcaccagttgaaagatgagatagagagtctcatcacgtgaggccacttcaagaaatatgtgaagatggacataaccaacccaatccgcccaacaatccaagtaaccagggattacaacctcctccttttgagggagaggatatcctagtaatctcaggagggccacatattgcaggtgagagcaacaacacccaaaataggtacgtgaaggaagtgaagaacgagcattctgtatttgctcaagaaccttccaagaaagtaaaaaccaaagagcctccaattatattttcagaggaagatgagaagaatgtgaggtaccctcacgttgacccattggtgattaccgtcaagcgcgccaacaagagaataaaaagggtgttggtagataacggaagttcaatgaacatcctttacaaggaaacactgaagaagatggggctcaaaaaggtaaaattgaggccttgcatggtaaatctttgcagatttactggcgacaatatcaccagtcaaggtataatcgagctcgcattgaccttgggcaaaacacctttgtccaccacaattatgcaagattttttggttgtcgacctgccatcggcttacaatatattgatgggtcgtccaacattaatcggactaggggcagttagttcgatcaagcacttatcactgaagtttcaaacaccagtaggtgtgggagtagtgtaaggtgatctgatgctggctcgcgattgctatcgcatcgagctgtagcacagaaaagccagtccctagttaatggccgtcttgacagaagaaagcgagaagaaggatgaagatcttgatcttcagattcaagatgaaagaaacttattgaaaccaattgaagagttgcaagaagttgttatggactcaggaaatcccaccaagtgtgtttacattgggaagaacctggatggacaattgaaattgcagctaataagtttcttaagggtgaaccaggatcattttgccttgagccatgtagatatgatagggattgaccataatattatatggcatcatttcaatgtcaatccaaactacccaggaaaaagataaaagaggagacccttggattccaagagataaggggcactcaaataggaagtggacaagttgttggttaacgacttcatatgcaaggtgttttatccctcgtggatcatcaatcttgtcctcgtcccaaaaaccaacgaaacatggagaacttatattgatttctctgatctgaataaggcgtgccaaaggattattttccactacctaggattgaccagttagtggatgtaactgctgggcacaagcgtatttccttcatggatgcatattctagatataaccagataaaaatgcacgtcccagatcaggaacatacgagcttcgtaaccaacatgggagtttactgctacaaggtcatgccgtttagtttaaagaatgatggggcaacatatcagtgattggtgaatgagaagttcgttaatcagattggatggaacatggaggtttatatcgatgatttgttagtaaaatcagtaaaaagtggaagtcataccacggacctcacagagtgcttcgaaatattaaggaagtataatatgaagcttaacccaaaaaagtgttcctttggagttttctcaggaaagtttctgggattcatagtcaatgcgaggggcattgaagtaaatcctgtgaaaattagggctttgatagatatgccatcaccaacaaagcccaaggatgtccaaaccctaacaggaaggatggctgcacttaacagattcatttcaaagtcaactaataagtgtttgccatttttcaatgtattgcaaggtaacaagaaatttgaatggacaaaagaatgtgaggaggcctttcaaaacattaaaaggcatttggcgatgcctccagttttggcgaaaccagtaactggagaaacattactcctctatttagccatctcggaagacgcgattagtgcatcaatagtgcaagaagagggaaagcaccaacaacctgtttactatgtcagtaaaaggttactgggggtagaatcgaggtatcccccttgagacaagttttatcaaaaccagacgcttttggaagattgataaaatggtcaattgagctggggcagttcgacataacctatcaccctcgaacatccatcaagggccaggctttggcagatttcttaatagaaggaataacaccagatgaaaatcggcttgtctagcaagacgcggatacatggaagttattcgtggacggtgcatcgaacaagtagggctcgggtgcaggggtgatattaatttcgccagaaggcttgaagtttcattatgctttgagatttcaatttgacgcatcaaacaatgaggctaagtatgaagccttaatcgctggtttgaggatatccgaatggttgaaggtcaagaatctcatatgtcatagtgattcgtaactaattgtaaatcaggttctcgaggaatacaaggctaagggcctgaaaatggctaagtatctagagaaggttcgtaagaacttggaaagattcgattattttaaaattgagcaaatcccaagagaacaaaactctaacgcggataccttagcaaagctggcatcgcagaatgatttggatgaactaaactttgttccagtggaaatactaaacgagcgaagtatatgtgaaaaggaagatatcgagatgatagatagctcacctacatggatgactcctataatcagctatctactcgatggacaacttccagctgacaaaaacgaggcacaaaaaattttgtatgcagtgcctcgctacacaatagttgaaggcaaactatacagaatacgttattcaatgactctacttcggtgtgttcttcctatagaagcaaacgagatcatcagagaaattcatgaagacttttgtgggaatcatggaggttggcagagtctatcaaaaaagatcattagacaaggatattactggccaacaatcaacaagtacacccacgagtctgtcaaaaaaatgtgataagtgttagagattttcaaatatacctcgcgtaccaccaacggaactaaggatgatgacctcgccctacccatttgctatttgggggattgatctgattggggcacttcccacagggccagggggagccaagtacgcagtagtagcacctgacttcttcactaaatggaccgagactgaacctcttgtctccataaagttctcgactttgttatcaaaaacattgtctacaagtttggaattccaatgaagatagtatctgataacggaacttagttcgatggtgacttgttcactaagttctacgagaggaataaatattaagagattctcgtcagtatccaggcctcaggcgagtggacaagtgaaagctattaacaaaaccttgaaggatactatcaaaaagaagttagatgatgccaaaggtagatgggtcgacgagctacctcaagtactctgggctcacacagcaacgagaaatactccattctcgctagaatttggcttggaagcaatgttatctatggaagttgtaagaactgttattttatgtagtgacaaattatgtccagttgcattccagttgcatctgggactcatagtgttttgtctagagttcgcactgttagtgttagtccacgtcag

SEQ ID NO: 34682 - DNA, 2745 bp, Cannabis sativa
tggggtggcccaagcacacggaccacccgctccaggaggacccaaccggagggtggcccaagcacacgaaccacttgctccaagaggacccaacctgagggtggcccaaatacatggaccacacgttcaaggaggacttaacatggagatgtccagaatcctggagtaaaggatgaagaacccaatcttggaggttcccaacccatggatgacagtgcttatgaccctacaaggtacatgcctattatccaattagaaaactgccatcttaggcgccgcctggaggaggcaaactgacggaatgctgaattggagcgtgaggcagctacagccagggcagcctagaggaataatactcaaaatcaacctgaccctggagtaagaagaccacgaggtagacctcatggctcacgaacaagtaggctggagacttcttaggaggaccctcagaacgctcaggaggaacaacttagggaaaatgctgttccccacgaaaatgaataaccagatgatcagccagaaccatctcatagaaatgagaataagatgtgaccagaaaccagggaacaggaaattcctcatagaaacgaggaaaatcttgggacacaacttgggggacgtaggtcaccagcgaggaaccgctagcgttcttcccgaacccatagggaaggggctcgtacaaatcccagtgagggaaatacgaagaaccacacccaaggagaagaacaagacgtgaagaggcgagtgtaaactcggggcgcacaagaacccgtagtggatcaatgtgaggaggagaaagtactcatcacaacaatgatcgagaaagcactggtacaagtaagactgcaagtcactcaaggacgaggtccatgagcatgacgaggtccatgagcaggacgaggtccgtaagtagggcacagtccgtgagtaaaatgaggtccgctagtaattatagccaatcgaatctgcgagaacactttgaaccagaaaaagcctgatctttgccgacaactcgatctaaagcaaggggatccaatccaattacgaatagatgagttggaggataagttcagaatgtatcaagtcggggagcaaggaaaataatcttggatatgactcagatgaagaactcgagccatatcatccagatatcatgaacactcctttgccctagggatttaaaaacacccacgtctcgtcatatgatggcaccaccgatccggtctcgcatttgattaacttcaacactatgatgcgagctagcaatgttacaaataatttatgttgtattttgtttcccacctcactagttggagcagcaagcagctggttcaataaatttactcatcattccatcacttcttgggaacagctgtctaaggacttctaaaagcaattccaggccgcaagggataggcgacccaaagcgtcctcactcaccaacataaggcaacagcctggcgagatgcttaaggtgtatttaagctgttttagcacggctgctgcaagagtaagaaatttggatgatagcacccagcttactgcccttcaggcagggatcactactaatctctccactgctagaggggaactgcgggacgacctacagggccatctagtgaagaacatcatcgggttcaacgagagggctcatgtgttttttttaaaggaaaaagctcgaaaacagatgaacttgttaaaagctggctcaggaaccgaaccctgcactgttttgacaagtattgtctcgactaaaggtgataacccaggggcctctggctcaaagaggaaggacgattcttagggattgtctaatgataaaaagaaacaaaagaagcacgagaagcacaaggttgcctttcagtaaacttgagcccatgaggcacgcgaggcataaaagagatccaaacagatactgtaagttccacaaagacatcgggcatacaaaaaaacgagtgctattagttcaaagatgagatagagagtctcatcgcgcgaggccacttcaagcaatatgtgaagaggcagggtaatggacgtaaccagcccaatctgcccaacaacctaagcaaccaggtattacaacctcttcctgtagaaggagtggatatcctggttatctcagctgggccacatattgtagaagagagcaacaatgcccagaagaggtacgtgaaggaagtaaagaatgagtagtctgtatttgctccagaaccttccaaaaaagtaagaactcaaagacctccaattatatttttggaagaagatgagaagaacgtgaggtaccgtaacgttgaacagttggtgattaccatcgagctcgccaacaaaaggataaaaaaggtgctggtagacaatggaagttcggtgaacatcctatatagggaaacgttgaagaagatggggatcaaaaaagctaaattaagaccttgtatgataaatctttgcggatttaccgacgacagtatcaccagtcaatgtataatcgagctcgcattgaccttaggtgaaacacctttgtccaccacaatcatgcaagaatttttggttatcgacctgccatcggcttataatatactgttgggtgttaggttatatttagcctatgtctcgggtctaatagtaaaacattttctcagttattggtgtcttttggagcggttttacgcttgattttccttgttttaggttcccggggcattagagttcaaattcagtcagttgacgaaaagacgggacaaactg

SEQ ID NO: 34683 - DNA, 1482 bp, Cannabis sativa
aggagaatatttggcattgaaccacaagttgagcactacggatgcttggtggatctcttaggtcgttcgggtaggttggttgaagcatatgatttgatccagaatatgcctagcaaaccaagttgttctatctggggagcaatgcttagtgcttgtagagctcatggaaacatggaactagcagaggtagcttcaagagagctgttcaagttggagcccgagaaagagggtggatatatattgttatctaatatatatgctgcttgtgaggagtggaaccactcagatatggttagggaagtcatggaaatcaagggagtgaagaagactgcaggttgtagcagtgtagttatcgacggactagttcataattttatagcagccgatttgcaccatccaaaatggtcagatatcttttctattatgcagtatctaaataatgaaatgaagccggaagatgatttcctcttagacatgcaaatgtcgatgtaaccatgctgaattatttttgctaattgttgatcctcttggtgggtgttctgtactatgaagttgacaccaagcttaatgaggtcatttatatgcgcctcttaagagagaaaaagtaccgcacaacattgagatgaaacgaaaaataatgatattggaaaaaaaggatgctggcttctacaagatgagtttcactgtgccagtgtctctatctgtgccagaaaacgttaactggttcatgtttgccagaatgtttacacttctattaaagcatataacagtgactcagcttttactatctcagcaaatctagcttctcattatgctacaggtaccactactattgagccacaacagaaaagtatacattatttttatttcaaactacaaaactgaaatcgcataaaggaatcaaaattttctgtagaaggagcttgagaaaatgttgtaagcattctacaaagtctatattcagcagaacaatttttttagagagctgtatacaacaagagcgatctatacaagccaaacaagcaacttaataatttttcttacatagagcccccctttttatcttcaaaatattgtattgtacaccatcttattagaccatctatgttccaaaacattttacactatgcaacaggagatttaagacaatagaaatggtttgggctatgcagtttattgaaataatgctgtaattcatcacctaaatagtagtaacgattgagcctttttgttttgttttgatctttgtgattgtttaacttttattgctttttctggttctgtcttttttcaggaaagacgttatttgttgaaggaatttcctgaactggtttcttgcaaagaaaactccaaggttctggaggtggggtgtggtaatgggagtaccgttctcccaatactacggtaaacttgattcacatgactttgaatctatatgccttatcttaaattcatttttctattgggtttttgacagtttca

SEQ ID NO: 34684 - DNA, 2311 bp, Cannabis sativa
agatttttgttaacaataataagcctactttcgtgataggattagcacagaaattatcagaaatttaagaaagaataataaaagtaaaaatgacacgaagttttttacgtggtttttcatttaactctacatagtccacgagtcaatcttattaggacttttctaatatagaactagggttcttcacaaatagtgtattcttttttctctcaaggatgttccgtccctttttctgtatactctgcccctatttatagtaacataggctggcagttgattacattcaaattcgaatcccacaacaatatttttctaaaattgtgggccttaattacgctccacgtaaatgaatgtagttattatttgaaaatcatacatctgtgatttaaactacttttaatgggtcaacgatgatgaggatttagatacgctgcaaagtgtatctcaccggggcatctcgcttggtacttgaacaacttagtttaacaatgaccctagcagcgagctgaagcatttccaatatcttcatgagcttgaagacataacgctccatctgtaaatcgcaattcttggtgccaagatgaacttcagtagccaacatcatttgaatgttagcttctctctgagagagctgacatgatagagcagtggagctcattgaaagatgtctggagctgattagttaaggtaccaagaatatgccttcctatagcgagatggatgtctcactaattgttacccatgtccttcaagttgttacacttagttagtataatgtatattatacgctaagtgttccaacagccagtccgcctcatcaacacctctcttcatattgcgaggttgatgcctcgctatgtattatcgatgtcatccttacggttaggtcctctaacgggaaatggtttctcgtcaatatatgaatcaatagttcgtacatccttgcctcgctaaagattgtgcagtcaacgagttataaatataccctactgactctgtatttaatgagttattccatttaatatcttttaatataattgtcattatatttgttgattcgtattccccaaggtttacacgtgtcatcctctcaagtactagccaaattttgagtataacacttgaatcatcgcaaggataaaggtaagggaaaggtgagaaagcccacacataaacccactcttaagcctcctcgaaaggacacgaatctagcccgccagccctcaaggagcagaaggccaccggtgcttttaagcttggatgcccttctaatcctagaggcaaaactgtgccacggggacaaagtgcaaaggtacctaagcctaaaacgcgaaggaaccaccctagtgatttagtcaatcaggatggaaggacaatcgtggtgaattataaggacagctggtccactgcagacctctaatagcaattagacgccaagtacgaaaagtattaaggtgaaaaagcaaggtcgcatggggatgaccttagaaaccacttgagtgataagatgagggacgtgatatcctcgagagtgacacaaagagatttgaggagcagatagctgctctaaccaagttggtcaagaaacaaagtaaagcactatccaattccaaagatggaaatctagaaccttgttaaaggatgatcgcggaaactccacttctagaaaacttcaaaatgccccacattgagttgtacgtgggaagaactgattcgcaagcgcatttgaaaaagtacaacaagatgatgcaaattgctcgggtcagtgacgacgccaaatgcttatgtttttccttgacgttgactaactctgcacaggattagtggaaacgattagatctaggatcgattgatagtttgaaagatctacagtcagctttccacaaacagttcattgttacgcgtaataaggacatggaagttggttctcttaccaacattaaacaacaacatgaaagcttgaacgcttttattcaaaggatgaaggagctgtccgccaagaccaaggttagtgatcacatgaaattgatggccctccaatctggattagttgtttgctctcttcaatggggagaaatgtggaaaaagagagatgagacttggagtgagcttatggggaaggcccaaggcatcatcaacattgaggatgcctatataaaagctttttgagtccctctaactcctactccttttgtgattgctcctaacttcgcactccaagtttcggctccaaccttgactcttcccaaagcttagttctccccaaccttttatggacatattgttccaatttattttactaggatcttag

SEQ ID NO: 34685 - DNA, 1712 bp, Cannabis sativa
gccaaaggaaggttataggctagccagctcttgagaataagctagagtgctaaaaatgcttgttagagcaaaaaggcatgttcaaccacgaaggtctggccctttcaagaaaagctaaataataaagctatatggaaaaggctggtaggcacatagaaaggctggcaagcacattgaaaggttggaaagcacatagaaaggctggtaggaacatacttaggctggcaataacatactttgctggccaggccctaaaaaaaggattggccggccaactggtgcaaacaactctgaacatgctaatgaagtgcaggacaggcctatcaagccacaaaaataggaatattccctcgagatattagtcctatattctaggaatttagttatccattttgtaatttatataatagatagaaaatgtgttattatccctattttgaaaggatatcttgacctattattaggatcttttgtaatccctacactatatatagggcatcagatcactctctaaaggctaagtactccacatgcactagaaggcctccatcaagcctaagctacatgtaaagaacaatatttctctaattctcatgcatgacctatctccctttaagtctctcatatgcctccaaggcttcctagactctaaacctctcttttcttcataagttcttcatagaaacttatcagttcttgatccataacacattgttctcacaattgtaatactaaacagacccatagctagaaatcgcaaggttttaacctatgatctgcatggtattatctcaatagtgagtacaactaaaaggagagtaggtcattacccgctaatcaagggggctaaatctctataaatcgctatgtcaactttattatttgcttctacaatttgcacttggtgattgtaaataataaataaggatctgttgtcaattgaccaaattctgagttaacacactgtcaactaaaaataaaatcaaatatcttataagatggaaaataaaatgaaataaatatgactaaatggaaagcataaaaaacttacatttttagcaaacaatcttataacctcttccttgtcgagtatgcgcttctccttactctcccagttgatcgttcttggaatgcaatgcaacatcctaattgcatattcattagccagctccaagatggcctcataggcccattactgcaatgttgcagtataaccgtatgatgagtattttgccttcttctgagaaactcccttctcaatcttctaatgcatcgcattcttcacctctgtaaagtctttgttacaagttttcatcaacttgttgaggaaaatctttctcctcagatactcgtagaagaattcaaggttgtcaaccattcttatcacaaaaggaggaacaacagtactcttctcctccttaccagtgagtacgccaataacaaacaaggtcatccccaacttatagacatcatcaacttctgttcaactctcgaaatctttgcacaattggccaaagctaatggatggatcaccgttaaattactctacaatcaactggtttgaacttcctttctctttaatttattgttcagtaggcccaggtaacaagtttaatcccgtcaccaatgcaaactcggcccaaatgaattatatctcttcttcgcgtgataaaagtgtacctcatttggcttctcaaatttgatattgtgca

SEQ ID NO: 34686 - DNA, 1437 bp, Cannabis sativa
tatggcgatgtggcaattgactaaacatttatgtcattattttttttgtcacgtgtgataaaatttgacaaaaaaattaatttataatactgtaaatagttttaagactatttttaaaagacagaaatcttaaataacatttaattataactaagttggtaggatgattaagataactataagtaactacatcattgtcaaatttggtattaatagggctaaaatggtcattttcttttaaaattatataaagtatataatatgaaaagaaaagaaaaaaagagggggaaacataattttcatcaactgatgaaatataatcttaaatttatataagtaaaggctttgacaataaagtagaagaactacttgcattaaatttttaataaattaaaatttcatattaaaaatttaaatatttttataattgtccttattagaatttttttaaaaattttaatcttcacatattttatttttctctctaccaatttttttctctgtaataaaattaatatttttttaattcatactcatctttaagcaatatttttaaacaacttttagtttttactctttgatatattttatatagtagattcaaagattatatttctcaatagtattattattagacacaatttttgtgaatagttaacgaaattttataataattttttaattaaaacatataatttgatacttaatttagttatatcattactaattttttatttttatgatataattaaaaaaaaaaactatatattttaaaaaactaatattataataatatagatgaaaaaaaaaatatcatattaaatagtaaataaaataaaagacagacgtgtcatcactatatgaacatgatgtagcacattgtgtcaaacaaatatctaaatattttggctaatcatatttaatacatatatagactaacataaaattcaaaattcatattaagcaagtacattgtattatacttataaaaaaaaagtacattgtattattaatttttttttttgagagagaaaatattgtatttattattcagcggactatatataaaaaaaaagtatattacatttatttattttgattttttttttttaacaaaaaataagtttattaattattaaatttgtgtttttaatatttgtccaaatgtttggtagatagatgatagatgtggctgaatgcatggagtggaggcataaacgacaaacacgtgaaatatatttgcaccaactcacatactcaaatcttttcttttctatctcttttctttatttatcctccaaaccaatacaatattactaaaaaaaaaaaataagagttaaaaatacctcaaaaccatgtttagttgatattttaaaaagtaagaacaaaaaataatttttgaagttctcaaaatacaaatcgtatttagttgatatt

SEQ ID NO: 34687 - DNA, 3099 bp, Cannabis sativa
  modified_base (31)..(43): a, c, t, g, unknown or other
  modified_base (2724)..(2724): a, c, t, g, unknown or other
gggtgttgatcaacatacttgtgagtagatnnnnnnnnnnnnnaaaataatttccaacataaggtaggatcgaaacccattcgggaccaatccaagaaatgacaaaggttggaaaaataaaaaaatttgccattataacccaatcgtgaatggggcattcaaaatttatgcaaccggtcatcaaattccattggccttgaaccaaagtaatcttgaacagaaggaatgtgatgaatagtgaatggagacttacaagttccagaagtgctggctttaggagccctagagttaggacccgcgaaatggaatttaggttgggaggacgcttgttctttcccagcttccactcggaggatcctcctgaagcatcttgggcgttgatgtaggccaactcttgttccttcttgaatatgtatttcttgtatttgtcttccacggaggagatgatgtcctctcgaagtgccttctcggtctcaatgttgcatacatgagggtagagaaccttggataagttgaatttatctactgactggccttcaaaaatcaacttagccctcttgcagttagtagtcgtgaccaagtccctgacattcaactcatccttattataattggcgaaaacttttgcatgttgaagaaagagttgagtaggggcggtacggtacggtacataggagggcccctaacccactcagtgagcaactccagacgatcgacagctataaaatcagaggagaagaagaatcggtgacggtactccttcacattcttctgaaagttgaaaggcaccggaccctcattggcagggtggggctggagtttgaaaaatctgtctttaagcttgtcccccttcttgggacatataaagttcgtaaaaatataaaatttcagccagactgggcggggcccagttcctaacgacataaaaaatgaacaagcctgaaagcaggcggtaagcttagggaatgagttgataaggcgcaaggcaaacaaaaactagaaaatctatgaagtagtcttgaagcagtaacatggctctggacatcaaatgggttcaactccatgccccgaagcagttgtagttacggttgggtgtttcttcgtccctcgggaggcgatgaaaaaccccagccgcgaaaggcttgatcccggcaatagtaacaatcttctctaattgatgagcgcatgttcgggtcgagtgtaactcgtccgcctcccagcaagtggaccggcaggtgtatttctcatggaccaccgggcccttcatcacttcctccaaggtggccagtttcttgggcaccttgtctggagattttactcctgttgaagtagggacagacattgtctttgtttgataaagttctaagatctcttggtcgaagccaaagaaaccgtgatcgtgaaggtcgtgcagaacctcactcatctaaaaaagaaatccagcagttagcccccaaaccaaaccctaaactaatagaggggaatgggggtcccctaaccgctggaaggaggcccccctccggatgtttgccaaagatgagaaatccagagattctcttaggcaaacatcgggtgcaaatatccaaaaggaaatattaaaaataagagagaaaagggaagaaaaatacgagagtatgaaagtcacctcacactctcgatggtccctaagtaaagaaatcatcttctggccccaaaaggaaaacgacagtaggtacacagaaaactacggcatacgacggtctttgccatgaccatcttaccataaaaattgactgcaattaaaacgaggacattgatctaagtttttccctaacgggcagataaacaataaaataaagtgtacccagaaacttacacaatggtgatgggcgagaagttgatgtcgtccaacggtaaaacttggactggcagtgatggaggcatagcagtaaaaattcaatgatttttggaatttttttcaaatatgctatttgagtcaaaatttcagaattgtgaaagtaacccagcaaagtgaaagtgctggcttttataggccagagagggtgcaaggcagctgtgatcaagcaccatcgtactgtgggaatttgtatcaattcgcattctatgatccaagggatggggtgaatgggtgtaacgaggagaaaggacggttaaaatgttggaggacctctctgacgccagcattaaatgcatgtctatcactagacgggaagcgaatcgttgcctgcaaaaagaaataaatatcaatgatgacggtcataaatgcaacccacgcgcctagggcacgtgccactgtatttataaagagactggaggccacgtacaagcctcatttaccatttactaaatgagacttggggggtaaatgttgcctcagattttttccaaaatatgtggtagtggctgcatgtggtacgtggatttcaagaacacctcacccacaaaaattggctaagtcatgtatggatagcaaagtgcatctcagggagtgagccctcggagaggagcataaagcatgcctttactctccgggagctcgaaatacaacaacacatctcccgaagaagaagatcatattcgaactatcatttcacatttaatgcggcatggggaaaacgtattaaaacccccataaaaggatttgacagatggcataagcctcttttacggtaaatacacgataatcaacgagtctgtgatagctccattatgaagaatcacatnaatcaaggaaggataaagattactctcacctaatccctatgatacctacggcataggtcatgtatgtcctattttatatctgttaggaacttgtgcgcctaaggtgctgacgcttaaaaactagtgatccctttttggtgtccctggcaaaattctataaataccccaaaaacagaaggaaaaggggtcgatcgatcgattaatgaatcaaagagagaaaagaagagagagagattcaccaagaacattgatttcacaagcctcaacaaggcatgccccaaagactgttttccacttcccacagctcgtagatggccaacagcagggcacgaaatattaagcttcagacgcttactctgttgggttttatgccct

SEQ ID NO: 34688 - DNA, 1358 bp, Cannabis sativa
aatgcacaaaaaatctattttcatagagttatcaattgaaaatgaccaaagcattgaccttgtgcatgattactagatcctaaatgttagacacatgaccaccattcatagtccacttaggcaggttgcttatttcatcaatgataatttgtccttaaactcttctcacctatcttattatttcctgacggatattgttaatgatatcctcactattctcctccctttgcaccctactaatgattctcttatttggcaacataccaattcaggagtttacactgtcaaatcaagatgtcaccttagtttcaccaaagatttaacccgacacgaaccaataaattcccaaccgtctgcttggtgaaaaactctttggaccttaacatcctttaaaaaataaagcattttgcttaccgagctacaaaggacacgcttcctaccctttccaacctccatcaaagacaaactaattcttatcccatttttttccagatgtaagaacgagttgaaaaacatttgtcatgccttatttttttgcaatagtgtcaggaagctctggaaaagtacactttttttactcttatcatacaagctcttatcacattatatcttatgatttaattatttagtatatttctgattattaaacaaatgccaatttggaattgttcgtttgtatgtcttggttaatttgtcatgataggaataaatttacgcacacaggagttgcatctcagcaccaaaaccttatggagaccgcaaagaatttgatttgtgattacaagcaagctaaggaagaagatcccacgaccaatcaaaagcctcagatcactggtctcgctaagctgactacggatgtagccatagaggttgaatcaaataagtcgggttttactggtgttattcgcaacagtaatggataaattatcgctggcattgcaattccttactttggtattagtgaagctcacatttaagaactcaaagctcttataacaactcttcaatggttttgcaacgaaagttcctaatctatttcgttcgcttttggcgttccttcgtagatctccggatttcacccctacacacgaaattccactctcctctgtctaactcaagtgaattggtttcgagagcattccaccagtttttggcgacttttactttcaacccaattcaccgcctacgtgcgctttacgcccagtcatttcgaagaacacttgcccccgtcttaccgcggttgctggcacagagttaaggggtaaaaatcggtcggttatggtcgttttttacaattttataatcgaacggtcggttacggttttttattttaagaataccgtaaccgaccgtttaga

SEQ ID NO: 34689 - DNA, 2127 bp, Cannabis sativa
ttatgttcaatggatccttgcatggtttctttgaagctaggagaggccttaggcagggggaccccatatcccctctactatttgtcttgggcatggaatacctttctagacttatgatgaagattggtgagaaggaggattttcacttccatgataggtgctctcaacttaggatgaatcacctggcatttgcagctgatgtcctattgttatgccatggagatataaagagtgtcacttatatgctacaggccctcaaattgttttctctcacttctggacttcaccctatgcaagtaaaactgcaatttattgcagtaacatgcaagaagacagtgtgaagaagttgatagaagtatctggtttctctaggcgggttttgcctttcacttacctggggattcctatttgtcctaagaagatatctggcaaagaatgtgagttactggctgaacgaatgactgctaggatcaagagttgaagctcaagaaatctttcctttgcaggtcgaattactctaatcaactcagtcttaataactattcaggcatactggagtcagatgatggtgttgccaaaaaaagtgatcaaagctatagaagctatctgtagagcctttttgtggaaaggtctagctatgttccatggtgctgagctgttgcatgggagaacatttgccagcctaaaagagcagggggtttgggaattaaaaagcttgaggagtggaataaggcgtgctgccattggtaagtacatgatatgggccatctcaaacaagcaagagagtctttggctaagatgggttcatagtatttatctcaaagaccaggattggtggagctactctgcttctatcaatgctagttggtattggaagaagctggtagctatcaaagaacaacttaaaacaaagtttgtgatgtaacaggttttcaggaagaaagatacaccatagcaacagggtataatctattttttcctactgctactgttctgaaatggtgcaaagaggtatggagcagattgaacatccctaaacatagtgtgattttgtggttagcaatgttaaaccgcttgaaaactaaggacaggttgttgaagtatgagatgcaagtcaatgagaattgctgctttttgtgaagcgcatgctgaaaccaatcagcatttattttttgattgtaatgttgctgttaattgactgcaggaaatcacgatttggttgaattggaatgatgtatcaaccagccttccccaattgctgcgatggataggcagagccaagatttcaaaatttcggaaaatgatctttgttggtgcaattgcagggcttgtatttagagcattaggaggctgagaaataatgtgatttggcaagatgttcctttaacttccaactgagttgtagacattaagtggagtgttaagatgagagttgcaatgtttttaccaaaaaagattaatgatgtagataaagattggttcaatgatctataatgtacaattgtatagaaggatttgttgatgtatagattgtttaggccccgaatggggtgctaataggttgtaaataccgttttgtgcaatatattgtcatgatttatataaaaaaaaaatggatgaaaaattactaacatgaagggccaaattattccagaacacatttggatcacctgggactggcggagcatacacaaacacctcaacccccgtggagcatacaacagtttgtgctcgagcaatgtggttgtgtacttgaactaatccaatacatataagcctatattgtatttagtgtggaaatgatggtgtaacattgatttaattttaaacttgccttctaaatttggaattattcctttattcttttactattttcttgacagctgtttagttttaatgcaagtgtttatttggcaaagaaaataaaaaagaaagaatgctaaataggataggacaacatagttgttgaagatatcacatgatgtgatatttaattatgatcatttgttgataaacataaagaagccgtttcgggttaattcagtgactggtacgtttttccgcgtaataagatattattatatatttttctctctccatatatacaacacaaaggcagcaagtaaa

SEQ ID NO: 34690 - DNA, 1981 bp, Cannabis sativa
atccacataattattaatatttataacaattatgtatttttaaattacacttaataataaaaaaaaaataggacagtaataaaattgtaacataaattttttttattatttttttttattaagattatataacaattataaatattaaagactgtaaatatttattattattataagctctcttactcattttgtgtactttagcgtagctgtttgtttgtctcctttagttcatcttctctcttggggccacgtcagccagcaccattggctctcctttttcttttctttcatttctttctatacgtgagaaaaagaaaccatttttatttattcaaaattcaaatttagtttatttgataattttgttattactattttagtcagttttaagaaaaattaataacatatatatttgatcaacaaacactataggtccaaaaattttacataagccatctgtactacaatatgtatgccaaaattagagcaccatattcatgtttatgatttatgaggagtgtatttttttttttttttttttgagaattatgtaacttttattctattggaaaccataaagagtacaaagttaggtaggagatagttactatctaaccctaaagcctcctttgctagatcatgagcacaatacattagcttatcttagtacaaaagattataaaaaattgtcgagaagatagataatgtgctataatgatgtacttaattacatttaaaattgaactcataattgtatccactgcaaccttggaatcaatctcgagtctcaacatgaaaaattggcaaggacaccaagagtatatgcaacaaagctttagagtatatgcaacaaagctttactataattccgaaatgaaagagttacatttgtcttaagaattattattatgagtgtatgtaatattaagactaattatgatttttttttttctaaaattttcacatgtaccaaatcatgctccaacttttttagctgttaaaaatttcccacgaactattgaaattgttaaatataaatacttttgtctaattttagtaaaaaaattctaacatcgataaaagttcagggcataatttagtacatgtcaaagttcgaaaaaaaatcttaattagcctaatattaatttaagttgattaatcatttataaggaattaccaaccaattaattagctatagtgacccaatatattgtttctaacatggagttggtaacatgtttcccctaaaagttttaaaagaaataaaataaaatttatatattattttaatcggggattttcttttttctttttttaacaacaagtggaggtttgattcaaaatgattatgttttttagttaaaactttaaattttcgttcgaaaaatcagcagaatgccaattaacaagggtcggtcacttcagtctatggtttggctcatttcaaatagtatatatttttttttttgtaaaagttatcaattggaccctctgttatattaaatgataaaatagaccttatatttttcaaaatagtaaaaataagaccatgagcttaattttcaataattttatttttttaatataatcaactattagacaatttttaacacgaacagatactataaatgtaaccagttttattataacatctcttattcacattgttattaagttttattttgacaaaatatcaattcagggtcctatttgtacaattttaaaaaatacatggtctattttgtcatttaacaaactagagggttcaattgataacttttgcaaaacacagtgtctaaaatagtatttatccttgaaaatatcctttcaaaatatatccttagttagtttttttttttttgaaatcaccgtaagttaatagttaataatttaacttggctttcttaggtaaacaaggatggcggcttatctctaaacctaattctcttgtgtctcgtatttttaaggcaaggtacta

SEQ ID NO: 34691 - DNA, 2925 bp, Cannabis sativa
caaggagtgagtggagcggggagcaccatttggtgcatgcagggagtgatgggagcaaggagatcctttggtgcgtgtggggaatgatgggatttgggagctccaactcccttggacgtgcacggatggtggagcagtagcggggagctaggcacggggagctctcaaacatcaactagccaagcctcttatcctatccaaaccaatagatggtgaagaactatacatctatttggaaatcaccttgcatgcagccagtgctgctctagtgcatgaggaaaaagggatacaactccctgtctaccatattaacaagcgtctcattggggtcaattcaaggtatcctcccattgagaagctagcctattgcttggtcatggcctccagaaaactaaggtcatatttccaagctcacaaagtcaaggtactaactgagcaaccactagagcaagttttgatgaagccagaagcatcagggtgcctacttaagtagggagttgaactaggttagtttgagatcacctaccatccttgaacaaaaatcaaagggtaggcattagaagacttcattgctaaatgaactagccttgaagaagacgatcgcatagactgcaactcaggaggacattggaccttcttggaaactctatgtagatggatcctccaacgagcacagttctggtgttggactcatcttaattgctccgggaggatttcaaacccacataaaattgtagtttgagttcaccacaacaaataatgaagtggagtacgaggtactcctagcaaggctatgattagcactagcaatcaaagtcgagtgtgaggattaattttgtgtcttttttatagtctaatttagggtgtattttagtaatcttattattttattgttcaaatttatgcttggttttagttttattttttgttaaggagaaatgattggagatccttaattttgataatgagaaaatctaatgaaaaaaggaaactttttttagcttagagtaattttgtattgccttaaatgggtcaaatattctttctttgctccaaaatttatggtctagagtcaagagtgatcactttccaaaaataaattaaaaaattctaagttttagatattgaacatgctttgtttgtatttgaaactcaaagctaatttttggctatgatctattcatttgtaggaaaaatattctgaactaaagttctagatatattttttatctacccaaaacattttgaatcttctaattccaagctatatcatgagagttatggttaaaagactatcagttgttgcactaggaaactgcaaaaatcaacgaagaaaagaggaaatcgcttgtaaggccgcgaccttagttttttttttttttttgggaacttggattttttcatataaaaagaggactgatggaaaagttttgataccattcgaaaattgggaggaattctgagtgtagaaggagagcaaagaaaaaaaggcaccagtggaggactccaacagtattctatctcttcatctctatcttttatgtctttaattaaatttcttttattttaaaatgtttattagtggctaagttctttgaaggattattatgttaaccatttgagtttattttatggattaatgtgattatataattttgtttttctctttattcaattccatacaatttattttaattttacaattattgactaatcaactttaattgttatttatgaattcaaatcaaaattctaaaaaatgagatttgaatatgctttgattgttaaggatgcaaattgatttagaacaaaagtacctaggttgtttatatgattttactagttgttatgcttaatgctatctttctaattaaacttaccatagaaatataggaagttttcatatagattgggttcataagtcttaaccagattataaacttcttaactcaactcatcaattgaatagaaagaagagaaatttggtaattacattatgaagtaaaataaaagatagttggagatcataataatctttttctttattattgttatttttctaattttaattattgaattattttatttacttttatcaaaaaattattattcatcaaatagaattaaaaaattaattgaattgtaattgataatcaattattgaggaaacgatacttgatttatcattatattacttatttcgattgtgtatacttacataacaaattttaccgaacaagtttttgctgccgttaacggggattgaaatcaatattagtttaataaatatttcttctaatttggttatcttttattttgctaatatttttattgtatgagtttttcttgcaaggtacataagaaaaaaatgctacatcaaggttactttgtgaattttgtccaacaacacaatgagtcattctacgctgcttagggaggtttaatgaattggtagagcaatgtcatcacaacctttcgaggggctatcttacttttttctttcacaatggattgaatgatgaaacgaaaagttgggtgaattatggagcagaggtacctggagagccattgttaagaagaagtcatgaagacaaaaagtatttattaaatgatatagctaaatttgactaccactggcattgggatccttcacttcaaggttggagtcaccaataccctccatattgtcaaaactcatcctaaccaattgaagaggaacaccatacaccatcactttcaaaaaaaaaaaataatccaattaaagtgtgtggcaagatctctaactgataatttaatgattcataatgtggagtgctttaagaacaatgaatcgaatgagaaagattatgagagttgtttgaataaagtaaaagcaccattagttgagtcaaaagaagggattgagcctacaattgaagatcaaga

SEQ ID NO: 34692 - DNA, 1791 bp, Cannabis sativa
  modified_base (27)..(43): a, c, t, g, unknown or other
atttactttttttacagaactcaattnnnnnnnnnnnnnnnnnagttatgattttttgaagtttcggaaaaaatcagggtcgtgcaacagggccacgcgctcggacagcacacgttcagacaactacttgaccgagcgcctgtctgaactgcccatccgcgtgcggaaatcctgcagcctcccccttgcgccgagtttttggaggacactaccacaagtagatgaaagtggtctccacctataaagcaccaaaggaaacttgtgcaaatatgttacctcaataccaaggagtgcaacagaagtgaaagaaacaatttctcaccaaaatacaagcttagtcgaccactgccatctttgaggaacaaattgttgcagtggttggccataaggaaaggggatgagattttgtttccaaaagtatattttcaccaatagcatgtcaataccaagtgagaaaagctaccaagcagtgtgaaaaccatttggccgaccactgccacatttttgggacaattggtggtagtggtcggccaccacatagaagtggcagtttctttggccaaattatatttccaacattcatgtatcaattagaagtgagaaaaattacctaaggctccatagcccccttatgcgaccactgccacttttttagaaaaaattgtggcaatgctctcttaagtaagtggccaagaactaatattaccaaagtagttttctagcatgcatatgattgaaataagcaagaaacaccacccatgacttcttataagccgtggccgatcactgccactttcaggccctgacggtggcagtggtctcccattagggtttcagacatcaaaataaggttttagagtcccaggacccccaaaatatgaatcaacatcaaaaaacaagtaaaatcacaccttgagggatccgagaacatgcatggtcgagagctaccatttggccatgtcagtgctcgcaactggaacaaaacaacataaactgcccttcaataaaattggcataattctttcattgttaatccaaatgaattggttcaaattgcattggaaatatattttcaggacagatctaagtgtgtctcatggtaatagctcaattcttgttattggttccaaaatcggctcacaaatcaggctggtacacattactcgggaattgaatagtatagttaagtgtgggatgttagagaacaatgtcacagcccatgtggcatcatatgtgaacggtagcaccccaaaacacatgttttcaacacttctcaccaatatcatgaattctaagtcgagaggtgacatcacttgtcactccatttcaaattggtgcatctttagctgaaaattagaggtatacgttggtcggtttggtcgggttataacatattttcactaaccaaatataaatattgggttgcaaatatttaattgtaactcgcccaattaaaaattagaaaaagttcaacccgtccaatgattttgtcggtttggtcgggttaaaccgtccaaaccgttcttcactttttttttatataattattattgttagtttctagtattcaaataattagatttttaaaaaaataaaggtatattatttatatttcaagctaaaaaatactgtagtttaaattaattttaagaattataatacatgataaatatatttgagtaaacatagaataattaaataaaataataatatggtatagattttaaacttcaacttcaatatccaaatacaataaaaattattaactataaagtctaaattttaagttaa

SEQ ID NO: 34693 - DNA, 1336 bp, Cannabis sativa
ttgagtaaaagataaaaggtaggaatagcaatagcatccaacaaaactggtactctgtttggatacagaaaaggaaagtagagaaaaatcaattgtggaaaagcgaaagtggtggagaaaatatgtgtactttagagaagcgcggtaatttattcttccttacactcaccggcgacgacgatcaccgccttggccccgatgccatcgactacatcctctccgctatttcccaacttaaatcccaagccacacccggctccgtcctcatcactaccgcccaaggcaccaagtttttctcaaatggattcgatctcgcctgggcccgatccgccgactccaaatcaggtgccgtcactcgcctccgtcagatggtcgcttcctttaagccagtcgccgccgaattaatctccctcccgatgccgacgatcgctgcccttcctggccacgccgctgccggaggctttttattgtccctgtgccacgactacatattgatgcggagagataaaggtgttctctacatgtccgaggtcgatttaggacttccgtttccagactacttcgctgcagcaatgaggtcgaagataggatcggtttcggctcggcgagacgtgatgctcaagggggcgaagatcaagggcgatgacgcagttagaatggggatagccgagtcggcgcacgatagcgcggagaagaccttggaggctgcggtgcgcctggctgaacaattggccaagaggaagtggaatggcgaggtttacgcggagataaggaagagtatgttcccggaattgtgcggcgtgcttggagtttccacaaaagttattgccccaaagctttgatggaaaacctttctggattttcaatcaattaaaaagttaaggttttttcattaaggataatatcccgtttcaatgatttcatatgcagattaatctataagaacaaatgccataatgttggaatgaaaaatgatgatgtttttcttcggctgaacatagaagaaacggaaatttcacttgtgtagttgtgtatagataatgttataaatcttttggttgggtgaaattattttgatcggttgtttcataagttattaatcatttgttgcatgtatgatgatatataaaatggaggggattaaattaaagctctaagtaataaattgttagcaacaacaggtactaactcctgaaagaagttggcaccagcagcccacatagccaacatatgatatgagctacttattgtgctcaccagggatctacaaagaaaaattaagattctttagagaacaaagtatctagtttagctgcgtaggctgttgcttagctgc

SEQ ID NO: 34694 - DNA, 1718 bp, Cannabis sativa
  modified_base (1476)..(1478): a, c, t, g, unknown or other
agggcataaaacccaacaggtactgcggcccgcctccttgttttggggcaaatttgaacacgttaatcgaatcctcatgactttgtgatccggactccgtttcgggagttctatatatcgttggaaagctcgttctgagctctatgtgcatatcattgttttgaattccaattttatattatgtgaaagtgtaattagggattaaccctatatttgtaaatctcaaaatttatgactaggaataccgaaacttggtgaggagcacccggggatttagaatcttcacgtttgcaggacatcaggtaagacagtagttgcacgtagagttatgcgtggtggcgcttttgttgaaaatgttatatgtgattaattggaaaccaggattagggttattaccctaacatgagcggtttaatggcctagtgttattaccctagtgaattattaatatatattgttattctaggagattgcaatgtatgtaaagttttagggttatgcgttcaaggtataatcaggttagactcggtaaccaaaaccgagatgaaccattctaaggccttattgtatatagacatgtgagcataacacgtaggtctatgccacataaacatacagacaaatgtgagcgtaacatgaaggtctgtgtcatacagacaaatgtgaatggcattaatatttgtatactgtgttaattatgattattgatattttatactgtcttgttgggcttggctcacgggtgctctactgtgccagaaagggtaaatctgtttttgatcagccatgagtgcgagagctggatgatgtatgtacatgttcaggccattctagaccaagcgggttggggtctaccagtgatgaacgtttgttactctattttgccgcttaggacggctaatggaaaagacttgtaatattttgtaaaatatttttgggatcccgagatatgtaaccttagattgtaaaattaaattattacaagttttattttcattctgttttagtttaaagtttaaagttcctacacttttctgcttagtaatctcgtttaggggattaggatttcttaatcacctttggtagtgtgcctaattgttagggcgttacaagaaatttctagaaacaaattaagaggagtgacattggttcatcccatacttccattaattgtgtcagttggattagctccatcaccggggagtggaacatgcattgtttcgacattgaaaaatccattatttctgtttgtctggtttgcagccatgttgattttcctcctaaataagaagttacttcccacaaacggctccaaatgttttcaaaggaagttagacaacaccaaataaaataagaattacataaaaacagcgagtattcaaccgagaatagcgaatactcaaataaagacttcctagacaaatagaaaaagcaatgaaaatgatgaacacaaggaagtatagtggttcagtcagnnnacggtctgcttagtccactgttgtaaatatttttgtcttgtcttattcatgttggattactcctttatatagaaagcaagtgtccttttaattacagataacttaattgattatataaccattttacaataaatattaacagtaaattaaaataaacataaatggaaaaaaatgaaaaacagtttaaatctatttaactaattactgcaacatacgcgacttccatagtgcgagttgcct

SEQ ID NO: 34695 - DNA, 1490 bp, Cannabis sativa
  modified_base (1095)..(1098): a, c, t, g, unknown or other
tcaatgctaagttttctagcattactttgaggctttctttctttttctttcttgctgcaattctttcatggtatcagagttcctttgactcacgttcatggcgtcctctagagaaaactcgtcccctgtcactgatccttggcctcaaagctccatacctccagtgcaacaatggaatcttttctcccattctctcacctcttctcttatcatcaagctcgatcaagctaattttctttcctgaaaaattgcaagtcgtgtctattgttattggccacgatcttgatgttactcctcctgataaactgatcactggcaaaagcaatcctttctttcttcaatggtgacgcaaaagatcagcttctgttatcatggtgacccaagacttcttcaactcaaaggttagctcaccaatcttcataaaggctccttgactatctctgattatattgacaagatcaagtcgatttgtgattccttgaccattactggacataacatcacatatatcttgatatgatccttctcaatggctttgtccgtatcacctctcgcaatgatgtcttgtctcttgaagatgttcaagccttgcttctggctcatgaaacaagactcaaaaggcaccattccatgcttgatatctccaccaaaatgtcagccaatcttacctttggctctcgtaatggaccttatcattcacctccttactatgtcagaaacacaaatcctgaccaacaaactcaaaatctatcccgtaattcttctcgacctccaaaaaataatcgtccactgtgtcaagtttgcttgaaatttggacacagctcctgtttgtcattatcattttaactgaaactgggtaactccaaagccaaattcctctcaacctcaagcacatcttagtttgattatgatccttaggttaatgtctcccaatctctctctgattttggggatgatgcaagttggttcgtggacacaggagctaccaatcatgtcacctacaacatggacaatctttaatctacaaacactagaaaccgtggctattggagatggtaagtgttaagttatttttagtattaattttagatgaannnnagtatatttttaattgagttttaatcgtgtttggagtatttttacgtttgttatcttttatttttgcagatttaaaataaaagaagtttagaaaaatatcagagaaaaaagatgggaaaaaaaataaacatagctcacaaaaaggataatatttaaaatagagaaaattgtgcaacaaaataaagctgaaacttcaaacctgaatatggctatattttgtttagattttggaaaaaatcaaaacatgaaagttctagatctctcttttatctttccggaacatctagagtcgtctagttccgagcaatatcgagagagttatggctaaaatactatcagtcaacgcaacagaaaaatcacctcctcttctaatcctaagtagaataggtttt

SEQ ID NO: 34696 - DNA, 1470 bp, Cannabis sativa
gccagcttctgtgaggaagctagtctgtcacttgatgcccgtttgagtgtcggggtctccgtttgttgaggtattgtcatgtccttcctgttggtgagttgtactgccacgtggcgctaattttgtccacgtaagcactgctacgtcaggagacaaaaatcgggataacaatacccagcctttttttttattattttttgagtcagcagctacctgtcccagttcagatgttaattaaaaaaatcaatttcacgtcttcattttctctactcatattctctttcatttagttatattatttaataataataatatataaatttgtgtatatatatgtatgttagacacaaaatgttagtagtattgctaagaaattatatttagtcttaatttaataataatgtaatatatatgattttcttaaaatgttagcttaaaaaagcaaaaaataaataggatgggtcgggtcaaattcgactcgcttaattcaagtttggctctgctttagtccgatttaagagaattatcatgttaaatcaaattactattgagtcggatcgagtgggagctaacctgacctgattgtcattcctaggtaaaacatgtctaagtgcatgttagataataattatattttattaaaaaatttgccctatatcattttttctattctggtaaataactctcttaatttataatagccaaatctgttattaaaaaaaaatgatttttaaaatttgacagtattttctcattaaacaaaaatcgaatctatatctcatgcattatactatccaccttatcctattaactctaccacatgaacttatttattagatcccatttatatcatacctcacttggtctttggtttattaatcatttatttattcttaatttgataattagtccaatctaattaattaatattaaaatgtgatataattttgtgttccaaccaaatattcaatatctattttacaaacatggatttccctacagttgaactctgtcggtggattctttatgggtccatacaattatctcatcaaaatttcatcacttcttccctatgttcagactattttgccctttttaacttacacgccgccaccaacaccaaagacttaaacaccaatttccttactcagaacacaaaaataagagtaaggaatattgagggtaaaattggacttcattgatgtgctctgtggggaagcgacggcctgctgtttggctatctctacagcgctggatctgaatgccaagtttgttattgttcagagttattccagagtaatgatcaatgcgctcaatgggcagggccgtcttaaggtgatgagaggtctagggcgaaattaatttaaaacgaggccttttattttaataaaaattaaaaataaattttaattaaattttgacacaatattaattttaattcttttatctctatgtaataaatattttttt

SEQ ID NO: 34697 - DNA, 4189 bp, Cannabis sativa
  modified_base (2979)..(2987): a, c, t, g, unknown or other
gaccgcctcgattctggttccctcagaacctcttgttctaccttgagccaccggatgcagtggatgatttcctcttctggtccatgcgcgaaccactacctcccctgacaaggccttttctgcaacacgcattctacattacttaaagaactccccaggacaaggccttttcttctaagcttctccaactaacactattcagctctaagctttttctgatgcagattggggagcatgcctcgacacacgacgatctataacatgctactgcatttttctcagccaatcactcatatcctggaagtctaagaaacaacaaaccatctctcgatcatccggagaggcagaatatcgagcaatggctcatgcaacttgtgaactcaggtggctcacctcaattcccaaggatttcaacatcaacatgtcactcccttccacccttcactgtgataacaatgctgccatccatatctctgaaaatccagtctatcacaaacgaacaaaacatgttgagatcgattgccattcagttcgagaaaagatcaaccaaggtgttcttcgaatgagccatgttccatccaaagccaacttagcagacatagttactaaacctctttttcccagtcactttaaagatattgtattcaagttgggcgttcgagatctatacgctctaactgggcgttcgagatctatacgctccaacttgaaggggcctgttaagagttagtttagtccaagtctgttatttttctggtttttaccgtttattttgttttttctgtttttctgttacaaggttcagttggcttctaagccgacttccttgcctataaataattgtattctttctcttgtaatattcataagatacaaatcaataaaataaactttttctctctctaaaatcctctcttctaacacaattatgtagtattgaataaaaaatatattattgatcccaattatattacaagactctccaagaataattcttcacatctagtcactcgatcaggatgtagtcatgtttggcaagtaagttctacaaatatataaatatgttggtatttggtattttgctttgaattattcttgtgttttcaatgtttttcttctaagaaaataaggttgaaattttgttcaagacataaaatttggttggagaattgtggtgggaggtataactggatttcttggggcatcattggagtgttgaaggggttggtggtggtggtatttttgtcctaatgctaaccatcattgttgggtttgatgagaaaatcatcaattgcaatttttaagtgtaagtaactctgataaacgtaatatgttacaatatttttatataaatattattttggttatacattgtattattgatatacattatagttatatcaattttttgttatgatgtatagaataaaacttttatggttgttccttttggttagattagatatattttatttttatattaattatttgttacatgaaaaatattatctttattatattataaatgttattgttagtgcatgaaaatattgttaacaaaccaattgtaaaatctgaaaatgcaggtggggaaaattgtagatttatttgcaatttacccttacctacaactattcgtcgttttataaccgacactaaaagtaaatctaaattgcgtacacatatgcgtcgaactataactaatgcaataaacaaattaacactgattacagtttgaagaaaagttatttgcttcagcacacaactgacaccaatagtgtaaagaccgcttagttttcacttagaaattagtagataattagggtttaattatgaaactagaataagaattattatttatcattttctggagattgatttgaattcgagatgtattgtttatgtcatacataaaattttatgtttttgcatgttttgtgcctgaaaatattagaacgcgacatttgtccaatagaatcaaattttggtatttagtagtagcgaggcagtatagttaggcattgaaaatgttgagattagttgagattttagaattgaccaaaatactcctaagtgacttagaagttttttggatttaatgaggggtaaaatgatcttttcggccatttaattcatgtcctttagtgatctttacttatgttttaataatctgaatattgttttaattaaattagaaaaccattagatttattcattttgtccaaaagtaagaaaaatcaagaaaagctaaactctctctctttctctcgaggtacctagaaccagctagggttgggaacttttatgcttaattcaaggatttctagcaagcttttagtgatttcaaactcaaggtaatgttcttgctcatctcttattgtttttcttaagtttcaagttaggtgtgttatgtttttttattagttaggttctgtagtgattcatgttgtttgagactatattctaagcttaaaattaggtgaattgagttgaattgatgttagtttgtggcttgatttggttgttagaaaatgtttgagttttagaactcaaactttggtctttaatggtaatttttgattctctgtatgtggagatgttttgttgcttggtttatgttcattatggtataataagcaggtcttgaaggtttggtgaggtttgtggtcaatctgaggttgtagttgtttattgtgtgtttctcgcactgaactggttgacttgtttaggggacctgtaggaactagtcgaccggttggtccccaagaaacccaactgaattggaattccagttggggtactagtctaccggttggggcattttagggaaccatagtttttccagttttttcaataattatagtattgccatgttattcatcaatagggaaactttaagtttcaagtttatgtccccaaaaagtgatttagcgtgtcactcactaattttatgaataatgtgatttaggggcctgtaannnnnnnnncagctgttccactcaggttggccagcaaacttgaatttggcaacgaggtaagattagtattatgatatgcatatgtatttacatgtttagtttacatgttttttatgcatgttagattatatcgatagcggtatcagtatacgtagagttatattggatactgatagatgtatgttggctagacattgatcgacgctatcacatcagcatggctagagtatgactagcatactgattatagactgatattatggtcaatagtatttttgtacaaactttctagactcattactgtgttggacacggggacagggttatcgttgggtgtatgagcacctgattataatccgggtaattactatgatattatttatgcttttcttactgagtctgtcaactcatagatattgtttgcatgtgtaggtaagatcaaagctaaggttgagtagccatgagaggaagcaaatgaagatcgcacatgtcggagcgattaggcctagagcgtattgtcattgggacagctgggcttattttgtgtagttgctagtcgacaaactttcgtattatgctctgtaaaactgttgtaaatattttgttatgggatctcaatataatatacatatgttattttggtattcatcattagttaaataaagttttaattaaacacaattttcaataaactcgttaattagcaatgagttacacgattatgttaaaaatcacgttaatacgcattaactagtagggttttacaatttggtatcagatatcagagctgccaagttgtcttgttgtcttcatgtcttcagatcttcagaagatcagaagatcgtcacgacatgtacaatcatcatctctgaaagctcgtctcacggttcagtaagctttaattgctttagtagtttattttgagagcctgttttaggaaaagcctgataggaagcatgttagtagcctgttaattgaataggtgcatgttttaaatttccaaaataagcggtaattagtaagttattcttaattgcgatctaacaagactagctcgtagttacgcgagctgttttaatagtatggatgctaggaaaaacactaggagtcagggtaacttggtcgggtctagttgaagtcagggagctcagattcccctatatgttcatggtggaggtagaggccctagaggcagggcacgcagtcgggga

SEQ ID NO: 34698 - DNA, 1576 bp, Cannabis sativa
ttggcatggggggctctcgccaatcattatgaaactcttgagttggaactgtcgtgggcttgggccaacacgaaatattcagttcctaaaaaatctggttaaccagaaaaggcccaaagttgtgtttttgtgtgaaactttgtgtaaaaaacaaaagatggagcaagttggtagaggtttagactttgaagggtgctttgtagttgaagctattggaagaagtgggggtttagcgcttttatggaagaaccaagatgaagtttcggttgactccttttctgagattcatattgacagtacggtgagattagaaggacaaccagagtttagatttaccggagtgtacggagagcctaatagaagccttcggcaaagaacatgggagcttcttcaaactcttcatagtcggtcaactcttccgtggtgtctcatgggggactttaataatgtgcttagtcaatcggagaagcgtggagggaacccgtatccttcatggttgatagacgggttcaatgaagcagttactttatgtgggctacgtgacttggaattacttgggcatccttttacttgggagaaaagcagagacactcctaactggattgaagcacgtcttgatagagctcttgtaagtcaatcttggttaaacatgttcctttctgctaaacttttcaacttagaagtctctccttcggaccattgtcctttattattggaagttcaagcggggaatgttcatgaccatattaagattttcaaatttgagaattgctggacaagtcatcaaggttgtgaggaggtaattaaagggtgttgggataggatgagagggttcggtattgaagaaaaaattgctgaatgtggccgattattgcaacagtggggaaaagatgtttttggcaacttctcaactcgtatcaagcattgcaaccaggagcttaaaagattaaaaagtaaaagagatgaagaaggaaaagagcttttttatgaggctaaaaaggagttgtttgttgtgttgaatcaaagagaaatattttggaaacaaagatcaaaacaactatggttgaaggagggagatcagaatagcaagttttttcattcaaagtcatcttcaagaagaaggaataaccagattttttgtctcaaagatgctaatgggaactctcggcattggggcaatggcttggataatgtgatactagatttctacaccaacttgttcactgctgaagcggctacatgggatgaggttatcgcttgtgtgacccctacagttcgtaatgaacacaatgatattcttcttcggctagttgaagatcaagaaataaaagaagcggtgtttcagatgcatcctgacaaatcgccgggaccagatggtatgaatcctaaatttttccaaaaatattggtccattgtgggcaatgatgtgatacttactgtgaggaatttttttcataatgaatttatgccaaatggaatgaatgataccaatatagtcttaatcccaaagaagaaaaaacctgagcagataagtgagttgcggcctatatctctttgcaatgttattgctaagatc

SEQ ID NO: 34699 - DNA, 1760 bp, Cannabis sativa
ataatcaaactgggaatattaaaatacggaatttcacacttaatatatattatttttttttataattttgtgatatatgttatttatataataatttatattgtcatatcttaattaacacatattaatattaaattatataacagtgtatattatcgacgaatacggaactttaataaaatgcttttattattattattagagtaatttgtggtgaaatctccttatgttttaatttttatacacttaattcttttattttttttagcaaaactcctttatattttaatttttatacacttactctccttatcttttttttggtggtaaaacccccttaagtacttttctatgcaaatttacagttttagttagatattactgttaattaatactaactgaattactattgtatcgactttgaggttttactgttacatatacacaggtgtatacagtggtcatccggttgatatttaactagcgtgtcaaatttgcaaaaaataaataaatataagagagttttgctaccaaaaaaaaaataaggagattaagtgtataaaaattaaaacataaaagggttttgccactaaaaaaataaaaaaattaagtgtataaaaattaaaatatgaaaattttgccactaaaaaaaataaagagattaaatgtataaaaattaaaacatttgttattattattattattatttattgggttgaagcgtaatgcaaagcaataattttgtatattgaggtgcacacattaagaattaatgtattggaattaggcacgtgagatggatagaaaaagttggtttgttgtatctacttatagtaatccacttctttcttttttttcccatcttggaactctccattcgaatattattaacctctgatcatctctcttttgatgtgttggacctcctaccactatatactatactactttctactctgttcgatgtgaaaattaattaaatttgggtcttctctattagtagtattacatgatttagtagtggtggagttactttatgctctgagccgcttctctaaagaaaaaaatggtaagtattccttttccctttctataaacacacatgaaaaacttccattgattctcttaattaataacacttattaaaataatactatatgtcaatgtcttcgtttccttaattgtaaaagctaaacttccattaatagctaacccccatgaatgaataatgttcgaaaagaaagaacccattaatttcatgcatatataataaataataaacatttttcctaaaaaaaaaacgtagcttatttgtagaacttgccaacttgcatgttgaggaggacccacatttagaacttgctatattttttagttgatgaagaaaaaagaaggaagtactttcaatattttagtcaaattttaatgaataatgttatatattttagttgcgaatacagccaatcaagaactgatgccagggacccaatatatataaatatataactatattttaataattatacattggacacttactacatagcaccgtctaaacatatcaccttataatattaataatactatttaaaagttattacattaaattattaaattatataggacttaaagggccggctcttatgctgtgcaaacaggaccgtctcaaatattttgaaggccctgttttaattttaaaaggtaggcctttaataaaaaaaaatataatttttaaatattatcatattataaaaatatat

SEQ ID NO: 34700 - DNA, 1672 bp, Cannabis sativa
aagtattaattactacatattataaaagtaggccagttaattagaatttttacttctcgagctttgacacgtattaaattatatgtctttaaattttttaacttgttaaaatttttctccaaattattgagattgttgtattcaagattttatgtttaattttgttcaattttactaatgtagcaattattcatgtaaatataaatcgtgtctcttgaatttttatccatgttaacatctattagtataaaaaattgggagaaatttcttaaattcaacaaatctcaataattcaaggtaatttttaatagcatgaaaaatttaagaagtatgatttaatatacaaatcatagtttgaaagaaaaaaaatatcctaattaatttttattttaattaagtaatctcgtctatagtcatctttttaaaactcttaaacactggctggcagtataaattataacgaaaattatttataataacacagtatatatattttttttaaccaagtaaaaaatttatcaaatattaaaatatatgttagctaaactatgtacaccatattgttactttgtctaacataatcaataaagtttttaagaaaaaaaataaaagggtaagacaaagtaataacattcaaagccatgatttcatgagtcatggcactgattagccatgcaatttatccatgtatattagttatatatattaataaatgaaataatttggaatatagttaagtattccatccaaacacattacacatgtatagatattttatacatatatatataaatgatgaacactcaattcaatatccttttcaacttaattaatattgattgctatctttttggtccattattttctttttctacttacttttcttccacattaagaaatagattaaattataatttaatattgcatacacgtatattgtacatataaataatatacatatgtatatatgtatacgtatacactttattgaagtaatgcatagatgtaataataaaggaaatttgaaatgtgcaatggagaccaatatcattccccataatatatttagatggtgtacttgaccaaccaattctctcattaaatcatacttcatatatatacttcatatcatatttttgtattatatatataaatataaacaagaaaaacaagaaaaacatgccaaaattgcttatcaaaagttgtattatattcttttcatatagtgtgctagctctgtcgttttagatctaagttttctttaatattttttaatgtgtggatgaagatttaaatttttatataatctatgattttaaacacgtgtaaactttataatgcatattttggcattacgtacccacaaatgtactacaatttccctcttttttttttcaatataaaaaataaaaataaataaatgacagtgctacaaaataaggtttattctgattaaatcttgtttaaatgttgaattagaggttgtctttatcttgtttctttaattcatattgttataaccttgaatattgatttgatcaacagtttttttttttttttttaaacaaataacttaaatattattaattttgctattttgatcacatacacatagataaattaattattaatgtagaatcattcaaaaacatgtacattcaaattaattgaa

SEQ ID NO: 34701 - DNA, 1620 bp, Cannabis sativa
acccaactcagccgttagaaagtttcccttaggaaagtatcttgccttataaacccttgccactaacgagttactatcagtaagcaaacgccacccttgcttccccaagaaagccaaattataatcccttagattcctaaatcccaaaccgccagcatccttgtggcgacaaagctttcgccaactcacccaactaactcctttagatgaattcttagactgagatttccaccagaacttagccattaacccttcaaggttagagcaaatttccttagtgagaagaaacacgctcattgcataactaggaagggattgggccacagactttatcaaaacttctttcccagcttttgaaaggaatctagtctcccaactttgcatcttcttgatcattttatctttcaaataccccaagatcgcattcttactgcgccccatggtacaaggcaagcccagataggtgctattttcagaagcaggtgccatcccaagaagtccacaaagctgagcccgaacatgctcatggacattattgctaaaaaagactgatgacttagtaaagttaatcttctgtcccgaagctttctcataaatatccaaaagacgaagaacactagctccttccatatcagttgctttgcagaaaatataactatcatctgcgaacaacatatgagaaacagtaggggcattcctagccacacgacaccccgtaagccattgcctacgcacaaataaattaacaagtgaagagaaaccttcagcacagattaagaacaagtaaggcgaaagcgggtctccctgacgaatacccctgcttggtacgataggtcccagaacatggcccccgtgagtgatcttataagatactgaagacacacaatacattaccaaagatacccaccggctagaaaaacccattcgaagcatcatctgttcaaggaaaatccattccactctatcgtaagctttactcatatccaactttagagccatggtacccgtctttcccatcgttttcctcttcaggtagtgcattatctcaaaggatatcattacattatcagaaatcaatcgtcccttaacaaaggcgctttgattttcggatatcacacacggtaagactaccttcaatctattggccaagaccttcgaaataattttataggcaacattacaaagggaaatgggacgcaaatccatcatagtcacaggttgtttcttctttggtataagaacaatatttgtttcattgagcagaggagaaaaataacctgtatcaaagaaggatctgactagcgatatgatatcattgcctaccacagaccaacacttttgaaagaagccaggtgtcattccgtccggtccagaagacttgtcagggtgcatttggaacagagctctacgcacttcatcgtcagtaattggttccaacaacatcccattttgaaactcagagataacactaggaatagtatcagtaatctcactaacatccaaggaggaggaaatgaataaattgttaaaataatcaaccataagactaggtaaattattttcccaatcaatccaaatcccttgatcattttgcagcctcttaatggagttatttctctt

SEQ ID NO: 34702 - DNA, 2545 bp, Cannabis sativa
atcgtgatataggggtgaactactataaaattttgtgtctctcattaattactttacaacttttcatattctcaccaatctagcgagcgagtgtggcttagacgtctagtcaagatttctgagtaaatattttggtgctctcattatgagccacaactcaagaaagttacgaatcaagatggtggcaacgcgctctccaagtgtagacagacagactccagcaacgcgctttatgaatattttggtgctctcattatgaagctgctctagggactacttttgcaccccaagggccaggagtaggcctcaaaactagctcctcaactcatcttccaaggccaccaccaactactctcaggattggaaacaataaccaaatcccacctagggagagacacgtggaaatagaggaccttgaggaggtcgatccttagttagctctactcaaaaaaactgactgacttgtaacaatagttgcgagactctctcaataagtaacatgaacattgatagccaacacgttgagtaggagcaacagaaaggtaacctatctaaacgtattagggatgcttacctctctaatcacggaactgcttacgaaagaggtatatctgagttggtgagaaagacaccccgtcgatcagcttgtcatctgggaactagtgctcaaggtgaaaccctgaatgctcggtatgcaactactacacattgtaactgagcaagaactaggaaaacactaggtctggagacttctcggagggaaagtaccttcgatcaagagcttcaaaggacacaagctcgagggcgccaaccaatgggtcctcccccttatgttgaatgacctcccaataatgagagaactaataggattcccccaccaagtccttgtcaatgttgtaaagagactaggcctcgagaccctgcaacgggaaagaggcctgctactcaagctaaaggaagtagtaggagacactactttgaaattggaggctatgagatccggcgtgtaaggaccaatgagaaaattcatagtcaaaagtactttcaagatgaaaggggtgagttgtgcccttactttgcccgtgggcccgatgttcaacaatacaagtacttccctcaagtacatagagagcaattgaaccttagcaaacaattcaattctcttcacacttgtgatccagctatagactactttgagggaagtagccactataatgctctgattgaacactcccacattaggtcatcccgagacgatccttagttcattccggaggccacactagagttgccttcacgaccccatggttaggagacaactacaagacccaggtagactggagtacaagagcgacctggaagaagaagagacttgtgtgacctcgtgaataagagaagaacggtggatgtgggaacttctagagaagaccctaatctgcaaggtgtgagagataatgtcagctggaaggcctacctcaatggtggtaccttaagctctcacctagatcaatcaactcatggaaggatctagtggatgcttttggcaatcagttttctccttcccgataatgctaaatggaacccaattatttgggggatgttagcctataggaagatgagccccttaaggactacatccaatggttcttagaggcagtcgaaaagaccaaaagtcttagtgaggatgcaagggttatggaactcacagcgaggctcaaggagactatggtccaaccttcgtctcaaggtgatatacaccatgaatgacttcttagataaagaaaatggctttatcaaactcgaagaagccatcacctgaacaaagactcaaagggtggcaagaagaagtcgccagacaccgaagcccctgccactaaggcgtagggcaatgggaagaaaggaggttcaaatggaggaaaaagagccaataacagtggcaagcaaggaaactccctcagaggaatgaagcctaaaactgggggtaagcccttacgagattatgagccttgcttcaccacctactccattctcttgacatcaagagaggagatatatacggctactcagttagcagtgtcgtatcgccaacctcttcctttgaaagagtcatggaagaaggatatggacaaattctattgttaccataacaattacggtcatgacaccaacgagtgtaaccagttgcgagacgagatagaatttcttatcaaatagaaataagctgctctttagtggtatgtacgacctgaagctctgattgggggaaatgctcaacttcagcctgtgcgagttgcaggcaagttgtagattatgattggatgtccttgcttagatgggaattcaaggaaggccttagaaaggtatgtaaaatcacttcaagatgagccaagagttgaagtcgtagaggtagctgagtgtcctacaaagtctcagttctatggaagtgaacctatcacttttggagaataagactcttatcatgtcagctaccctcaaaacgatcctttagttattgaggtcgaaatagctaatatgatggtcgcca

SEQ ID NO: 34703 - DNA, 1768 bp, Cannabis sativa
aatacttaagatattatacatatttttaatcatatttttaaatttattaatttaactttgaattaaaataaaagaaaatatgtaaagattttatatacaaaaatttaaatttaaaatgttataaatatttttaaccatattattatttattttatatcttaaactaaaatggttgtaataaagaattgattgctttccattttagttatggtaaaccgattcacacatcatattttttgtaaagtttgggaataaaaaacctttatatatcaaatttacgaatccagcctatatataaatacactcaaatttgattatatgacacaccgatgtagcaataactaatttttttcttcttaaagatcaaaatgacatcaatataataatagctaaaattttcaaaatttaaattttgaattttaaaattttacctaattaagtaaaaaatacgttgcctaattaaaaaatattaagaaaatttaaaaaatacgtttatatataattatatctaaatgatacactaatggaacaatagctaaatttttttcttaaagatctaaatctcaaatcttatttaaaaattttaaaaaatatataacctaataaaaaaaattaaacatacatgtattccacttaaattaccaaattgaatctaattataaaaaactaattatacgtgcattgcacgtaacatcaacctactggctactatatatactataaatacaatatacaactataatgtaaaaaataagaccataacaattcatttgcaaaaaaaatacatgacactaatacattgttttttataagtggaatgcacaaaaaagaaaatatatatgttttacttggttcttttttaaaagaaaaatgctaaaagctaggtactttaaggtaccaaatattataagatgtgacatatatatcatctctacattttaatattagatctcacacatattttatttaataaattatataaaaaattgctaatcaattataaaatgccacattaatataatattagacatcttaaaatacaaataacaatactctttttgaaaaacaggttcgcaactgctttaaaacaaagtacacaaacgttaaattttgtttggcagattaattacattaatgaaacgtgatactcaagcaatattaattgttcaaacaatatgtgtgagctagatttgtagggaaagtacgcactacaattaaccaataactactaatgtcctaatgttgattccatccaagttaatacatgctcgtgctaattcatttatactatatatataatataattttattgtgtgtgatacagaattatacatacgccctaaactaaataagctctgttgtcatatattagccatgtcatatcaagttttagcctcatcacaaaatgacaaagtatcaaaaattgttcgtccaacaacaacttatcaaccttctatttggggggagagatttctccaatatagtatttcagaccaagactttgtaagatcatttctttgtgatcagttatttatttgaaaatttcaattagtaataccattattaattatattgcatatttaaaatatattatgatattttattttatcataagaagttgtgttttcttaataaaaaaagtgttttgttttccatataaatatgttgaaatgtcaaacttagatatatatatatagatgtgattttgtcccgttattgtactttcacggattgtaatccgtgatgtacgtcagccgttagatgaggg

SEQ ID NO: 34704 - DNA, 1075 bp, Cannabis sativa
tgatcctggttcaccctcaaaaagattattagttgctatttcaattgttcatccaggttcttcccaatgtatacacactttgtgggatttcctagatctagaacaatttcttccaactccttaatcggtttcaataaatttctttcatcttgaatccgaggattaagatcttcatccatcttctcgccttcttcagtcaagactgccattagctggtgaccggtctttctattttgcagctctatgcgatagcattcgcaagctagcatttagtcacctcgcactactcccactcctattggtgtttgaaatttcagggataagtgcttaattgaactaattacccctagtcaaattaatgatagtcgacccagtagtatgttgtaggctaatagcaggtcgacaaccaaaaattcttgcattatagttgtggataaaggtgcttcacccaatgttgatggaagctcaattattccttgactagcaacattatcgcctgtaaatccacacagatttaccatgcaaggtttcagtttagatttttcaagtcccattttcttcaatgtatccctataaaggatgttcactgaacttctgttgtccaccagcaccctttttatcctctaattggtgagctggatggtgattactggtgggtcaacatgaggatacctaacttgtttttcatcttcctccgagaatacaattggaggttcttcagtcttagctttcttggaaggttctagagcaaaagcagactgctcattcttcacttccttcacatatctcttttgggcatgttgcttttccctacaatatgtggccctcctgagataactaggatatcctcttcttcaaaaggaggaggttgtaatccttggttgcatgggttattaggcggatttggctggttttttccattaccttgtcttttcacatattgccgaaaatgacctcgcgcgatgagactctctatctcatctttatgctggcgacactcgtctgtcgtatgcccaatgcctttgtgttacttacaaaattttgttgcatttctcttatgtcttgcatgcctcat

SEQ ID NO: 34705 - DNA, 1404 bp, Cannabis sativa
gagtttgatgggttattctaataatcgtattgacattgttgttcatactgctcaatttggtaactagaggctaactaggctctatggagaacccaaccagagtcggcgccaagatacttggagtttgattcgaaccttgtctacacgttcgaaccttccttggtgtcttgttggtgacatgaaaaatattgttcgacaagaagagaagagagggggtcggccatatcccaaagcttactttcgggattcaataccactttacagcaatgcaacttagttgatattgagcttcaaggtcacccgctcacctgggaaaaggggagagggtctaacaattggatcgagatacgcctggacagagctttggcaacatcgacttggcttcacgtatttccacaagctagtctctctaatttagacttctctagttcggatcatgcggccattttccttaaaccgtatcttcccactgtttttgctcctcacaatcgttttcgttttgaaaacacctggttgaaaaagccgctttgttctgagatcataaaagaatgctgggaacttggtcattcttttagtttgagtggcaaattaagcttatgtgccgagaagcttaaggtttggggcaaagagattacgaggtcccttaatcatagaattaaagagtacaaaaaagagttgaagaatctgtagaataaaagggatgttagttcggtgcaaggctacaaggaggtgaaaaaaaagctttttaaagctcttgatcaaagggagagttattggaagcagagagcgaaacaattttggttacgggaaggcgaccaaaatagtagttacttccacaaggctgctagtagccgaaagaaaaacaatcaaattgagcaattaaaagatgctcaaggaaattgggtcacctgggagtcgagtctaggagaagttatgcaagactatttccatgatttatttactttggctaatacaaactgtatggaagtggtagattgtgttcatccttgtgtttcggcctttgtcaactctgagttgtgtcagcccattcaagaagaggaggttaagaaggcgctttttcagatgcatccagataagagtccgggtccagatggaatgaccccggccttttatcagcggtgttggtctatagtgcaaaatgatgttgtcgaagtggttcggtctttctttacaaatggtgtcctcgaagatagtattggcgaagctaatgttgtgctcattcctaaaagaaaaacccggaagctatgtcggaccttagacctattgccttgtgtaatgtcatgtataagatcattacgaaagttatggttaatagaatgaagcctttcattgattccattgtgtcagaaaatcaaagtgctttcatccctgggcgtttaattt

SEQ ID NO: 34706 - DNA, 1176 bp, Cannabis sativa
  modified_base (962)..(962): a, c, t, g, unknown or other
ttcttaaaatagttcaagtggattttggtcatagaatacaaaactcataatcgatacattaacatacagttaggatccattgacagaaaatggatattaaactgtgaaagttgtactgtaatgttcgatgtattcaggaaactgaaatttaaaatttctatttggaatctaaaatttaaagtcaaacacttaaatttataccaaatatttcatgagtagttattctttcttagaccaccactaccaatcttactctaaatttaaattccctatagtaagcatatacaggtaggagattatctaagatcgaggatttatatcattttaggatagaatatctataatatagtcatctgcgccattcaacttcataggagaaaatagactgacatcctaagtagatgatttataaactttctgtccaatgatatataatctaagcaatttcataatgaaaaagataagaggaaaaataaaggataatttcaactaaaataagaatcgaacgatgtcccggtaagagagagtcaaagttattcttattttataaatttcttcattgtttcgtattgtaaatactaataaaagttgtcatcttcggatgtagaactagatgttgcatttacaaatatttatctgttgagatctaaaactattatgtttctctaacggatgacagtcctttgggatttgttctattaaaaataacaaattaagttagacaattaatgaagactcgaaattgatactacaataattaataataaaaaatatagtgaaggttcaatataaattcatacacaattcaaaaaattattaaccatttagcaagtaaccaagacatgtaaaaatacaaaacaatcatatcttaaataatttctaaggtttctaatgagctaatatagtgtcttggtaggcgagagtcaaagatatcatcagttgaatagagtagtcaactcatntaaaatggacaccattctagcaatctattgttcgattaaaataagaatccaacattttcccagtacgcgagagccaagattattcttattttaggagtttctaccattgtttcgtacttgtaaatttatctctaagtagtcactgtaggggaccgtctaatagagatgaaaacttacaaaatacttatctttcgagatctttacggtgttaaat

SEQ ID NO: 34707 - DNA, 1700 bp, Cannabis sativa
  modified_base (600)..(611): a, c, t, g, unknown or other
  modified_base (1126)..(1142): a, c, t, g, unknown or other
  modified_base (1575)..(1597): a, c, t, g, unknown or other
tttctagggaagttagtttggataccattcaaaaaatttaacttaatgatctttgaacttcatatccaccaaatatttctccaccgttattagtttgcaagatctttaaccacgtcccttaatggttttttaccattgctagaaatccatgaaatttcttaattatttcaaatttcattgcataacgtaaaatctagagtgatcgtattaagaatttaacgattactcatatccacccctgaatgtacatccatattttttaatatagatgatcttactttcaagtggatattggcataattactctttgcagagaatgatcttgtaaaaaccactatgaacaagatacaaatgccatagatttctaaactgttgttgacgtcttgtgatgaaaaagttttagttacaataaagagttcttagaatactccaagtggtaactggtcacaaaatgaaaaactcatattcaatacataaacatacagtttggatccattgacagaaaatagatattaataacttgtgaaagtcatattgtattgttcaatgtattctgaaaaatgaaattaaaaaaattctatttggaatctaaaatttaannnnnnnnnnnnaaatttataccaaatatacatgagtaattattctagcttggaccacaactactaatatgactctaagtcaaatttgggtaaagtaaacatatacaagtaggagatttctaagatcgtgaatttgtatcattttaggatagaatgtctggaatatagtcatttgtgccattcaatttcataagagaaattagaatgacagcataagcagacgatttataaaccattcatccaatgatatactatttaagaaaattcaaatgaaaaagctaagaggaacaataaaggataatttcaattaaaataagaatccaatgattttctattgaggtgagagtcaaagttattcttattttatgaatatcttcattgtttcatattgtaaacactaatctaagttgtcatcttttgatgtacaactagatgttgcatttacaagtacttatttgtcgggatctaacactattatgtttgtctaacgaatgacaatcctttgggatttgtcccattaaaaacannnnnnnnnnnnnnnnnaacaatgaagatttgaaattatactacaattaataatagatgtcattgcccttgataagttgtagatgttattcttaggttgtgtatatgcttgaaatctgagtattggttctattttgggttgttttcaagcatgagctttgatgttggtgttcaagctcttaaatggggattttgataaattagctcaagtttggagcctatattgtatattgtttaaatctaaattttaatgcatgtgagctttgattttgagctttaaatgtgtgttttagctctctgttatgatagttatattatgtgggaaatgattttgagatatatgcatgattggaggtgagtttgggtgagttttgatgcatttttcgagatgttggaatggagtttctaggttttcaacccaggcatcgcggcccgctcgcgtggacagatnnnnnnnnnnnnnnnnnnnnnnnataacttttgactcgagactccatatgggatgttctttatatcgttggaaagctcgttccgagctctatatgtttatctatattttgaatgccaatttatatt

SEQ ID NO: 34708 - DNA, 4352 bp, Cannabis sativa
  modified_base (138)..(142): a, c, t, g, unknown or other
  modified_base (2164)..(2165): a, c, t, g, unknown or other
taaatttgttagtctatgacaactttggataattataaaacgtgtggtaagacattaatatcatccaaatataatagtttattgttgtaaaatatatttgttatgtaagtacacacagtggtaatttatttgctatgnnnnnacacacagtaaaataaaactaaacatttctttatacatataatttttttcccttgtgcttgctattttttgttttatttattttaatttgttgttgatgacataaattaataataatttatttttattttgttattagttatgtgaaaaaattaagaaacattaagtaatttaatattaaaaactaaccaatctaatccccacttttgcggattggatttgagttattatgtggattggattgaatccaaaatatgaaattctcacttagcacaaatcgaatgcactcaaaatagtgcagaatggattgtatgattaccgttattgagagtgataaagaggagataaaaaactcttcaaaaaaacgaaataaatgaaatatgcaaaaaataaattgtataaaattattaaatgaaggtgccaagacttgaactcatgtcacttaacaagagataggataatgtgcattaactatttccaatatataaatgtatactactagctaactagtacatgcataatttatatagatatagtgttattaaaaaactaattaatttaatatttaaaaaatttaaatacattgaactaagttgatgaagaaaaaatatattatgaatatgtattatttactattaatttatgcatgattatataaataatgtaattaaagtaaataattaattttatacctaaaatttttaaatacattgaacattataattttgaaaagtaaattaattaatacaatatgataaaattttgaaattattaaattaattggattttaaattaaatataaataaagaaaaaaaaatattacttttaaaggattgaactcatgacgttttaattgttttaagagtacttatattgattattataagttgaacatgttatagttttttataagtatagttattgttttaaaataaatttaattaaaatattataaatttaaaattaaaaaatatatataattaaaattaaatttttagtagacattatggtctggagttataggtttggatttttagttaaatttataattaatattattcaaagttaattataaataaatatattaattatggtgtagttttcaagagttaatttgagccattagattaaattaaagattataaattattatccctatcaataggtattttactcaatccctacttaatagtcctcaataaatatatattacttaaaagatctcccatttaatattaataacatttataattcaaaataactaatttatgaaataattagtaaaaattatatcagggctactaataagaatttaaaatcttaaaataatttagtaatataaaatatgtattaaatcaattaaacaatataattttttgttttaaaaaaattattgaagttctatatagttgatcctaatatacacgattattaattccaaaatgaacaaaaaatgattatgcaaaaaagagctcaccaatgtcaagcatctcaagaatatcaacattctcaaaatatttgaagtccatatagccaatatttttatattctttaggttaagatccacaagtgatcaatttgactattaaattattattttactgaattaatgttgtcttttttagttttataacttagagtttattagtattagtatttttttcattgttattttttatttttaaatatgttagtgttttaaataaactattttttgtgataaattttaattgaagattaaaatgtacgattatattttaaaataaaataaaagctaattcagattttttccctctgaactttgacatgtatcaaattatgcccctaaactattgagattgttgaatttaagaacttttgtccaactttagtaaaaaaattctaacatgtatgaaaattcaggaggcatgatttagtacatatcaaagttcgagggacatgatttggtagatatcaaagtctgggaagcatggttagtacataaacaatcactgaaacagaatgaaattagacaaaagtcctnnaatttaacaatctcaatagttcaacaggaatttttaacggaaaaaaaaagttcaggggacatgatttggtacatgtaaaaattcgggagaaaaaaatcctaattagcctaaaataaaataaaggttagaatgcaaaaaaaaaaaaaattatacatcaaattggtgtaaattcaaaatccaactccattaatagtactgtagaattaaattggtgcataccaatttgatgcataagttggtgtgctattgaagtgaaatagtgtcaaaattctacaccaatttagtgaaatagtgtattattagagatgctcttagagcatctatgaaggatgtttgatgacatgaatacatttttaatattttttaattgatgattaccattggaatgaaaaaaaaaaatgctataaaagaatgtcatatataccataacattgtttgtcttttctttcttattttttttattattaattatttgatcataagaaaaattatttatttaatatatattaaattataatatatattattttaataatttttagagatgcttacattagattatttttaaacaaaaagtgccaaaaaataatgtggaaaagataaaataaaataatatgtttttaagtgatgtgaaagtttttgacactcttaaaagaatgtcaccattggtgattcttacgtaccttaaggtgttcaacattatactggcatgtggcgttttatgaggggttagcagttttatatattattcattaaattaaaatatatagagttcgaattaaattacaccaatagctactagctagcaatatgacacctattgtgatgcaaacaaatttttactaaaaaagaaagccaaaatataggttgccacccttgatattcatagagacatcaaactttttaacgtctcctctcaaaatgggcctacactataacaatagcacccatttttaaatgcataatcaccaccacatgtattcaaattatcctaatatacctagttgttcacaaaattactggcgaatcctaaatataaaattaggtagttatgtgaagatgtgtcaactcagaaatcaaaatgacacattaaacctatctcaattaattgattggcaaatacctctacaattttgcttctaggaacgaataagatgactttgtttcgtctcaaatcccatcaccacaaacccaccttccatataaatttttgatgcaaaaaactaatgatcataaaagaaacatattctagattatatatatatctcagaaaagagagctacataaattaatacaagaataagtaaatcaccataaaaactttgaggatcaaactctattcaaacactaataaactttaaaaattaggaagacagattgcatatgaggtttaataaaaaagttatacatataaaatacataaatattaaaattgtaaaatacataaggtttcattttaaaaaactcgctctaacaataaagaaaaacttaggggatactaatttcgaacttcagggatggacaatatagaatgaccaaaaaggtcaccattataggttggctaataaaaatatctaaacctatgctaatgataatattcatgaggttgtacatgaattaagttacttggatattaaaggggttttatgaatgagctaactacatccgatcgctatcgctatgaagaattctaacctatttttatatatcatatatggaaatctaaaaataaatacaccaaccgtacatctaataaaaataataacgaaagtatagataaaaatgctaagaaaattttaaaaactaaacctaaaatatgatatataaatttaccctattagtacattagttgccttaagaaaataatagatatttttgccatgcttattacactgcttatcatcttcttttgtacttgttgacgaagtattaggagcgacatgctagaagcgacttgtcgtcctaatacattttagagataactataaagatttttagaggcgacctaatactatcttttgttgtagtgacatccaaatctttgttacccagccttagtttacttgtagatcgtactgctataatacaaatagtttgaataaattaataagaaataaatattttttaaaaatgaattaaaatttgatttaaatgaaaaatatatatttttttgaataaaaattaaaa

SEQ ID NO: 34709 - DNA, 1574 bp, Cannabis sativa
  modified_base (1521)..(1537): a, c, t, g, unknown or other
atacccgacccgaaacccgccacacctaaccacccaaaaattgggttcggttgcaccttcaaaacacctgaaattcaaaaacccaaacccgaccatccgaaaactcaaaaattcgacccatgtgaagccctagtttaaagtagggttgagcattggtcggtttggtcggtttttttctatataaaaatctagaattcagttttcggtctggattggtgcaatcgaaaaaccgaccgaccaatcgtaaaaccgaccgttttgaacctcggtttggtcggtttaaaccgcccaaactgaacttttgtttaaaaaaaaaatatataatccaatttattctataaacacattattttacgttttacaactacaaacgtacaaattaattgttcaaaaactaattatcttattcttttaactttaatattaataaaataacaatatattattattatatattattagtaattacaataataaagaaaaaaacttaataaattaatatatatgtataacggtcggtttcgatttttttgatcagtttattacccaaaaaaaacttactgtttaatgacaattttaactgttagcagttttttcagttttcggttccaacggtgttcggtaggtcggtttgaacggttttttcgattttctggattttatgctcaaccctagtttaaagcatataatcacaattattttctactgtgatgatatcattgtaatcgtgagtaactaaatgttctggatttaatagaatttgtatattcaaaactataatcatgaaaactacatgtaaacctaaattatttctaatcttttattgatagtaaataagattatattaaaattgttttatttagagcataaaattccaacaaggtaggtgtggacaaaagaaaataatggtaaattttcgacgaaatcggcctatgttacacaagttgtcgaaagagccccctttgcaatgtctctccaattctttggaacaaattatggaactctagaatactcgagagtatgaaattacttggtggtgtattctttgtaatttcccccagataaattagttgtgggatctagaattacaatcgaggatatgatttgtcctctttgtgggggtgatcatgaagaggagaacattgactatttgttcattttttatgattttgcttatcatctttaaaggtccttcccgtggggcttaattcctttgaggggtaattgtatgagatgttaagattgagttaaattcatttgagatttgggtatggaataaatgctagtgaaatatttttatatgctttcttgtagacactattttgccggctaagaacaaaaaagtccataatgtatatggtgagtggtagcttaggctccaagcaatcttctttgtgctaaaggatggaagcctcttggaactaaatacttttagtctcccctaagagcatctccaatagtagtgaggtgctcttagtagagactggaggcgtttggttggaaggaatgaaaatataggannnnnnnnnnnnnnnnnaatgggaatgagaataggaatagaatggaataaaatt

SEQ ID NO: 34710 - DNA, 1230 bp, Cannabis sativa
ttttctaactttatatgtgtttattttcattgttttagaatccatattaggttgttaatccaacatacttgttagtaaatcgagatcctggtaaaattatttccaacacaaacaaacccaggttgtttgacaacaacaatcacatctcgtgcaatatgttcatccaatcactgaataaaattttcttttctagcagcctcaataaacacttcaagtgaagtaaattttgccagtcgatcaacttggtggcatactatgccaccgtcatattgccctaagttaatcatatgaattcttttacttttgctgcccggatagactcattataatacttctcgtaaaacaatatttggaaagcatcccaagtcatgttatttaggtcatgaccctgagacacaatctcccagcatattcgggcatcttctcgcaacatgtagatagcacatttgaactgatcattattctcaacctgcatgaaatctaaaatggatgttatcatactcatccactgctctgctttgagtggatcatcaccacccccaaaccctggcgggttcttcttcctgactgcttatacaatggttctaggcgattccctgcatcctgtggcactaccaaaagtgccggaggatcaggattaacgtttggagaaggttgagctcgctgctcccttaattctcagatttgctcgccttgttgccgtatagtctcctgcatcatggcatataactcttcctagtttggtggtggtggagggttctcgctctcaccttcaaccacgagccttgcaagctcacggttacccctaccagaccgccttgggtgcatagtctatacaactgtggtcacatttcaagtaaagacaatactaataagtgtttctaaacatctcaaacttttcactcttttccaacaactaacataatttagataaacaggcaatcatataattaacagttatctagtaatttaaacttactaaaccatgagttggtcgagtcttcgcaggcaatgtacatatcaaactagtcttcatgatctttataccttggtccctctgataccatgttgtaacgccctgtccaacaaggacgccatgtgtgtgtttttataaaattctcttttaatgatttaaataattataccaaaagtgtggttaattaaaattttgcaattaaaataaacacataattttttttgtaaaggataagtactaatctttacgaggac

SEQ ID NO: 34711 - DNA, 2130 bp, Cannabis sativa
atcgctagccaatcgcaacgcgacatgtcgagaatgtgctaggcaccacccactggtgtcttatagcaatgctcatatgaaaaggtatatatttttttataatttttgagtatttatgaacaaatccctattgttttttatttggaaggaactaatccctattataaatggccattaaaaaaataaatataacagcattcaatgactttcatgtagttatatatataatatatatatatatataccttgtaagcagtcgcaattctcagcctccttgcgaacaacatcaagaacagaatcaataagctcagcaccctctgtgtagtgacccttggcccagttgtttccagccccagactgaccaaacacgaaattatcaggcctgaaaatctcaccatagggacctgatctaatggagtccatggttccaggctccaaatccatgagaacagcacgtgggacgtacctcccgccactcgcctcattgtaatagatattgatcctatctaactggagttccgatgaatccccgccatactttccggtggtgtcaattccatgctcgttgcagataacctcccagaacttggctcctatttggttcccgcattgtccaccttggatgtgaagaatttctctcatttctatatatctctgctatatcttttctttctgtatattttctctgtttgtttcacgggaaaacaccagaaagttaagatattaactgttatggttttgttgagataatgtgtttaatttaaatggagggtttggagaaaatgagggtaaaataatggagggctactttcttctttatatatatatctatagaagacgttgtactattaattaatagattctatatttgggtatatttggaattttacaactatatacagatttgggtaattggttggtacttgctacgtgcatggaattttaattgttgtcttaaaccttttaaggtccgcagaaacaatctccctattttggtccatgagctgtacttgtagggatttttcttttttttgaaaaaacttgtaaggatatttaagctatatccaaattgatttttatttttaatggggtggttataaaaagtatataagtgatcttctaaggtgcattttcttttttgcttcacatttctctgtgcattgatatgttatttttatatttttggtatccaaataattttaatttatacaacaaatataagctatttagcatattattggaaattcaaattttttgatgtaaaaaatttaatttacaataataataatgttattattaaaactgacgtgcacatcagctaaatctaacgttttttggttttttttttttattttattctttcgtttttaaaagtaacttttttagttactaattaataataatattgataagaaaccaattaattacctttacataaaaaaaaattgatttttatatcatataatttgagatacattttggttacctctaaaacttgtttgtatatatcttagcaattaattaattatccttaaattatattatgatagcttataatttaaaatacatttgggtaaccttaaaatttatttagaaactaatgaattgtcatataatataacaaactactatttttatataataattattttatatatttttttattattttgaaaattaattagttatcatataattgcgtattactaaaaaaacaagtttttagatacggttttttcaacaaattaataaaattttaataaaatcacatacggagtcagtaattttgtaataaccgactccgtaggtgataattttttcaattttgatgaaataaccctacggagttagttattttgtaatgactaactccgtaggtaattttttaattttaataaaaacacatatggcgtcaattattttgtaataaccgacgcatatgtcttcatataccctctccagctatcgtcttcctcaaaacctaaaataaccagcagcccttcctctcaaacctacaaaaccctcgtccaaccactcatttcttctctccatttcttcatttttcatctgtttttaccttttttttaaaaaaaaaaaaaacaaattttgcatttttcatactccaaaaac

SEQ ID NO: 34712 - DNA, 1204 bp, Cannabis sativa
  modified_base (1004)..(1005): a, c, t, g, unknown or other
tatgagcattttttattaagcacttgtggtgtttagtacttctagacatgttgccttgcaatcggcttgcaatactttgtaaaaattattacattaaactatgtaagatccgatacttaattagaccaatagcgatattaacacataagaattaactagacaccattagtacttttagcatttctcttggatttatatataagattaacattaactacaattaaaaattattaataataattataagtagtgaattaaaagtacttggagatcaaagttggacaaatagtctatacatttgcgacctattagtattacctattatacttttttagtatacaattgtaaaaacttaaaacataatattttttaagagtaatttgcgatataaatatgagagtttaatttttaattgatttaaatttaattttgaacaaaaataatacctaaaattatatgtttagaactttcataagtacatgaccattaaatattagtttaatagccatgtgttagtcaccctaattaattcgagtcattaaatttttattttctttaagaaagtcaaatctactaataaaaaaataacaagtagataataataatatttaacgaccaagtacctacgaaagttctagaaatataacttatatattattaccgtcaaaaattgaacttgggtatttatctgcaaccgatagttaaacttaagtatttacgccacaaattactctaacttttataaaatagattttaaaaaaatgattgaaaatatataaaatatagggggtcggtgctcttacaatgtactcatatctgtttcgattttagttattttttttttttatagttgtgttcgttataattatttaagacatcattcaaaattttaaaatatttaaaataatttacaatatagaaagtattgttcaaaaagtatatttcacacgcgtattaaataaaagagtgtgacgtgaaccctatttttggcgtgttaaattttnntgaatttctcaaaattttgtagaaagttttaaacgtctataatgcgtacgaccaaaaaaatagagaatttttttttttttaaaataccgaaacagataaaggtgcattagatactcatgcacttttaaaaagtacattgtagaaatttcctaaatataatattttagaaaaataaatgttgtttacaaaaaaaaaaaaa

SEQ ID NO: 34713 - DNA, 2877 bp, Cannabis sativa
taattctttgtcagttaattgggacagaattgcagagcaagtacaagtattagtagcatataagggagttgggtctacacacagcttagcaatagggaaatgcattgaaagagttgtcctaattaaggaagaatggagggaatggtagctacctagcttggtgagccatataacatcaatccaataatattaattggtccctaccctttaaatttatggctctcctctccttactatttacttgtgctatcaaatcattacaaccaccatttctaggccatataataataacaataataagttatatgatatatttatttattattaaaaaatggaagtatgtaagaaaatgtttataataattaatctttttattatataagcatcactatattatatgatcaatctctctaattattagattccgttaaataattttgcactaaactatcatatccacattccaaattatataacatatataaataatttacaaaatttttgtagtagactcttagaaaatcgttttcatagatctcatataatttatattttagcatcgaaaaaatttaatctaatttattttatgatcgtatatgttgtaattatttggagccacttgttaattttttaaaaaaaaattctaaatagataccaaaaataatgtttaaacaatcgtttatataataaattgtataaatcttattttccagaaggtaaattacttgaaatttacaagtctaaaaagctcttctatatttcgtaatagatagaataccaatacactctttaagtaagagtgtaatgtaaacttaccctcatatttttatatacatgtcttattcctcactattctctctctacctcaattttcaactatatctaaaaggttgaaaagcacttacaatgctaatgctaatttgtttgaacttgatcattcaattcatcatcttagaaaaaatatcaatatgatcatgatcatggtttgaccatgtcaagatataaagaagaatattgctaagtgcaaaatcaattattaaataattaagaaagaattgtgtcaactttatttattacatttatatatattcactacaaaaaattttatttttagtcacaataaaatttgtgactagaagtaaaaaaattgtgactaattataaattattattcctatattatgattaaaagtctgtgactaaaaatattagtcaaaaaaaattacaatttgttttaactaaatgtatttttagtcacaaaatttattgtgattaaaattaaattagtgacaacttgtagcaatatattatattttagtcacaagtaattaacattttgttttgttctgactaaaaatcacatttataaaaaatgtatgttatgattaaaaaattgtcactaaaaataactattttttgtagtaatttattacatgcaaatataatttaatcatattttattcttcttcttctgatttgatcctataatattgatttttttcctttaagaacaatcaggatgtttcaatataagtgggcaataaaactaaaataaaaaaagaacaaaaagcaaaagccactagtgatatcaattattgattgctaaagtttaaatgtaattaaataaatattttacataaaaattgatatacaagataccagcagttgttaatcagtgggcttatttgtagcttagataattttttttaataaaagaaaaaagtgtgtgttttaataattataataataataatataatttatcttttttttagtttgttcacttagggtttgtcgaatacaagcaacgttggtggttgcccaagagctctacttttggctttcagccaatcgaagcttataagaaaaataaaattgacaacgttgtcaataatgaaaaagttatgttgtttagatcatttacaatacaggcaatgttacacattaattgcttgacccaacattttattttcatatataaattaaccaatttagattataataaaaaaaaaaactagatagtattaaatccaaacaggaacaccgtaacaaataatttttttgaaaaattaatactttcatccattaaatagattactattgccaagcatacaataaaactcctgcattggagttggccttattaaaagcctcgcctaaggactcccatatcacttcagcaatgatcgagcaaccggtggtcgagttgcgttgataattgtgagtataaccaccaatagtcaatttttgggaattatgtagtaatgaataataataaatttactttattattatcggactcatatcaacttatttactgatcattttttaaaatacatcattaaaattcaactttatttattttaacttacaatactatatatcaacttctttatatttttcttaaaacatttaaatattatattttgaatacttttgaataattaacctagataataattaacaaaatattatttgaagaatccaaaaaacctaaaaaattatctcaacttgtagaacataaatagtaattgtgctaaagtaaaaaaaaaaaaaatttaaatatttttagctaaaattttattgttgagttacactatattacaattgtccaaaaccatataacaatcatgagaataagtaaagcgatgaaaaagacaataacatacattttagatagaaagattctctagttatatcaaacttttaagggagagtagatttttttgttgttgttggtgtgttgtcactttagaggagaacatattatatattcaaataattattatttgagttgttattgataattatttataaacttttaaaaattaatttgacttattacttaaataattatgataatatttcaaaaaaaaaaa

SEQ ID NO: 34714 - DNA, 3914 bp, Cannabis sativa
  modified_base (886)..(886): a, c, t, g, unknown or other
tcccagatccaaacactgactatgagtcaggtccaagccccaggtcccagtctagttccacttcgggtcccaggtcccagtctgagtccaaggtcagggtccagatccgggattgggtcttgggtctcggtcccagttctgatgcccgttcccgagtccaggtgcctcatctaagtccaggtcctaggtcccggtccgagtctaagagccggttggggttcaactcctggtccgagtctgggttcaggttccgctctcggtctaggtcctaatttgggttcgagtcttggtccaggttcgggtttgagtctctagttctgatttgggtctgggttccgaggcgtaggtccaggtccgggtcctaggtctcagtttgggttggagtcgggtttgagtcctagtcccagtttcgatttcgattcagtgtttgggttcaggtttgggtctgggtctgagtcctagtttgagtctgggtccgggtctgggtccaggcccggatcccggtctgggtcttggttcgggtccaggtccgagtttgggtcccgggtgttggtccaggtctaagtctgggtcagggtctcggtccggatctaggtcccaagtttcgatcccgatctaggtctggggctgggttggagtctaggttcgtatccaaatccctacttagctttcagtctgggtctaggatcaagtccaaagtctaggtctgggtccaggtctcggtcctggtctgggtacacaactgtgtccgggcccgagtttcggtctaagtttggttctggggctaggttcgaattcggttctaggtttgagttcgggtcttggtcactatcctagtcttgttcgagggtcctagtctggcagttcttgtttaggttcccgtttngggtcccgagtctgggtcagggtcccagtttgggtcctggtccgggttcgggtcctggtctgagtctgaaatttggatccctgtcacgtgtcccggtctggttctagtttaggtccccaatcccaggtctgagtttgggttcgggatcgaggctggggtgcggttctaggtcccaaccccatttctatgtctcgagtctggtttcatgttttgttctgagttcgggtccagggtcggcaccgactctagatctgggttgagatccaagtcttgttcccggttcaggtctaggtctgggttggagtctgggtcctggtccggctatggttccgggtctaggtccaagtctggtaacggttctaggtccaggtcgatgtcttggttccggtcctgttgttgggtcccggtctacttccgattttggttccaatttcgagtcacagggtacaggttaaggtcaaggtttggatctgggactgggttcgggtctgggtctgggttcgggtcttgatctaggttcgggttcggggctggttcccagatctagacactaactacaggttaggtccaagccctgggtccatattcggatcccgatctcgggtcccagtctagttccattttgggtgacaggtcacgagctcggtcttaggttcaagtccgtgtctggggtcgggtcttaagtcacggtcatagtttcgttcccaattccctatcctgattctgggtacaggtcctggttctggtcttaatttgggtcctgatctaggttcgggtcgggtcctagtcccagtttgggtttttatttgggtttgggttcaagtcttcgtccttgtccttgtcctggtcctaaacctagtccggttccagttctagttgtgattccaagttcgagtttgggttagggttcgagtcttggtccgagtttgggtttgggtttggatctcggtctaggtctagatcaggctctgggtgtgggttagggtcctgggtctgggtcaaggttcgggtctgagtcccaggtttcgatctcgatttgagtctgtgtttagtttcgggtgtaagtcctgggttctgatcccagtctgagttcgaggttgggtccgggtgcaggtctaggtttgggtttaattcttggtctgggtctgagtttgagtcccggggttgggtccaattttgggttcgggtctgggttcaggtttttcctattatgggttcgtgttcgtgttcttatcctggtttgggttcagggtcgtgttcgggtctcgagtctgggttgtagtccagtttctagtatgggttcgggtccaggtctcggtcccagtctttgtctgggttcaagtttgggtccttatcagggtctggatcctggactcgatcgctggtctcaggtcttggcgagggtttaggattaggtcaggtctaggtcccggtctaggttcgggtcccaagtctcatgtcccaatcctagtcaagatctcagtccaggtcctggtcttagtgggatatggtttgggttcggttctcgtctcaagtctgggtcctagtcacagttccaattccaattcggggtttgggttttgttctcggtccaggttggggacggggtccgagtcttagtccgagtccttgtacgggtgttttggaacctggtctgggtccaggtcccatgtttcgattctggtttgggtctgggtcggtattcgggtatgggtctgggttcgtgtccatgtccaggtccgaatcatagtttaggttaggggctttgtctgagtttacgattgagttccgagttcgggttggggttcaagttcgagtctcagtccttgtttgggtccaggaccgggttcgggactgggttcgagcccgagttccggggctaggttttggtcgagtttcgggtcccggtccaggtccttgtcatgctcctggtcttgttctagggtcctggtcacgctctggttcgggtttgggacccaatctcagggtgggtttgtgttttgagtgtgggtccttgtccggttatactttaaggtatgggtcaggtcctagtcctgttcctaagtcctgatccgcttctggttttggttctagtttcaagtcacagggtatgggttcaggtcgagtttgggttcgagtctttgttcgggtcctgatttttgtcaaaggtgaggttgacgtctgggtttcggtctcggttagggttcgcgattgggtccggtgctgggtttaggcccgagtttaggtcccggtcctattccaagatcccagtccggctccagttcaagtttttatttttgttctagagtgtgggtctcggtttggggtcatgtcatcgatctcgatccaaattctaaggccacagttttggtcctagtttatggggccgattcccaggtctgggtccccaatctatgttcaagtccaagatcctggtccgggtccatgttcgtgttccggttcaggttcaggtctcgagtccccatctgagtccaggtcccagtttaggttatggtcccaatttgggtcccagtcctagtgcgagtctgaggttcgggtccctggtctgagtctggttcttaggtcctcggtccgaccctagtttttgggtttgggtctaggtctaggttcgggtcccggtctgggtcaaggtctcggtcttggtttacgtcctaagtcacaggtcccggtctaggtccaattcctggtatggtttctagtctgagtttgggtttaggtttgggccctgttactgtctcaggtctgggttctagtcccaggcttggtttgattcaaatttcgggtccgggatcgggtctggatcccactttgggtctgggtctaggtctgggtatggatccgggtatgggtcatggattcaaacactgactacgggttaggtcgaagcctcaggtttagattcagatctcagtcatggatctcagtcttgttccaattcggccctaagtctagcgccgggtcctaagtttgggtttgggtccgtgtttggggttgtgtccccgtagtc

SEQ ID NO: 34715 - DNA, 1715 bp, Cannabis sativa
ttttgggaggtgagtctccatgtgctcaccaaactttgtgttttagcttaatgaatttcagtttcttagcaaaaaaagcaggccctaaattactgaatattttctcactaatgaaataattttaaactctcctaagtccgaacgttacttcggaccaaaacccattttcgaaataaattctaatgttgaagctgctcccatggcggcgtcaatcttcacccctgaaatgccaagccatttttcttatctctcgtttcctaacccaagacgcttacgacccgccctttgctcttctctccgaacccaagaaaacccaacctcgaaacaatgaccccaaacccaagaaagccccgactcaacgacctctcaagtcggatcttcccttcgatttcatttattcgtattcggagtctaatccctccgtggaacccatcggattccgagaatcccccaaattctcacctttcggccctggccggcttgaccgtaaatggactgggactactgctccggcccggaaggtccctgacctggataagctggcgaaggaacggagtcgggttcttggagacccacttacggaggacgaagtttccgaactggttgaacggtaccgccataacgattgttcccggcagatcaatttgggtaatgaaatttaatgcaaaattaatttaattttgaattttttattgttaatcaagatggtaaatattataggaacagttttaacaatttagttctctaccatgttacatttggaagtattttgttaaaaaaaaattggcaaagtctacatagtgattgagtactgactgatacccaatcgaatttttatttgttagtgaaagatggtatgtgttaataattatgtctattacttacattttaataaacatgaaaatttattattagtatttgattaaattttgtttttggcaactatcaactattaaatcaaagttttctctcatttgaattgatgtcaatgatgtgtatgtatgtatgtatgtatgtatgtatatgtactgaattcccattctttaggtagattgatggattttctttccttcttttatcattagggaaggggggagtgactcataacatgttgctcgatatccataaccattggaagagagctgaagctgtaaggatcaagtgtttgggtgtacctactcttgatatggataatgtgtgctttcatctggaggtttttaaacttgattcattccatgttcatatgttttagtatttgttattgtcttggatttcatcagaagttattagctgctatagaaattggtgtggttgtagggaaaatctggtgggaagattatatacaggcacattaacgtcctccttctatatcggggtcgaaattatgatcataagaacagaccagttattcctgtaatgttgtggaagccttatgcacccatttatcctaagcttgtgaaaaatgtcgctgaaggcttgacatttgaggaaacaaaggaattgagaaaccaaggtctcaactctcatcctctaatgatactaagtaagtcaaacatggttgagatgaattgctgcctttcatgttttttgacgtgaaatagccttccaaaaatctattttcactaatgaaatcaaagagggaaatactgtagagtatttactcggggtttgatggcgaatgtaatttgatttgctgcagctaggaatggtgtgta

SEQ ID NO: 34716 - DNA, 1882 bp, Cannabis sativa
atatatatatatatattaatttaccttaaatcttattattctttttatgaatccctctccattctcttcctcactctatagattaatttatattttctattttttatatggggaaatcgtttttcttgtgtatttttttttaaagaaataactttacgtagtattgattttgtatctacaattaagtgtctttatatactgattaataagtttataatatatatattagagtataatcttgagactaacactctcttacttaaattcttataggtgtggtggtatgtaaatggtagacatcaaaacacaaaattgagaccaagtgatattaacttaccctaaatcttattatttcttttttatgaatcactctcccttctatgcctctctctacattatcagtttatttttttttttttaatttatattttctattttttatatgggaaaatcgtttttcttgtgtatttttttttaaaaaaaataactttacatagtattgattttgtatctacaattaagtgtctttatgtattgatttatgtttataatatacatattatagtatattttgagactaacactctcttgcttaaattcttatagctaggtctggtggtatgtaaatggtagacatcaaaacacaaaattgagaccaggtgatattaatctaccctaaatcttagaattttttttttatgaatcactctcccttctatgcctctctctatattatcagtttatttttcttttattttctttatatgggaaattgttttccaacttttgttttttttttttaaaaaaaaatcacttaatatagtattgattttgtatctacaattaagtgttattatatattattgattgtgtttaaaatatacatattagagtaggagctttgagattaatactctttttctatgtttgcttaaatctttataagtctgggctatacaaaatcaatagtggatatcaaagcacaaaattaagaccatgtcgactatgattaatgatattctatggagttgataaatttactgatgatattaatataatttataatatactataatagttgtagtatatttttctaaaaactataaatttactactttgatgatgtttgtggatgaagcatgtatataacggtatttttaagataattgatatgccatctctattttaatttttttgagttttaaaatatatataacaatattgataattatttttcttaaaaaaatcatattattttaatatttgttctatatatctataatattttttttgaataaaatatatttataaaattagttctttttaatcttatactaaaagaaattaaagtttaacaagttgctcaatttttttaattataacctttaaaatatctctttttcagttttattttaagataaaaaattgtatggtgaacattagaacaattatttttattaataaaagaaattattatatcaaaaatattaaatgttaaaatttgatatactgttatgacttagtcatcactaaacaaaatatcgcatgtgaagcgcagtttgttttctaatttaatataatactaaaaaaattaaattaatcgcgcgaagagcgactatattgactaattatataaatataactaatatttaaaaatatgcatataatttagtaattctaaaagaaaaaaaaaaattaagtaaagcacaaatttaagtttgaacataaaaattgactattatattgaacataaaaatttaaagaaatccggaccgacacgaacaaattacatcataaaactatagagggacttgtttaagaaatatggaccaacacgaacaaattacagcagaaaagcatcgaacctataagccatgccgtg

SEQ ID NO: 34717 - DNA, 2271 bp, Cannabis sativa
  modified_base (431)..(438): a, c, t, g, unknown or other
gatcttaaaatatagctcacacgtttagactcaatccacatgtgtagggtgacatataaagacacatgattaatttagtttaattattttattggttaaaacaatttaaattaaattaactaactatcttttaattattaattaaatgaattactggataattatttaattaaaaagataataattaaaatgaaagatttaactaatatttgttattcagttattagatatttatatttgaatttgaattctaattcgaatcaaattagatattttattttattttaaataaaagattaaaagattttatttataatactatataacaatagaaaataacctgagatatacggtaacaaagtgagaagaaaaaaattggttttttcactccctattccctctctcgcatgcctactctctctctctctctnnnnnnnnctctctctctctctctctctaggtctcacacgccaacaccattcccgatttgtgtgagattgaacaatcttatctcaattacaatatctcataagttgagtgcacactataatacctaaattaattcatccaaataagatctaatagctcactctattcctgattgttgaggcttactttgaagatcaaggtgtggattcttcaacaaaggttcttagattggataatcgtttatgatactaaaagatagcaaggataccctgataggtttcaagaggtattgtctttctttcattagtctagatttaatctatatacattatgttgagatccttgggcttatggttcatattagattaatattattttttatcaaatctgcttcaacttttataactctgatatggaccataaaaactaataataatacactatacccccaagtgatatgagagtttggactcttggtcacttgttgcaacacaactaaaaaatacaaaagactatatttttgctttaaaatttcttctatttttttattttactatttccatccctgaggtgtacagggaagagaaaataaaacgtagtaatataaaatggatccagacacctccagtttactgatagtatcagtgcatgtggtccgtgttccattctcatggaatctcaactccatccagtcttttgagttggtacgttccatcacacactttatgttgtatttcatatggcctttcccagttaagtctgaggaccccactctcagatcctaagagattggaaacactcttctcaagagaagtcaccaacattaaattgatcttcagcttttgagttttgagttaaagtgtcgagcaatctttccttcgcacattctgagttggacttgtgattgctctcgtagaacttcaatcaaatctagaaattcttgaagtagagcatggttccatgagggataataagtctcttcagtgagaaggcatagtgtattctactgggataattgcttcacaaccatagtccattaagtacagagtgtgccccatgtaagttctctttattgttcggtatgcccaaagaactcttggaagttcctccgaccagtgatccttgcttgcttgtaacttctttttcaacgtgatcttcaaatttttattcatagcttccaattatccatttgcccgtggtctgggcacaactaaaaatctctttacaattccatgcttgacacataaatcaatgaattgatcactatcaaattattttccattatttgatacaatcttgtgtggaagtctgtaacgacatactatgtttttatgaaaaaatacaaggcctttttagaagaaattgtattcatttagttttacttcaacccatttggttaagtaatcgacaacaacaatggcgtatttaactcattcttatccagttagaagatatcctactaagttaattcctcaaatggcaaaaggccacgaactgttgatcgaggttatttttgttggtggagctctcagaaccatagaataacattggcactgttcacactttcaaacgtactctatacaatctttcttcattatgggctagaagtatccttgttagatgatcttctttgacagacttggtctggacgtatagtctccacaaaagccttcatgtatctcgtgaattaatatactaattttggttctggctatgcgcttcaaataaggtaacgataaccttctctggtataatcttccctctggaatcacatatctgggagcttaatattgaatcttcctagaagatgctccatcatcaggaagctccccagaacttagg

SEQ ID NO: 34718 - DNA, 3083 bp, Cannabis sativa
atatatgtgagtaaatagtaaccgagattagggttattacccaatatgagcggtttaatagcctagggttattaccctagtgatatgagttgtgtaattgatatgccatgctaagtatataaagatttaggggttatgcgttcaaggcataatcaggttggactcagtaaccacaactgagatgaaccgttctaaggccttattgtatctagacgtgtgagcgcaacacgtaggtctacgctacgtagacataaataggcatgtgagcgtaacatgcaggtctgtgtcatacatgcatatgagaatcgcattaatgtttatatagtatgataagcatattattgatattttatattgtctagttgggcttggctcatgggtactctactgtgcaagaaagggtaaagctgtgtctaatcgaccatgagtgtaggagctggatgaagaatgtacatgttcgggccatactagaccaagcgggttgggatctaccaatgatgtaatttgagactctgttttgccgcttaggtcaaaaagaacttataatagtgttttgtaaatatttgtgggatcccaacttttgaaacttttagtttgtaaagtttaaatcattacaagttattttcattccgtttcgtttattattaaagcttaatttaatttctgttctgtgctaattttattagtaatcccgtctaggggattagggcttcttaagtatcttgggaagcgtgcctagttatttaaggcgttacaatattgcacaaaccgatatttacaacctattagcaccccatccgggccaaaataatttatacatcaacaaatctttctatacaattgcacattatagatcattgaaccaatctttatctacatcattaatcttttttggtataaacattgcaactctcatcttaacactccacttagtgtcttcaacaattcggttggaagttaaaggaacctcctgcgaaatcacattatttctcaacctccaaatattgtaaaccaaacctgcaattgcaacaacatagaccattttctgaaatttcgaaatctttgctctacctatccatcacaacaaatggggaagactggttgatacagcattccacttcaaccaaattttaatttcccgcagtcctttaacagcaacattacaatcaaaaactaaatgccgactagtttcagcatgcatattaaagactactggaaggaagaaaatattattgattaaattgaagatcccaagagagttgtttatagagtgtacaactcattgagacaaatcaagaactaagctaaaaaaaatcggtttgctccaactaattgaacagtcataacacactaaccatataactgattattttaactactgaaacacattaaatctattaccccctcaagatggactgtatatatcgtgtacagacatcttagataagtgggtaactaagctaaaggtttggtaaaaatgtttgggagttggagagtgatgttgacgggtatgagctgaatgatggagttcttgatatcttttctcgaatgaaatgacaatctattttgatgtgtttttcctttcatgataagttggattgttagcaatatgaatggttgatcgattgtcacaattaatgaaagctagagttggttgtggaatttggaaatcattgagcaaatatctaagctaggtgagctcactagttatagcagcccctgcgcaattctttgcttcagtagaacttttcgagatggttgtttgtttctttattttttaggatatgagactatctccaagaaagatacaaaatccaataactgatctccaagtgattggacaagatgcccaatctaagtctgaaaagactcttaagtgtatagaagtggaagcacaggaaagaagcccttggcttgggaatccttttcgataactcaacaaatgatgcaaggtttgcatatgtgtagtgcgtggaaaggaaataaattggctaagggtgttgacaacaaaggtgatatttggccaagattgtaatgaccgcatgattagattatggattaataaaggcaattagcattaattattgacattttatgagtgtacatgattttatatttattgtgagttccattttctgaaatcagcattagagttgtaatttctgaattctgaagattttattaaactccatgtattatatatgtcatatgcaaaatttaaaatttgtatgatatttactcgatgacaatagaaaatgtgacggatggttgatttagtcacatgggttagcttagaacttttttatttattggggtattcataagttgatatttggtatatcaaagttacgcgggattatagttttgaataattttacccctaaggtattttaccatttaagattttaagtgagggcattttaggtattttaattggaggtttaggtggctaatttattagttggcaattggccagtaactaaaatcaagtagagtaatgcaaagtaagagccctagaacttactatcttaattttttttaattattttctctttttgtttttagcatgaaattgtagaatttgttgctttcgaattagggtttgttctagattgctttctattgtttagtcaagttgatttaagctggattcttgtggttttgaatggttaatcttgtgttgaacaagtttaagttcaagaactaaaacttggtccattaattatgaattgggtatttttgtgtgatacttagttttaccacttgaaaatgattcattatgttgttattaggtatcttggagcttagattcaagcttggattggttttaggccgaattggaggttctttttggtagtgaaaaatggcatactgtagaaacggtctaccatttttactgggaaagatccagaaaaatggcttgccgtttttatagaaacagcctgtcattttttaggcagtttctctgtttagttgattttctcgtgtgtcctcgatatttagggctttgacatgctaattattgataggaaaacttttagtttcgagtttagatccccaaaaaggtttagaaagttgtttac

SEQ ID NO: 34719 - DNA, 3380 bp, Cannabis sativa
aataaaaataaaaagtcacccataaatttctcatagaccaaaaatttcagttatatatgcatactttatatagaatagatattgtaaatggttgaattaattcatttcaaaaagaataaaaaaaatacttgaattaattaaagcttagactttcaaagataattggataaataagagtgatttaaagaaaaacaacgccttaccaatttttaatgttagaaattgcaaaagtaccatgaatatgatgttcggtttcaaagttgactggttgaagttgaagtgaagggatatgtattggccttataattggtcaactagcatacatgatctcgcgcacatatgaaaccttaaaaaacattccacattttctaaatccccaaagtatgtgtttttcttgtttattctagtgtgtttttgtaaccgaccaaattaaataagaaagcaatattttataaaccttctcgcatcaactattatcttttccgtacattagattaggcacagttttttattaagttccaattctcaaacttcattcttcatatccatggagaaaaaaatcttctttaccatctgggttttcctttttcttcaaaacccagtaaagtctcagtttgatgagctctactttaccagattcaaccatggggctaacaacttgagcatagatggggcatcaaagatacagagcaatggcatactgaagctcacaaatgacacccttcgagtaattggccacgcattttactcacgtcctttgaagtttaagaactcgaccactggtaaagctttctcattctcaaccgcttttgcttttgctatagttcctgagtaccctaagctcggcggccatggcttcgctttcacgatctcacctagcatcgacttcagtcaggctcttccaagtcagtaccttggcttgcttaactccgccgacataggaaatttcacaaaccatatattcgccgttgaattcgatactgtacaagactttgggtttggtgacataaacgacaatcatgtagggatagacattaatagcttggtctcaaacaaatctgctccggggtcctttttcgatgagaaaaataacaaacagaatcttaatctcaaaagtggtaaggtcatccaagcttggatcgactatgatcatgctaaaacccaattaaatgtaaagctttcacctttttctacaaagcccagttcttcaattctcacctttgatgtggatctttctccatattttgaggactccatgtttgtggggttctcttcctcaactgggcttcttgcgagctctcactacatcttcgggtggagctttaaaatgaatggggaagcaaaatctttggctttaaacacattaccatctctccctggtcccaaaaagagccacacaacactcatactaagtgttttaatggcggctctggttttaacggtcttggtttctggggctaccttttacatagttcgaaaaatcaagaacagagatgtcatcgaagattgggagctagacatcggtccacacagattctcatatcacgagctgaagaaagctacgagaggtttcagagacaaagaagtcattgggttcgggggatttggtcgagtctacaaaggaactctaccaaacacaaaaattcaagttgctgttaagagaatatcccacgaatctaaacagggtattcgagagttcgtatccgagatttctactatcggtcgtcttcgacataggaaccttgtccaactcctgggatggtgtcggcgtagaggagatctattactggtctatgattttatgcctaatgggagtctagacaagtaccttttcaatgaacccaagttgatattgagctgggaacaaaggtttaagattattaaaggagttgcttcaggcttattatatctccatcaagagtgggaacagactgtgattcaccgagacattaaagctggaaatgttttgttagattcagagttaaatgcacggcttggtgactttggcctagcaaagctgtacgagcacgattccaatccgaccacaaccaaggtggtgggaacattgggttacttggcgccggagctgacacgaacagggaagcccacgactagctccgacgtgttcgcttttggtgggcttttattggaggtgatttgcgggagaaggcccattgagcccaaagccctaccggaggaactgattctcgtggactgggtgtgggagcagtggagagttggagccgttttgggtgtagttgatcctagattagggggcgagtttgatgagactgaggttgttgtctctatcaagttgggccttatctgctcaaatgacaagcctgaggcccggcccactatgaaacagattgttaggtacttagaaagggaggcgccgctcccggacgtggttccgccgccgaatggggaagttggaaagagcggcggccttgaggattacgtgcattcatatccaattttgtcgaaagtcagcacgttttcatctattggtgatgacgtcgatgctgacgtggatgttggttcttcttcaacatttcccctatcgattttgcagtagtgccgatttcatgattgtgaaatatgaacaagtaaaagaattgttatcattttcatattttatttaattttatattgatgaagagttttgttaatttaaattaatagtcatcttttgttgggtttgtaaatatagaaacaaagaatattgacttggtgtttggaaaaatacttggatatggttttctatcttattttattttattttttttacaatttatggggtatagttgttactagattctggtctggtagcacacaattgtttctattaaatttttagtggctaaactcttccactataattttatttgcactaacattccaagtctaaattttgataataattttttttgaaataaaatgttattatattaaaacatgaaagttataatacaatacaataggcatcaatgatagaggtattttttcgaaccatccatttaccatacttaaaattcattgatagagccatctcctcgaaccatccatataccatacataaaattcatttttttattaaaggaagaaattttacaaatcaaaatagagtaaatgttaccaagactagcatccacaatacaacaaaaaatagacttacatgttacaaacaaaattaaaaatttgttggtccttcttagatagattcctcctatcaacaaataataatctcacttttagagcaaatctaatcaaattgttcacataagaaatataaaaatattttgctcaaaaatacaagtatttcgattccaccaaataaaataaactgtaaccgcacaaacagccacatcaaccctata

SEQ ID NO: 34720 - DNA, 4088 bp, Cannabis sativa
  modified_base (41)..(83): a, c, t, g, unknown or other
ctttatatgtgtttatttatattcgttttagaagttcatannnnnnnnnnnnnnnnnnnnnnnnnnnnnnnnnnnnnnnnnnntggtaaaataattccaacacctttttcatggtattaccatttgtaggtctgcccctcccatatcccatcttctatttgctgatgacaacctgcttttcactagagttacgtctctgattcttcttgtagtgaaatcaaagacattctgctcatttatcataaggctacgggtcaatcggtcaacctccaaaaatcctccatccttttctctcccaatactaactctgattctcgatctttttttttttctaaagtccttgtatatggataataagccttttatcgataaatatttaggtgtccctcaatgtttttcacgctccaaaaaatcatcgttcctttttctccttcaaaaagccagctccaaattatctgtgtggaaccaaaaccttttctctaaagctggtaaggagattcttctcaaatcggtaattcaggccattccatcttatgccatgtcatgttttcggatacctgtctctgtctgtaaatatttctgtagacttatgtcaaacttctagtggggttcaattggtaataagcaacggattcactggaaaagttgggaccatttgtgtaagtctaaattctttgggggtttgggtttccgtaacattgtccatcacaatcaggccatgttagctaagcaagcctggagaatcttcactagccccaatccattggttgtcttgcttttaaaagctaaatactttaaacacaatgattttctcaatgctgcaattggccactctccttccttctattgcgtagtattctttggggtagggaatttctcattaagggcctcatctagaaaattgggaatggaacttctgttaaaatcattgaccccaaatggcttcctgactgggatagtattcctttcaaagctggcttatctccccctctctccactctcttttttcattactgaggatagacactgggacacaagcaaacttcatcaatactttgatgataatatcatcaattccattctcagtgttccaattgatccttctaacagcgatttccttatttggaaacatcacccttcaggttgcttcactgtcaattctgcataccatttagccaattctcattcctctactcctagttcctctaatcctgctgcctttaaatcttggtggacatctgtttcatcctctaacataccccctattattaagcatttcgtcaggaaagcctttaaccatctccttccttccaatcttaacctttttcatcgcaagtccatttcttatccttattgttcgatttgcttaacacatttagactctaacactcactccctaattacttattccgagcaggtaagttttggaagaactcttctttctcttccttttattttactaataataaatatgatattaaagaatttttgctgcgtggctttgaacattttgacaaggataacttctccatcttcctgggttttttatgggcaatttagaatagaaggaacaagaccattttactgataacaactacactgacttagatgtggaaacatcagttttaaattacttgcaggagtacagagattctcaatcgaagatcaacactccgtccaccctcactcaatctggcagtaccaatttgcagcctccttgtggtatgtttcaacttaatgtggatgcggctctttgctcgagctccaacaagcatgttacggtgccatagttactgattccacagggcaagtcattgctggtttttcggcctcatcttcctcaggtctccccccaatttttgcagaagtagaagctctacaacgtgctttgctttggtgtcagacagttcgttttcctctcggcattattgtctctcactgccataatctggttctcagtattcagaaaaagtcctttgatcgtttgactctttcaggatatattgcaagtattgttttctctttgtcattttttccaggcgcatcagttcactatcttcccaaattggacaatactctcgctcacaatctggctggggctgctcttgtaacggatgaagagtttgtttggaacaacctgtgtacctcttcttgaagatcttttataaccagtttcctttgcattcttttgttttggttacaaatctttgtagtaaaaaaaatagtttaaaagttatgatgtgatggttgatatcatgtttgtgacaatttttttttttgaaaataataatgaaaaaaacttatcaaaatcctttattacaggttttttttttttttttatttgtagttataataggtttttttatttgtttttttaaaaaatattgatattctctctcctctcttcatcttctttttcgattttcgtttttttaaattttttgataactttttttttttccactttcttcttcctcaaattctctctatcattctctattaacatatacgctttttattttatttcttgttaagttcttcttcttcatcttctttctattttttttatttagtttttgaagttttcattcacgtttttggaaaaaataagagtataatttttttattttgattttttagaacttgcttgcaaatatagtctctattgcatctagtattgaggttgtgcagaagatgattagttttttcaatcatttttttcttttgtttttttatatttgttttagtgttgttttactgttgtctgccatgatttatttctttgacgttgatttcactgttcttgctccatctcaccggaattaatagttactttttgagtattctcgtgttgctgtagtggttctgtctgtggatgtagaagatggaggctataaatatatttattcttcgttctctttcgctatttttgtgtttttttattctggttgacgagctcactgacaaaaagagttttgatgtgtgtggttcttttatattttttttaagtggttatatttgcttcattgttttacatttttttttgtgttgttttagtagtttcttttattatgatttttaaggattgggcttgcaaatatagccgctattgcatctgttgttgaggctgtgtagaagattgttagtttttttaatccttttttccttttatttttttgatttattttagtgttgttttacacttgttttgtcataattatttatttgacgtcgattcactgtttttgttcaatctcgtcggaattaatagttattttctggctgtcctggtattgctgtagtggttctgtccataagtgtagaaggtggaggcctcatatttctttttgtgtttacaatataaaagaaaaaaaaaaagagagaaggacagtataaatgtaatttctacggtgtgtggcagtaaaattacaaagttttacctaaaatttaatatttttgtaaaaaccccaaaaatctattaaaaaaaccccattatatctagccatatcataccttattacaggaattatttcacaaatatacaaaaataataaaaaaaattacaaaaatacgatttcatagaattttaagtatttttataatttttttaattttatttacagaaaatacgatttttatatattgtactcttgttaatttatggttaattttttaaaatctgtatattattttttgttgttatttttatgttatttttatattatttttacgttgtttttatattatttttaaaaaacttataaaaataaaaaaaataaacatacaaatataattattttaaaaaacaaatattagcttatataattatctcatattacaactagatgcatttaggacagttccagcagctaggtgtgtcactaaaggtatttattagcgttaaaaagtgtaataggaagtgaaaactgaattgttttgcctcaaattacttgttaaaaaagtcaagatcaaattcgttttcttctccacgcaatacgaacgagggtatagggtttctctttgcttcccacgctcctctcctcctcatgtggtgagccaatcttcctcttctccttcgctatttctct

SEQ ID NO: 34721 - DNA, 4475 bp, Cannabis sativa
tttagattttttttattttattatattaacatatagtatgtatgtattttgtattttattgaatatgtgtgtgtatatattttgtattgtgtgtatatatattaattgtgtattgtttcgacaatatatattgtgtatatatattgtgtgtatttattgtgtattgcgtgtatatatattttgcattgtgtgtatatatattttgtatgtagagttttaattaatttagaaatgatatatttaaattttgttaatgtgacatataatttattatatatgtatgtatatgtaatatttttaaaaatttgtgtatatatataatttactaaatagtaactagttactttttttcatgcatattcatatatttgtattactagctagttagtcattagtaactagttactcataattgatataactagtaagtagttaaataattaaaattttaattttattgtatttcattatattatagattgtgagctaattttaaaggttccgaataatttagagttgatcagattttaacttgctatacagatatatacattcacaaactttttgttattaattacttatcaatgcttagtagaatttgaatatcttaaatattcatccatagtgaagtaggttctgtgatatattatactacggtgagatagctaggtagaaaatatacattttagttaagtttgaatatcttaaatattcaaccataataaagtaggttctgcgaatacatgtactgcggtcagatgggtgcataatttttgtattgttaatattttttggtttcttttgtattatttgatttattttgttttttattttaggcataattaaaaaatttagaaacgtccaattatagtcattatgccgccaaaattttggtagaattatgataaagtttactaaaaatgcataaatattaaagaaaaagtgttacacctaacacaaataattaattaattagtagctagtagtaagaaactagttagttaattagttacttacttacaatttatataactagtaactatatacaataagttactagttaccatgccaatatttgaaatgagtaatttaataatatgaactaaactaaaataagaattatataaatatataaatgtaaaataattgtgaaaattctagttagttacattatgtaagtagtaactagtcataatttgttactaaatactgaaatttttttgttaggattttcgttatggataaataatggatgtgtgaggagagagacacactgcgatttcaagtaagattcgatgcatttatagagtttgcccaaaataattctagaaatcccaaacatattcattgtccatgtgtacattgttgtaataaatctaaaaggaaatattacgatgattaaggatcgtgtgtatttaagaggtttcaatagaagttatattacttggtattgggatggtgaacatttagctgataattcatatccattagagaagcgggggtagatgatattgagggtaatgatttcgatgatcatctattggacttgcttggcaaagcacgggaggaatttcttaatgatcttgaaaaatttgataattttttaagtgatgcggataaacccatgttcgatggttgtaaaaaaagttagattaccaacaatggtaaagttttacaacatcaaagtaaaaaatagagtgagcgataaatcttttactcaatttttagctacttttaaagatatctttttatttgacaatacttcccgaaatctacatatgaagtgaaaaatactttaaattccataggattgaagtatgaaaagatccatgtatgttcgagcaattgcattttatatcgtaaagaatacgcagacatggatattgcatgacttgtggtttatcccgccataaaataaacaagattaaagagaatagaaaacttatcccccaaaaagtgatgccgtacatgtctttgattccatgacttaaaaataattatatcgtagtgcaaaacattttaaaaatttgtttttgcacgagaccaagagagcgaaagatggaaaactcacacatcccgcagattcccaggcttggaaaaagtaaactacataaatcttgaatttaaatttggaccaagacatattcgtctctgtctatttacgaatggagtcaatagacatagatctctaagtagtcgtcatagttcatggtctgtcttccttgttctgtacaatcttcctccttggttagtgatgaaaagaaaatttagtatgctttctttaatgatatcaggcccgcaacaacccgaacataatatcattgtatatttggaaacattaattgacgatttaattgaattgtatgagaatggtgttcaggcctatgatcgatggttttaaaaaagaattctttaatttgaaagcagtattattatggattgttagcgatttttcagcttacagttttttattaggcttaagcacaaaaggttactaaggttgttcgattagttgcactaacacatgggctcatcgcttggtaaatagacatatgatgtgctatatgggtcatagacggtacttttctatagatcattctgatagacggaagaagaaagcattcgatggtactgaagatggagatatggctcatttgccactgtcaggagaacaaattctccaagaagtaaaactagtagattttaactagaaaagacgcaaaaaaaaaaaaaacaaatagttatttttaagaaagttaatctttttttatcttccatattggaaaatttattggtttgatatattatttggatgtcatgcatattgaaaaaaaaaatgtgtgtgagagtattatcggtaccctacttgatattcctggtaaaactaaagatggttaaaatagttgtttagatctcgttgaaatgggtatccgataatctctggcacatggaaaaaaaggtgaacgattatatttgtctcctgcttatttcactttgtccaaaaggaaaatataaatggtttgcgaatcattttcaaatatgaatgtacctgatgatgatcaagcagatctattattcacaccagagatcatgtcattaatccctagggcactcaaatagatgttgaagaatttttgagaatcaaggagaaaatacaaccatcccaattcgagtaccacatgaattcatagcgcctcgtacctagatcacaatatttggagaagatttgcagcagatggcattgtttgacttcatcggcaaccagggagtactttttataataatgtatactcttctttaatctaattaatcttatatatcaaaatctattgaaattattataaaacactaatatttaacaatttaatgcagacacatctaggagggattacatgatatgagacaaattttaaagttttacgactcagagcttctcatagtgaacggtaggaatgatttaaagaaggcatagccttttaagaatgcatcaaaaggattggcacattggttatcatcgatgaatagccaacaccaaatgttctttatttcttaaaatatcgggtaaatactacttaagagataatttaaaattaattttctatattataatttaaaattattttatactatcttatatacatcccaatatattttttagtgcacattggatgctagaggtcgttgcgctaagaaaaattatccatttagatcatatatgtgaccacaaagttctctcacaaattaatacaatgttaaaaaggtaagaatttaattactctttatggacaaattttcttaattaacttatatatatatatatagatgatttctcatgggtaataaaaaaattaatgaggtggcaagttggtgaccttctatagcaggtcaccaacaagattttttttagaaaaaaaaaaaaactatatttattttcttaattatgatgattctaaccaattagaaattatttttagaaataaatttactttgcttaaattactatattatctttacactaaatataaatatgtattaattatggaggatttttttgttgggagtaacaatacattcgtttctatttttttttttttttaaaaaaaaaaatgttcatttttcttgatgtcattaaaaaaggtttataaaaagagaaattcattcttacaatcttttatttattttttattataattttacttttgtttaaattaatatcaattttgctattgttatataacgtggatcattaatatgataccgcttttttcatattagaacaacaatatcacgtcatttacttaggtgagcgtgtggagcttagaatataagcccacacactagctactgttttaactcttttgttttttttaattattaacgatgtagtttttcaatgttttttatttagggtattagatttgatatacattcagatttaataatacatgaagttttgaatttggtatactaaaata

SEQ ID NO: 34722 - DNA, 2393 bp, Cannabis sativa
ttttctgtctttgaaccatgctcttcctgatcttttgcaacactaaaccctgagattttagtacaaaaatttgagatagtgttaggtgcgatttagttttctgtgtccctaagcattttcattttacatgacagaaaatgcttcgtctggatcccgtgaagagaattacggccagagctgctctcgagcacgagtacttcaaagatatttccctcgtgccttgaattttgcatccgttttcatggaaagacaatttgtctatagtatgtttagtaatcatttggatttcgattgtgtgagaatcgtgtgcttgtgttgtgatttatatttttgatcgctttcgacatagttttgataaaaatttgctttggcttttgatatgttaaaaatctctcaatgggagtctgctctcaattctcccatgttctatccatggaaagatatatataccaatgttgattgtaattttcttctttttccctttttttttggagaaatgggaattatattaattttgattagcccaataatttaatgatagatgaacactccactctgcttagtttgaaatattcttttgacctctttctcttatttaactactttgagatttggtacctgaattgaaacgacatgatttggcttcttttagttttgatgctctgttattgccttagaccaaaatgaacaaaccaaatctgaattaataattagatttttgtttctaaggacccttctattgctttgcacactctaaagaatttattttcgttcattgtattgttacccttttagtttggcacttatttttttatttatgaaaagaattgtctgatattgccattaaaacatcatgatcatattctcagttgcaataggtggttgggtatccgatccaatctaattttcttttcatccgattcaatcctttagtaattgaatttgaaaaatcatcatccgatctgatttaattagaccttaaaattcaatccaaatggttttttactttataaaaatattattgttacaagtgtaatgcaatcaagtaaaacaacaatgttactaagtaataaaataataaaaaaaaacattataaaaacaaatatacaaaacaactacaaatatataagtatattatatataaatgtaattggattagatcggtttttaatttaattttgaaaatgacatccaataaccgatccaattcaattagaatctaatttttgacatccaattcaattataattagatatcaaatttttttgtaattagattgaattagattagttcggttcaattgaattggattgtatgttgcccacctttaggtgccacaatacatgagagagaaagaatatccggcaaagtagaacttgcaaaagaaaaatgacaagaattcacggaggtcatcatgttgcttagtttgcccccaacatttgaaggttcatttcggttgttcattcaaagtttaagggtttagattttttgacacgaatctttagtttttaattgacgagccattattatgaccctctaaaatagaagtgttgttttatcataatgagtcgtcaatagtcaacacccgagttgaatcaattattatgaccctctaaaacagaagtgttgttttatcataatgagtcgtcaatagtcaacacccgagttgaagcaagagtttgaagcccgccctttataaggtgagtctttaagtgaatcttagactcttagactcttagactatggtagtttaaggacagagaatctgatgagttactcttctcagtgttactttctcactcgaatttatgttttaatagtggttctaccaattaaaacatagcacatcatttaactgccatctaaatttgaactttcatatttttcattttcacatatttatgctaaataatttcttaagtattatatgtactgttattggtacaattaaatatcgagtagagtattatataaattaattaaataaattttaaaaaatatcgttaactaattacaaagtgtcatttttaagtggtgttaaattttattggtgcctaatagcaatgctctttttcaaactgtttactttttaatttttttttttttttaaaaaatcttcttaactaagaaaactcttcgttctccgaaacaaaaagacattttaaagtagagctggagtcagatttcttagtagcagtccaaactatttaaaattcattatttatgcgttctgttttttaggttattatagaagtttgtcgtaaatttcatatatttttaaataatattttttttttgttttttattaaacgatctgcaaacatagttgttcataatatttttaaaatatattgttattttttcgatcaagtgttcaacatgggtgatattct

SEQ ID NO: 34723 - DNA, 7571 bp, Cannabis sativa
ttatcagattgacaataaaaaaaaataatccataaaaaacaatattgtgacttttgggtatttacgaagtaattttaaaaaaaggatattcattgataaaaaatacttctatattatacattttttttgagtgggttgcctaatatactttcaatctctacttaagcctagcttataatttacaataacttaaagagtttaatgatgacattatctataaaagtaggtacattttaaaaaatatgaaaatagaagtaaaaattaaaacaaataaattaaaatgggtgcaatgtaattttctaaaaaaaaaaataaaaggccaattttatatttttataaaaagaatatgggctttcagcaaaatgagcgcaaaaatagaggactaggcaggcccgtgtaaagcccaataagaaatatatatattataagaaacagaagcgagttgcgcctctcagactgaaaccctagctaagctctactctctcctctcttctgcaaccatggccgtcgggtacctcttctctatttctttcctccgctatatgcttcattcatgtacttctgaatcatggatttctgtatgtttatttctttcttttctattttcataacatgcatgtgatctgattttttaggaagaacaagaggatttccaagggtaagaagggaggcaagaagaaggcgtaagtcaattttcaacttttatcttttattcagatttgatttgagaatcaaaatctctataattgcattaacactttgttaataatataatacagagccgatccctttgccaagaaggattggtatgacatcaaggctccttctctattcaaccaaagacaagttggcaaaacccttgtcaccagaactcagggaaccaaggtttgtctcttcaaaatgctttcttttatcattataattattaagcttaggtgctcatgatgatttgttgtttgttagttaagagcctaataaggggttattattcttttttttttgaatgtcaagctctatttggggaaatgtggttgataatttaaacttataatgacgatgattaagcattaggcctatacttttctctagtattttttttacatcagtagcaattgttagtttagttgaacttatatgtaagtgtatattttggattggagatgagctgttatgttgtttcattaatatgcccaattgtgtgtgaggatatacttcatgttttctttgtatatttcatgtatttagaggcgcattgatgtttaatttgttattatgttatcagattgcttctgaaggtctaaaacacagagtgtttgaggtttccttggctgatctccagaaggatgaggatcatgcttacaggaaaatccgtttgagagctgaagatgttcaagggaagaatgttctaactaacttctgggtaggtttcttttttaatgaatttcattcatctatttggaacttctttttgtacaatgttttacttatttaatttttataatgcgaatttgcagggaatggacttcaccaccgataagttgaggtcacttgttcgcaagtggcaaacacttattgaggctcatgtagatgtcaagaccactgacaactacaccctcaggatgttctgcattgctttcacaaagagacgtgctaaccaggtcaagagaacctgctacgcgcaatccagccagattcgtcaggttcgatttgatttgattgtctctttctcttaaatgctccacattttcatttagtatgctatgctttgatgacatatagaaacttgtgttaacaatctttgtttgcttatgttttaatttcctttttcatagattaggagaaagatgagagaaattatgatcaaccaggccacatcctgtgatcttaaggatttggtgaacaagtttattcccgaaatgattggtagagagattgagaaggcaacatcaagcatctacccactccagaatgtcttcatccgcaaagtgaagatccttaaagctcccaaattcgatcttgggaagttgatggaggtattcattggcattggattccattcttaacaccccttttaactcgtaggaaccttagattgtttttttgatttttgtcgaattgtttgtgtaggttcacggtgattactccgaggatgttggagtgaaggttgacaggccagctgatgaaacagcggtcgagggtgaggtgaccgaggttgtgggagcataatgaaactcaaattttctttttcattttgttaaaatcagtaacatttaaggtcttttcaattttgcggatttgtgtttgacagagtagaatttgtatggatggaattttgctctaattagacttatggcagaagaacaacaaacaaatactgcttagaaaattttatcagacatgtcatgtattatctttgcttctttttttatcatcttatttatagattccttacatgtttgattgatttcttcgaatttgtttttgttgacgaattaattctatgttaaagtttaaaatcaccttttaatttattcttatgaagaataaaaatacaaaacaactaaatttggttcaaatctcaaaaccttcttacgttaatgccaagaaatataaataaactagtctcaaaacctaagtatagtatagttacttgctcattaccaataaatagcgatctacaatttttttatgagaattatttcaaatattttttttttcaaatttacagtttggattgtttcggcagtttttctagtaatttttatgtgggtcacagattttgattacgatttaagttgctctgttagtcgttatatatttgttatttgtttttatgaaacagtagtctatattcataagataaatatgattaattttatgtgttaatattcttgaattgattcttcaaattattaaattattaattagcgtgatttaatttgttaggattgtggaagactaatcatacatttggaagaattttagcacattttgataaaaaatagtagaagtcacataactctatatgaaaaatctgaacataattgaaaattttgacggtcttaaacgtagaagctcaacatgaaattcgtagattgtgatcctaacttttcaaaacatattgaatagtctaattccgaattgtatgaaaaagttatagttaaaatatcgacttggagtacgtttcgacttgtgaagtactttccaataatattaatagtaagttgctccatctaatatcaaatggcctattagattcatttaatctttctttttttttttttgaattttgcttcaaaattgtctaatatgtacttcctaaccatttctcaccattacaattatattttcactaattttgttttttcaattttgtatatgcacaaggtcatttggggtttatagggtcgtttaggtttatcaagacaaaccaatatgtacttcccaatcatttctttccattgaaattaagttttcactaatttcatcattttatttttgtatttttgtgtatgcacaaagtcattttgagtatattacgctgtttactattcttttatttataaaaaattattattttttttggtcttgcttcaaagcagtctagtatatactttcacaccatatctcgccattgaaattaagtatttactaatcttgtttttcaattttgtgtatccacaaggtcatttcggtatatgttgccttcttttaagttatttttttttaaataatcttttttccttctggttgtacttcaaaattttccaataagtattttccaactatctctcaccattgaaattaacttttcactaatctcctttttcaattttgtgtatgcacgaggtcatttgggctatattaggtcatttgttaatttttttttactcttttatcctttttgttatgcttcaaaatacttagataaatacttccatgtcatctctcgtcattgaaattaattttaaaccaatcccatttttcaattttgtatatacatgcatgagatcatttgagcacattagacaacttgttaattttttcaaagaaaaattaaatcttgtttccttttaattttgcttcaagacaattcaatatgtacttctcaatcatctcttgccattgaaattaagttttttctaattgaattttttcagttttgtatatgcagggtttgttttggggtatattaggccatttgttaattattatttttttttaaaacaaatagtcttttttgctttaaatctgtctaatatgtacttcccaaccatctcacgccttggaattaagttttctctaataattttttcagttttgtgtatgcactaggtcatttagggtatattaagctattttctaatttcgttttaaaaaattaatattttataaatccttaatattattatagataaatacttggaagataggatattagagttgcaaaaatccaatgtgacttgttgaaatgactgttaggtttatacctaagtttcaaactccctcctttctttccttctaatatctttgtcacaaaacatagaaaaagtgtcttgacatattttataaaatggaagagaaaaggatattagatggttttgtatctccatcttcatctcctccaacacctccttctccacttcccattagtgtgggacccggaaaccaaaaatacttcttctcaccctctccatctttatcgccacctttctcaccaccgccttcttcaagtcatgactccacggagcttcttcaccttttgcaggaagagaagaagttacctagtctcagagcccgttctgcattctcgttggatcttgtagatcccgacattttggattctaaaagctcatgccttaaagacttgtaagtaacatcttttctatctcactaaagaattgaaatgacactaagagagcaaatgttatgaatgatttagttcagagtcttgttttggaatgtaaatgccacttcctcattgagaagcattagtcttaagtctttacatatgtttttgcatcaatagaaaagagaataatagtaagtttcaattcaaagcatgcacctatccatcagtcaaactaattttaagtcaaacacataacaaaacaacatatagaagagaacaatctttctctaaagactggtgggctgatatcaacaatcaactgccttgaacacttcaaaattaacaactaaattaaatatgaatatttttctgtgttgttgaaaacaggttagaatggtttatagaaagatgctgcaacatttgctgtaataagtctacttgacaatgattcaagaagaaggctactatgaagaaaaagctattctgccaatggattctaaaaccaccaatcacttctaactttactaactcagcaaaaagaacaagagatgaatctcaaggcatttgaaattagcaattcttttcttcttcttcttcttaatttttgtaatttacaccaaggaatgaatgatgatatcttcatctgaaaatgcaatgtagaaattattcttaatactgttatttgcatcaatgaattaacatgtttcagattagccaacccaaaagaatcaaaccataaagttcatgaaacagcagattaacacaattctaaagtctaggtagtattcatccatggcatagtttatattaataagaaataatattgatgagtgattagcaacttaaggctatctaccatgacgtgtcacattaagtaaagtaaattttgctgttattaattcatacattatggaaaacacgaaagatgtgcaaaatcatacagaaattttgtaaattagaaactttagcttaatttacacatacaaagtttgcttcaacaaacgaggcttctttgtatcaacccgaatcgtcggaatcatcagagtcgcttctgtcaggctctccggcatttgtaccagcatctggaacatcgtcaggttgtgctaccggtgaaggagcagatgatttcttattagcatcacgagcatatctctctccgtttttctctggtctagccacttcaacatgtgctatactttgtcaaggaatagttaatcagaaagacatgaaaaacgaataacaatacaaaatccataagatataacattaaataaaaggatatcaacagtttcagtatgtccaccggccgagatattgagcaaatcatcctctacccgacgcacaagctcaggctgaaaatgaagaaaattgaatcagcaaagagcatgaatagcattgaaaaagttgcataatgtaaattaagggggcaacaagagaagagattcatacatttagatccggctcccttcggaatcttctctttcttgcatctctcataggaggtgtgagaccatgcctgtactccactgcatctggagcaggatcatctggttctctaaccataatcatctgttcatacaggcaccttaaaaagttcatacaaaggccttaaaaagaaagaaagaacaaactgtgtctgggactgagactgactactgtacctgaccaacatctgctgtcttgattaggacactatcatcataagttttgtaggactccacaacacaagggagatccaatagagatgcagggaaattctcatttccaatcacaaatgtgccagtcctaccatcatctgcaccaaacaattaagttgaaattgtaaaactacaaacaatgagctcaatctgctgtcacattgcgccttcttctacgactgcaagagaatcgtggaggctttctagggtgaggagaattccttcatggagactttaaatcgtttcttgtaatttgtttcagttactagaagtggtggattgtaatgtgttttggtgtaacctagagtctaacaaaggctgctcatgatctggataaatggggctcctcaagctcagtttcgggttttgtaagtttttgggaggtgaatccccatgtgttcaccaacattttagcttctttccaataaatttgaagaatttcagcaaaaaaatgacacccatttactaaagctaatcccttgattaaaacaacaacataaggtggactatggagccattgttctataatcatgataatgggttttcaccaaaaaaaagtgttgaataaagaccaaattcaacacataattttatcaagaaaagttaaatatgttttacctttttaattcatttcaggggaattgaactctaaatcactcactcacccaatctaatacaacttgagatagccctaaagttgataaaagaagctagctttatagctttatgtgttctttgagcagataaaaattggggaaaacaatctgaaacagtattacatattttatcaacttgattagaaaaagaagcaggaatcttttgtttgattgtaaagatgaatactttatagaaagaagattgagattattgtaattaccggtaaaagacaaatccagtgatggtgaggagttggggtcagaagaagaggaggaaggatcttcattgagaagacgttcaatacgctctgcaacagatggtggaaccctaagaatgaattgctcctccattcaattcaattcaat

SEQ ID NO: 34724 - DNA, 2265 bp, Cannabis sativa
tcaccccttatgtaagtccttgaaccttgtcaatctttgcttcactgatgacttgttatcttttgcaaaggtaatccttccttttttggacattattcaaaaagctttcgaggatttttgtttctctactagcttaacagctaatttatcaaagtcatctatttactttggtggtgttgacatgagatgtaagaagcaaatgttaaattcctctaagttgattgaaggttcttttccgctgaaatacctagaagttaacttgagacctactaaatcgaaagactctgattgtggaggtattgtggagaagatccataagaagttacatggttggatgagtcgccacctcttttttgctggtagagctctgttggtccaatcggtcttcttgggaattaggaattactgggtgaacatctttattctcccacaaaaggttacttctgaaattgacaagttatgtcgggattttttgtggggcaagacgggtaatagaagtaagttgcactttatctcgtggagtcaagtttgcttgcctaaggactatggaggtattggttttatggaaggtaaaaaagtagaatattgctctcatggctaagtacatctaggccatagctacttaacaagactgtctttgggtcaaatggattaattgcatctatataaagaaccgcgacttatggacatttaattcaggagctgacacaagttggtattttagaaaactcatgaaattgggaaatacggttgataaagttgaattaatggcagctggttgttttgggaattaaaagctaaagttttttttatctctcgctcatttcaactgagatagtgacttaccacaagatagcttagcacaaattgaaggttctaaaacaccgatttactctttggcaatctgtcaatgagaatcttttaacccaagatcagttagctagattcatcactatagattctagtcttttcttggtttttgaactagttcccgaatctcatcattatcatcatcatcttttgtttagctgcgtttattcgtaaagggtgttggctgagatttccacctagtttagtggtattggttggacagcttgtctcaacaaatggtttaaggactcggaaaagaaagagaatgtgctgactgtggtggcttcaactattattgctgctgttgtttatttaatttggtgtaaccgcaacaaatgtgttttcgaagacgcttgctattcagtgaagacgattagcaaccacgttaaatatccctttaaggctagaattcattactgttattatttgaatctttagttagttgagaaataactatgcaatggttgttattaatagcctttgaattgttgtgtagctacttggcagcctgtttgtgttagtggttgatagaataaaaattttctttcttttttcaaaaaaaaaacaaaaatagattataatatatgttagctaaaatattatacaacattattttattgatattatatttagaagaactttaatttaatggatacatgtcaagttctcatataagtatattaattaatgagaaattctatatagagtgaccaaaattcaatttaattataaagatacactcttttattttatttttatttctctgacaattatttcttttgtttttcttctcttaaatagagaaggaacatatagatccattttctttcattcaactatttttctttcttcttttttttttccttttgactttttgtttataatattaaaaaaactttgcatctctttttttgaactttaaaaattcttttcaactacttggataattatttgagcttaaaagttacaccattacgacctactctttaatgcaattattttattgaataataaaaagctttattcaatcaaatgtgtaatatcaagattaaaatagtatttaattttttcttgggatattaatagtgcgaggataattatctcatttatttatattattagtgagtagagattatcgcttagagtagttgtaccaattttctaaagagagttaaagttgtattaaagccgcatatgaaaatccattagggtttttaacatatatatttattaaatttagttaattgtataagtggtattaaataatattattatttaattaatgttcaaaaattcgaaagtttagagaaattcgcaagtttagaaactgttttactaaaacgaccaaatctggagtattataactcctatattgaggtgattccagtggcgttg

SEQ ID NO: 34725 - DNA, 1351 bp, Cannabis sativa
gacctgaattctaagttccataagtactattgcttatctctctcatgcctcctcactcactcactcactcactagacacttattctattttattcacaaagtctcataagtctcataagttctgaatctataacactcagttctaaaaactgtactattgaagagagccatactaagaattatgaggttcaagcatgtaatttgtgtggtattatctcaagaattaatacaacgaaaaggggagtaggtcattacccactaaaaaggggactgaacctctataaatcccggtgtcacttttattatttgttattattatttacacgtggtgattatcagcaataaataaggctctaatgtcagttgactgaattcctggtcaatattttggtgctttcattgagagctatatttgattttcatcctgatcaatcaccattgttctaactagaagaaccacttcctcatgtcttcctcaagatgccatcacaactgatcctgatgttcgtgttcctcccaccatggaagatcccactaatcagactaatgctacaaaccttgtaaactttacaaattgtattgattctaacagtcctgtaaactttgcaaaccctacaaatcctgccaatactgttaatcctattaatcctgctaactagtgagtgctaacgatcaatctttgctgccaagaacaaatataccaacaactcctcaaacaaaaggccctattaacattgaacaacctccacaaaacacaattgaaactgctccacgatactatgcaggagaaatatggccaggaattggcaaaccaactattggtgagccttacttggaccttggagatgatattgagttggctaggctcagagaagttgtaggccaggtcacttagataggacaagaagaaccacaagttgctggttgtgatgcttttacccagtagagatgcgaattcctaaggtggatggatgactaggtggccatcctccgggcccattaggcggagctgagccatcctaatagtgaggccagtgacttgataaggcagttcaatgagagtacttctggtagagatcaagatttaaaaagagatcctttgcaaggaaggctcatcgacatgttaggaaggatctataggtaggtagacaatggtcagatagtccaactaggatcctcaaacacaaggatagatattcctttgcctgaagatggtaaaatctttctagacagaccacatggcaggattagccagaccttaacaccaagagatgttgcaggacaacaagagaactcaggagagagggcattaccaactggccaaaccctagccagccaacatagtaactcc

SEQ ID NO: 34726 - DNA, 2221 bp, Cannabis sativa
cactttaccgtaccaaagcggataccgcaaccaccacagcatacactaccaaaaaataaattatcatctgtagtgataatattttatttacaacataaatttttgtaactaaatattacttttaatcaccacaaaaaattatttataattaaaatataatatttagataaaagttgtcaataatttaattttaatcataataaatattataattaaaaacatttagtaacaacaaattgtgattttgtgactaatactattagtcatagaccttttatttgtaatataagaataataatttatatttagttataactttctcttttagtgacaaatttgttgtgattaaaaattaaagtagacaatactcaattcaatccaattgaactgaactgaatcgattcaatccaatctaattataaaaaattagatgttaaaagtttgattctaattagactggatcaataattggatatcaatctcaaattctaattaaaaacctgtaacaccctaatgattaggcatgctacagttctcttttaacaactgtgcactcctttgctaatcaaaggattttcttgaaaatcgtaataaattaaaacttttgattaacttttaacttttataactacaaaaatttaactacacaaatgttgggatcccatttttaaacttatttacacattcaaaatagactttataaacatgttgtacagcgactacaaaatgaagcccaagtcgtcccgagaccaaactctccaggtcgtaccatcttgacatgtacaatcaccttcaagctccggactcaatgctgctcagccttagcctttcctttacctttgtgcatcgttataatacatgctggattaatgtgagtcgttaaaacattcaactcgcatataactttatgttgttttatgagttgatctcatttacaactgctattttgattttcctttctaaagaaaaggttttcaattttttgactttatattgtccatagacaattttaatcaactatcctttcctttgtggattttttttttttttttaattttctaggtttgcaacataatatgtatttctagatgaactccagttaatatacacatatacatgcccctcaagtaattttgaagaatataaactttgtaattacttgaacaaactttaactctattaataataagaatttacatcttacagagataaatacaatatttatattttgcagcgactggtaataaggccacaaatgttcactattctagtagttcttaattagcaagccgttaagctgagttaatttataaaccccgattcccactactgcttcaataatgtagggtccttcccagtttggtttaaacactccagcaaatggatctcatgtgtttacaaatacttatcttaacaccaaatctccaacattaaagagtcttttcttaactcttttgttaaagtatctcgtgattcgatgttgataggctacattagttatttgtgactcattacatctttcttcaagtaagtccaaggataggctcagaagctcttggttttctacttgattatagaattcacgcctatgggtctcagtattagcttttactggtagcattgcctccgagccaaatgctaacgagaatggagtgtgtcccgtcgctaatttctctattgttctgtgagcccaaagtacttgtggtagttcatctacccatcttccttttgcagcatccaactttttcttaatagtatcttttacggttttattaactgcttctacttgtctaattgcttggggtcttgatactgacgagaagcttttgataattttattcctttcacagaattcagtaaacacttcgccgtcaaactgagtcctgttatcagatactattttgattggtattccaaatctgcaaataattttcttgacaacaaaatcgagaacttttttgcaagttatggaaactagaggttcagcctatgtccactttgtaaagaagtcaactgctactacagcgtactttgctcctcctcgccctgtgagtaatgccccaatcagatcaattccccatattgaaaatgggtatggcgagatcattctcatttttaatggtggtatgcgaggtatatgtgaaaacctctggcacttgtcgcatttcttgacaaattcatgtgtgtctttgtttatcgttggccaatagtatcattggcg

SEQ ID NO: 34727 - DNA, 988 bp, Cannabis sativa
atacgtttggatttgaatagtatattagattgttcaatagaataaattattggtgtctataaatatggatgaactataacagcatatgtcacacacactattcatcacatatagcttaatctctctgtttctcatcatgatggttttgtttccatggctctattattctctcatcattgtcttcaatactattacttcttcttcttcttcttcactttccaactccttatcaatttcatccatggcggcttcttcttctttgtgccatccccatgaaagctctgctttaatctactttaaaaactctttcaccttctacaatgatacatataagtgtaaggaatttttaggaatttttaggaattaacaatcctaataatacaatttcatgggacataaagagcaagaattgctgcacatggagtggagtcacgtgtgatgatgtcacaggtcacgtgatacgtcttgatctcaaatgcagtgggcttcaaggcattcttcactccaacaacactcttttctctctctctcacctcgaatttcttattctctcttataatcattttgatggctccacaatttcatttgaatttggtatgttttcaaatatggttcaccttgacctttcttactctggcttcattggtcaactccctattcaattatcttacttgtccaatttgcttacacttgacttgagtactgagcattatcaaattgatgatgttttgagtttggaaacatctagctggaaaagaactgttgccaatctaacaaatctcagagaattgtttctcggtggtgtcaatatgtcttctacttcacctgattcctttatgaatctctcaacttctttgacatctcttgatcttaggttgactaatttgcaggggaagcttcctgaaaatgttctcagtttgccaaaccttcaacaactcgatttgagttacaacacaaatctcgttggttcatttccacagtataattg

SEQ ID NO: 34728 - DNA, 1305 bp, Cannabis sativa
ttttttttgtcttttgtctgtatacactccctgtttgcttatttttctttttttagactattttactgttttactattagatatctataagaaacagaaagacagctcttttttatttctttttgcaacaagttttgttttgccccactttttatttcctgtattgtatcattcttttaattattatttgtgtattttaaaatggttgagttgatggaggaaagtgtgtgaagggatgcaataaaattaaggtgttggctgtgtggaccctgcctgacccaaaagtcccaaaccctggtccactttgtgttttttaatagaagtcttagtacagtgggttgtataaatggttctgggtcctgaacctgttatgtctcatgtgatctgtgggtctaatcttaattctaaaactctatgccgatccaaagtgtaccgtgtgcagcccgtgttatactaccccactctattttatgtttacaactctatacatgaaaaattccataaaagactttctagtagtatttgttaaatttcgaaaaccaatgaagtaacaattttatacagtaatactcttctttaactttaatcacgttgggactatttattcaaaaataataacaaatcaaattggaatattgagtatatgtatcataataatatatatatgagtgcactattaataggtattatttatgaatggataaattttagttttaagtttaatttttctatataattagtaaaatctcttacttttatattatatgaattggggttgttctatcaactagaaaaaaaaaattaagaaaaaaagtttttcggtaaaaaaaaaataaaaaaagttgagtttgacttaaatattttatatctacatatttttgatgtagtgtaaaatgagatattttttgccattttttttaattaagtagctaaactaagtatagatattaaaatttctcttttattattggctaattcagatttttaccccttgaacttctaaggtcgttaaaaatgtcccatgaactattgagattgttggatttaagggcttttctctaatttcattcaattttactattttagtgattatttatgtactaaatcacgctctatagactttgatatttaccaaatcatgtctctcgaattttgacatgtattaaattatgccccttgaactttctctcatgttagacttttttattaaaattaggaaaaaaaatatttttaaatccaacaatctcaatagttcaatgggcatttttaacgaccttaaaagttcaggggtatgatttggtacat

SEQ ID NO: 34729 - DNA, 1248 bp, Cannabis sativa
aaccacccaagacctccaagacacacactcacctatggccacttgagctagctagcctcaagtggtaattttacaggatatcttaaataactataatatatacccgactataaaaaaaattagactataaaaattttatagatactgaaacagttaagggttgcatcaatacatctattttaattaggtgtattttaaaagcacttaatatttttttttttttgaacaatgaacaaacacccaaatagttaatatatataaataaattttatagcgtggaatctcttacaaataggtgtaccgatacacccttttcgtgtttttaatattcagatggttttaattttaatttttttacatcacaatgtatactttagttatttcagttatcttataagatttttaaaaaggaagaataatttgtatcgaaaataaaatttaaacagttatatatatgtgctactcttttatttatccacatgtaatttgaactttactttttctatcgtaaattgttttaaattttttcaaaattttattcattaattacagaacatgacataaacaagccccgttataattttttaaagctactaattatttcacaaattttaaactaatatataggaaaattttacgatacatcctcctaaaagagatatattgatgcacctttatctgttttaatatccgaaaagtcctaattttttttatgggtcgtgtacgttgtaattattttaattatttaagatattatataaacttatgggaaattcgaaaaatttaacacgtttaaaataaaattcaaatagtctattgcacacttgtctcttttattttatacacttatcaaatcgattgtttgaacacgactttttatattataaattattttgcaaaattttacaaaatgcctcaagtaactataactaaaaactaataaaaaatttgactaaaaaattctcaaaaaggtgcatcagtgtgcaccctttttaaaataatacattataaaagcacccatatatataaatttatatatttatgtatatatggagcgtctatgatagggtgaacttccctactctaccgggcatgcaataccttattttctcgcacatatgtaagttatgattttaaaataagtgctaattacaatctcttattataattttttagtcaacttctacattcgaaatcacatgttggaatatttttgtataacagtaattgttatagttataatatcat

SEQ ID NO: 34730 - DNA, 3344 bp, Cannabis sativa
gctaaagcggaggagccgtgagagcaagcaggtgaagattgtacatgtcggggcggttacgcctggagcgtacgatctttgagacttcaaggctttcgctgatttgttgctaggcgacaaaacttttatttatgtgtatagcaaacttttatcaatatattttgtaacaggatcctagaattttataaatgtaatactttaagtttctaagtcaataagaaaattttaattaatcacgttttcattaatctcgtggattagcaacgagcagcacagtacgtttaaaatcacgttagcatgcctaattagttagggtgttacatttttgtatttgacaattattgatgaactagcattaaaacatttccatgcattgtgtctagagtacttggttaatattatttatatcgtgcacttttaggatctaaaaatctttttcattattttttaaatatattgaaagatggaaataaaaaaaataactacaataacttaactgtgttgggcatagtggttttcttctagtatcattgaatttcatttagaggtgtatatgataattgtgttacaaggtaagggtacgtgtgatcaaagaagtttgtctttatttcaaaaaagttgaaagttggagccatgaattctcttggctttggttcctcaacaatttaatcaataaagggtgagctgttcaacttcacccttttgatttccattgctagaagatgatcagggttttagatgtgggagcccgcagaaaccttttcatcatttgacttttcaatttgtatgacattttcactttttgactttttttgaagattgttggcgagctctacaaaacaatcctctttgtagttttctactattttcgctgacatattcctttcctatgtggcattattattagttacctaaagggtgtccaacattatacatgtgttgtattgcaattggcaggaatagaaattgagcggggaatgcacgcccaaccccatccccgctccccatttatgctcccatccccgccttgtcccgcttaatcctcaatatgtttggagtcggagaatctccattgggtatggagacttattgggtatccatgaatattaaaaaacaataataataaaataatgtaatgtaatgtaattcaaaatgaaaataaaaagagtttttgaatttgaaataaatattttatctaattttatattctataaattgtaaaatacatacataaacataatcaactacatatattaatgctaagtttataagtaataacaaattaaaaaagatatttataattgaaattgatacatagaacactatattaaaaagtatttattatgatagtattaagaaagatcaatcatcaactttgttgtcaataacacaaataaatatttagaatattatatggtaattatatattgggattgaatataatttttatctctagcaattagttagtggttctccatattatttattaaattaaattatgtgtgacttgatattaaaatgtactaaaaacattatatactcttgcgtgtcacttagcattttttttctatgagatgcttgcccaattcaccctctcccgtcccatcatccttttctattttcttagagagtaagtgatgtttttcttcaattttgcattgccagcatgtagttacttgaattattttgtcatctttttcggttggttattgtttggagggaaaaaaaaatgaattaaataattaaaaaaagatttatagccttcaggccaatgtaaaaagaagcctattagattgaataagacttatgctcaaaaaaaaaaaaaaaattaaaaaaaaaaatagcttaaaagcctataaaaaattagatagtaaagataaaattgcagagaaagtccaagcccgatcaaagccaacataaagtctgaattaaaatataaaggactgatagcacttgaaatcgtgccgagatagaacaataacgacaccatgctaagatagaccaaggatggcatcgtgccgagataggccaaggacagcattgtgccgagatagaccagggttggtaccatgccaagatagaccaaggacaacaccgtgccgagataaaccagggtcagcaccacaccaagaattttttttaaatactctttttttatgttttatttacaattttacgacttagagtttttatttatagaaatacacttttaaaattttaaaattacaaaaatacattttgctttagcaaaaagtaataaaataactaaaaaaataattaaaaattaaccttacaactataaaaacaactacacataaactataaaacaactagagatctcatgataactataatacaaataaattataaaacaactaaaaaaaattattattttgaatgaaaagatattttggtaaataaaaaagttcaaagaataaaagtaaaaaaaaattcgtgctgaaatatttttgtaattttttttaaaaaaattagtctattttatatttttttcaatttattattggagacatataacaataataaattattttattttgttagttttttttataatagtttttgttttttgaataatgattagattacattaaactaaatcatccaaaaccaaggatgcaattacaaaagatagggagtccctactaaaaatacggtcagcctcagaaagagaagatcgcgctaaggcatgcgcaaccttattagcagaccgcttagcaaaattaaaagaaacaacatcaaaatcagcaatcagagtcctacaatcataaagaatatggccataaggggaagccatacgtttaaactgttgcaaatcattaatgacccttaaacaatccgactcaactacaacatgtgaccatccattcgctttactccaagaaagagcttccttgataccaatggcttcaacaatatgaggttgcaaagagccttctcgagataaaattctatcctccaagaccattctggcagcagaccttgcaatcaaacctagaccataccgcccttggatagagaatagtgcaccatcgacattaactttgacgaaagagaaatcaggtgttgtccattgctctacgggtagtgcattcagacagtttaaccttgcatccatgacattatgcttttgagcattaaaccattcaacataatttaatttttctattgtcactacctcactcgcatcagggtgcttggagttccaaaccaaatcattacgatgagtccaaactgaccaacaaatcataccagcctcaagagtctcagctgcggtacacgatgccaaaccagcttcaaaccaactcgagaacaacatcgcatca

SEQ ID NO: 34731 - DNA, 2700 bp, Cannabis sativa
taaattagtctaaagaaagaaaaatggtaatattaatgaaaacgatggcaacaagagtttactgaattatcattttcattcaacaagtcaatatgcgtaaaagaaactcatgatcatgaatgctaaagatattgttattatgcacaatattccactctcttatagcttgtataatttattgatactaatgccaatttgtatttgagctttaagcataattttctagattaaataaatacagttctcaaaatgatcaaactttctaagacaacaaaaactaatttcctagaaattaaaaataaagaaagttgaaagattcaaacttcaaaacctcaaatcagtatgtcattttcactaagaaaattttcttggctgaattgaatacatgttttggaaagttgaaaacagttttcttctctattgacttttaagagtgaagaatatgacactaaattctctttgccattataaaagagtgaataaaataacccaattttattcagatcaagctttagaaacagatcaatcaacaccatgaaaagagtttcacaaactcatttctctgttcttcttcttattcttcttatttttgtttggcttccattgaagattgcttcttcaccaagaacacaagcagaggctctcataacatggaggaacagcttggtgttggaaccatcttctatggattcatgggacagcaacaacatcaacaatctttgcaactggactaatgttgtctgtgacggttccataggagaagtctctcaaatagacctctccaacatggacctcaatggaacattggacaagttcaacttctctccattccttaacatcaccgtcttcaacctcaacaacaacaaactcactggctcgataccaacaaccattggtaatctcaccaagctcactttgttggacttgagtgaaaattattttgaaggagaaattccaatggagataagtcaattctcagagcttcaatatcttagtttggacaacaattatcttgagggtccaattcctttccagcttagcaatttaaaaaaggtatggtacttatcacttggagcaaactatttggaaaattcagattggtctaaattttcaagcatgccttccttaacctaccttgatctttataagaaccactttagttcaacattcccaggcttcgtatcaaagtgtaggaacttgaccttccttgacttgtctgaaaacagttggactgggtcaattccacaatctgtattttccaatcttgtcaaactcgaatctttcaatctcacagataacaaatttgttgggacatttgtcatctaatattttgaaactttctaagctcaaacaccttcatttacacacaaatttcctcaaaggtaaaattcctagtggaattggtctcctacatgatcttgaggttcttgaactacatgaaaattcctttggtgggagtattccttcttttattggccaactcaaaaatctattacatcttaaaactttggatctttcttataataatctcacgggtccaattccaacttctctatgcaacctcaaaagcctcatcttcttttatgtaaataacaacaatttcactggttcaattcctttagagattggaaacttgaagaaacttaaaacactagatctttctaagaaccatctcacgggtccaattccaatctcattatgcaacctcaaaaacctaatcactttttatgcagataccaaccaactatcaggagtattgccagttaatatttcaaggttgagtaacttggaggagttagctatttttactaataatttcactggttcaattccttcagagattggaaacttgaagaaacttaaaagtttggatttttcagcaaccatctcacaggtccaattccaacctcagtatggaacctcaaaagccttacctctttttatgtaaataccaaccaattatcaggaacgttgccagttaatatttcaaggttgagtaacttggagcacttatttgcctttaccaataatttcataggttcaattccttcagagattggaaacctgaagaaacttaaaagaatagatatttctgagaaccaactcacaggttccattccaacctctttatggaacctcaaaaacctcattgtagtacattgttttgacaacaatctggttggaaccatcccgccagagattggaaatctagaattcctcacaagttttgatgttgacaccaatcaactatcaggagagttaccagttaatatttccaaacttattaacttgaaggtgttcaatgttcttggcaataatttcactggggaaatagatagagactttgggaaaaacaatcctcatttgaacttcgtcgggtttgctgacaacaatttcgttggaaaactaccacaaaatttgtgtagcgggttcaatctagagtatttgggtgtatataacaacaactttacaggaccattgcccaagtgcctgaaaaactgcaccaaattaaatagagtaaggcttgatgggaatcgattcacaggcaacatcaccaatgcttttggtgttcacccacatcttgattccattttcttaaacgacaaccaattcatcggccacatcttaagtacgtggggacaatgccaaaatctcaccacattacagatgggtcataataaaatctctggtaagattcca

SEQ ID NO: 34732 - DNA, 933 bp, Cannabis sativa
  modified_base (763)..(765): a, c, t, g, unknown or other
ataaaagataatctagataattcaaaaaattaaccagatatttattaattttttaaaagttagttatttaaatttaaattatgagattagaaaaatgataattatttatcattttatcttattaaattattatttttttatattttaaaaataacataattttgtaaagttagttgataattttaagaagatatttagggttgttgcaaccttaattttcaaattatagatttaattttaaattattattttattttatatttaataaattctataaccaactatcctgtatagttacatgtttattgatttattgtttattcaaaactttttttttaataaaattattacttatttgatttaaattgccatgattaacttgttgatagatccaataatctaattttaatcatagtctaattgtcaataaatgaaatacataatttgtaacggacaaattttgtaatcttctttcatctatgaataaagttagtaacatgatagatctatccaaattattgtgtgtctatacaagccgatatgtttacttttgggtctagatgcatatagggagcccatttaattttaataattaaaatagactagcttccaaaagtaaaaggatcactttgatagtttttatttcggtccaattagtattggacttatttaattaataacaattgtttatttaaggttaaattcctcttttttgggttttgtgtaagagttatgggatcattaatagtgggtacgacatacnnnacccagccctccctcacatgaataacctcaactgaaggcccattatcttatttaaattattgtattaggctaattatattagtttaacctaattaaaattgattagcaatataattaattatcaaaatatataaatttaattttatcggattattttgaaattaattt

SEQ ID NO: 34733 - DNA, 1135 bp, Cannabis sativa
  modified_base (432)..(434): a, c, t, g, unknown or other
aacctattgacaattgaactattgattaaaatcagatcattgaatctgtcaacaagctaaccatagcaattaagatcaacaaataataagttttaaaaaataagttttagtaataaacaatatataaaacacacacatgcaacaaattagatagatggatataggatttatttaatttaaaataattaaataattaaatttattttcaaaaataaacaaatatataaaaattttaaaaaaatattaacatagaattaaataattaattttaaaattaaacctataaatttgaaaaattaggtttataacaaacctaaatatctattcaaaaatgccacctaacttttcaaaatttatgttatttttaaaagaaaataaactttaatgtctaataaaaaaataaaatgataaataaatatcatttatctaatnnnataatttaatttaaataaaataataaaaatttgaaagttgacaaaatatctagttagatttttaaaattttcgagattattttaattaaaaaatatatcttattttaaatatcaaataaggtcattttataaaattaattaaagaatgcaaaatataaaatatctcactttatattttaaagataagataaaataatcaaattttaaaaataagataaccaattaagcaaaaaaaaaaatagattttatctattttcaagttcaaaatctactaatatctaaaattaattaattttattctgataattaggtttgagatttgaaaaataaaaaatctaaatacaaaattacacaaaaaatttgaaattatttccttgaaaaaaatgaaaaaatggaaaaattttgcatttggtgcggatggtatgcaccgcgcgcgcacctgggagtgaatggccgagaaagctcagtgctggaggctgccagcagcctttccgcgcacggatgtggggttcagacaagcctcacgtgcgtgttgtctcgaacaaggcttgtcctaacatgcgtgctgaccgagtgaacactcgggtccgcgcatgcacgtggagtgatgccatccctgatatttttccaattttcaaaaaattataactaattcaaataaaatgaaaatcaagttgtgtaaaaaaaagtgaattgcttaa

SEQ ID NO: 34734 - DNA, 1578 bp, Cannabis sativa
cctccttgttctttaagcttacacatcttctcccaactaccccaatgaattttatgtttttttgaagaagcgccccaccaaaagctagcaatcatactttcaatctcatgaaggatacccttagaaatccggaagcaactcattgcataacacggcaaagcttggacaattgcctttattaaaatctcttttcccgcttgagaaaaaagccccaccttccaaccttggagcttagcttccacacggtcacggatcttaccaaagacttctttcttgtttttccccacaaaggtaggcatgcccaaatatttggtgtgagtcttcacaagagaaactcctagattggcagccaaggcctccgccagctcagtagaaatttttcctcccacacaaaggtttgatttctccaagttaatactttgccccgagagctgagagtaattgtagaggacttcctttaaggccaaactttcttcaatactagcatttaggaacactagactgtcgtccgcaaagaggagatgagaaagtttatgctccaaattgccgaaccgcagcccatggatctgtccagccctttccgcctcatgcaacaaacaagataaaccttcagagcataataaaaataggaaaggagaaagggggtcaccttgtcgtaaccccctttccggggtaaaattgccttgaattgagccattaattaaaatagaaaaggaaacagatcggacacaattcattacctttgagatccaagcctcctcgtatccaaggcatgtcatcatggcttccaagaagtcccactccacacgatcgtatgctttagacatatcaagcttgagagccatttttttcccattcccaaatctacctttcctcatacaatggaggctttcaaatctaaggatagcattatcttgaatgaggcgaccaccaataaaggcactttgattagaagagatagcattatcaaggctccccttcattcggttagcaagacattttgccaccactttatacacaacattacacaaacttatggggcgaaattcagacattttagtgggctgctttacttttggaataagacaaattagagtctcatttatgctacgacaatccttattcagatttaaaatttcaagacaagcttcggtaacatcgggccctacaatatcccaatgtttttgaaagaaaaaactcgggaggccatctttcccaggagctttcaatggatggatttgaaataaagcattcttaacatcattctcatcaaagggctcaagcaactttctattttcttcataactaattcggtttgggacacatccatgcaaagtatcatataactcaacccctcgattggattttgaaaaaagattctgaaaaatagctaatcgctatctccgtaatcttctcaaaagaagattaccactgttggtgctcatcaaacagcccatagatagcatttttcttccttcgttgagacgctttatagtggaaaaatttggtgtttctatctccatgtttcagccaaagagcacgactcctttgtttccaatacacctcctttttttcctc

SEQ ID NO: 34735 - DNA, 1123 bp, Cannabis sativa
aaaaatatcaaatttgatatgtagtgtaaaaatctctattttcacacattaacaatgtgggactaactcttaataaaatctgctgcttgttggacttatatcccttcaaccattgaatgaatgttttttctccttaaaataaaaatgcaaatatcattagtaatactgaacacaattataaaaaaggaagctgttgtggggtcatagggttgagatggaatctaaggggatgtggtgcacatgagagcgggccaagtaagctctcacgtcacgggtggatgagatgaaatgagacgatgcgtttggacacaaagaaaagaaagaaagaatgaataactaaacaagctcaatgagtttcaaactaaagccacaccaaggcattggacatgtcaatgatttgattggactcttttttctcctctttctctgcacgtggatttatcagctattcttagctgtctgtcatataagatagatttttggtttttattttgacaatttcacattcaaaacccacttcccatcacttctattaattccttcccatgcttcctcttcggaagcaatcactcaccattcttttattcatttctaactcaatacttgatatttatatagaaatttacatcatatattaatttttttttgaaaactttaccttcataatttgataaattaattttttacatttatactttttctatttaatttttctttctttttcactattctttatttattcaaacttttttttaaaaaaataaatctctcctttatatattttttaatcagctttaattaattttttttaactcaattactgatttttttctctttttttcttttctccctctatttctcttctttttttttttcaattctctctctgtttttttttttttatttttttcctcaaactatgtttttttttattttttatatataaatatataataataagtgtacatttttatatctcgttttttaacactttctctctctcacaaaaaaattaagaacactcatcttatatttttctatcttttacctgattaatatcttgttatttttctattgatttatagttatctttttattaatttatagttattttcatgttgtt

SEQ ID NO: 34736 - DNA, 1525 bp, Cannabis sativa
cgaattaatttatcaatttctatatatattcatgtatcacaagatggttgtgtgtgctgatttgatatgcggtgcaaagatgtggtgaacaccatggaagtggggaacgaagcgatctcatccatttttttaagtctggtacggtacgagtacatgtttcgcttgagatttgattgtgggtgtcctcattgattcctttcctgtgagaaagtattggaaactacttctacttttaattttttgtgtatgtagtaattctcggaactgggtagttttattttcatatcataattatgacatttttatggagaaccattttagctcatatgtggttaatttatgcgaaaattgaaacaaaatgtatgtatttggatctcatataactcatatatttatatcttatgtatgtataatacaacacataatattcttctcaagattatgattatttctgggaaattctggtgggcttattattttctccttggtagtttctaattggtattaatcacacatttgatataggaaatgaaaacatcatttatgtttcctcgggaagtgaagtaaagagctttgatgtccatctggtaaccattcttgctcttggttttggtattattatacgtttttctattggtatcctgtctgttcacattaacatatatcgtttatctttatgcggaatttgtgatttgatagtagtttttttttttttattttaacaaagtatgttttgttttctattaagtttgtaggcaatttattttgcaggcctcctcttggaagccgttggagacttatgaatataataaggatgagataaatcaggtataagttcattctcttacactaataatttgagaggaaaaaaatgagctagatttgtgaatttttatttttaagtgatctgattccgcaaattcttactcatggaatcataatcctgttcttgcagattgcttgcaacttcaagtcttcttttcttgcagctgcagatgatggtggcgatgtcaaggttcttaccatctatttcactgataattttctgttagtgttcatcaaacaataaattttagacattcttatcagcaaaaaaaactgaaattgtagccagggaagtggtgtatcatcttactgaggctattaaggtcaattggtagtacttctcggttgaaagttttccttttacttttatctggtcatatattttaaatggaaatttaactaggtgcaccgaatttaaaggctgattggactttggatgtgttttttaatcattgtcatgctagttagaaaatacaatttgtctttgtaatctctctctctcttcaattctgaaattatttggagattatagacagccagacattttggtagtgtttcttctattgtgatgctgtgctcattaaaatacctgttgcagatcatagacattagccagaaatgtctctataaaacattgagagctggccatacaagtgtatccttctagtagatgtaaactcattatctttaacttcatcaa

SEQ ID NO: 34737 - DNA, 2665 bp, Cannabis sativa
aacataaatgacttctaatcttttattgataaaaaatcagattaaattgaaataggttttatttagggcataaaatcccaacattactctcataagcctatatagcttctatgggatcctctctcacttgccatgcagcatgcatcaaaaaacatccagaaatgtaatgttattaattttttccaaggaatgtgatcagacaagcaagagcaaatatttcaaaggctaaatatacttcaagatctgctcggttaaggctacatcaggctaaactaagctggaaagtccccatccgtatagacatctgcatagggacttggggaaaaaatttatcccgatttttgcccagttgacatggcatgtccatgtggacaagatcaattccacgtgggagtacaacttgtcaataagaaggccaagtcatcttctaaacacttcagctgacgagaggtccaagtacataggcgggatgaagaaatgatgaactagctaccctaagggggttgcccggccctatggctagcatgggtcggccagcttccgaacattttagggtcggccagcttgcacctggtaggtgcatggccgaccagcatgtacctggcaggcctttggtgcgtagccttcatccggggacaacaagctaagttgcgatttgagcttcaacaacccacgataatagagggaaaatatcaattactcccttattcttgagggataattaactcatttaatgcttattatttaattatgtaaataaggctttattttccagtttttaagggatattagtggttaatcttcatgtaagctctactatataaaaagcaacctaaccctaattccctaagttcttaatctctaagctctaagtctgaaactcaaactctctcttctcttctctctcacatgccctaggcaatctctctcacttgagatttgccaatttgattctcacattgcaatcttaagagacgcacttcagatttcacaacccttgtgatctgaatggtattatctctggtattaatacaaccaaaaggagagtaagtcattaccgctaactcaaagggccaaacctctataaaaatcttgtgtctcgtttacttttatgttcttattgtgtaacacatagcaaacatcaataataaatacgattctgctgtcggttggcaaatttaaggtcaacagaatgtcttcatacgcggagtgatcaatttgatctgatcaaggaccttgaatagggggttcagattgagacagtgtcaacagaattgtgggatggtggtggagaagtagaggcatcgaccactgggtgatcaaaatcggtggcggtagctaatgtagttgcttgagttcacaccatcattgagttcttgatgaagtttcaatggagttcttgaagagtttctactgataccatattagttggaaaaatatagagaaactaaattttattattatcaattaagtttacaatggcaaggaactaatccttatatagagaaggattacattataattaactaacaaccttgtaacaaaaataacatacaataacaaaaaataacggtctaatggaaacaaaactttgtgctaattcaataacacgtgtttggcaatctttaaattactgtaatggaattgaagttgctcgagttggtctaagtggtggacttatgttactttagaaaaatgatgtggatgttacctttctcaattacgactccaacttttttgattgctatttaaagtttgaagatgaaccaagcttccatattaaaagtttctatggtgctcccaacatcaataatagatcaacttcctggacattacttaagcgcttagcagatgttggtcctctttctccatggcttgccattggagatttcaatgaaatcctgtccaactctaacaagtcaggaggtaatctttgaaacgaggcgcaaatgactgcatttagaaatattgttgatcaatgttgtcttcatattgccccttacaaagtagaccctttcacttagatcaagaaccgttcagccttggatactattaaggagtgtttggactggtgttttgttaacagtcactaggaaaacaacttcactactccaaccatgcatcatttggattattaccaatcagatcaccgtgcaattatggttgtctttaacacgcaatcaacaacattcactgaggaaaaatgaaggagcaggttctatttcgaaaagctgtggctattcgatcctgaaagccaagaaataattagatccaactggaatatatcgccttttctgatcctattactgctgtcatttgtagcattaacacatttgctgaatatctacaatcatggcatatttgaaaatatggaaaaatgaagaagaacatcaatgattgccaagacaaagtggccaatctgaataatattactgcctgcactagtagtgatttatatgaattgtagcaagctgaagcaattcttgaagacttgctagaacaagaagaagtctattggcagcagtgttctcgagttgattggatgacgaatggtgatcgtaacactaaattttttcatgccaaagcaccagcttgcagatccaacaacataatttgttggatattattttaccaggatcttcgatctactcacaagtatgtttat

SEQ ID NO: 34738 - DNA, 1225 bp, Cannabis sativa
ggacttggatgaaataaacatataaatgatcacatgaaccaaatgatatactaaataactaataaaaataattatatttctttattgataattgaatttaaaagattatattgaaatataattttatttaggtcacaaagctcaatacatccaaggtggcactaggcgtcattttaggcacccacgttgatgtatgtaaacatcgagcattttggcatattttccaagaatgtctgtaatgaccgcttgattttattttgagaattagcagataattagagtttaattttagaattagacttttaattattattttcataattatagagatttatttgaattctagttgtattaattatggcttatgtaaaatgttatatttttcatatatttatgcctagtaacagtggaatgcaacgtttgacctatagagtcacgtagatatagtacagtaagttagtatcactactacaaaaatgagttttttcgacatttttaaacagttgtttaaagtatttccgttagtttctataaccgtcgctaatgtgggttttccgacgattttaaatcgtgcctgatagtctgattacgttttttaatttttttagcaatagttttttttcagtcattacatttcaaaattagggaaaaaatagattttctgtaattttttccctgcattaatttataaattttgtacaattctgaatagccacaacaattaaactaacgctattattatctaaatatatttaaaattatgtatagtcacaataattgaactaacgctaattaatatcatcttaatatatttaaaaatctatagttaagttaacgctaattataataatctaaatacatttacaaatctatgtagtaacgataaatctagatgtatacacactgactaacacagtaactattgtcgctccgcttctgctttcacgtaatgaatccatcgatcacgcataatatttatctcatcatttgtatacggagtatagaacttatcatgtcgggtcaacagttgtattggatcttgtacgatcatgaaactttcaatgaatttcatgacgtagtatccacactgtttgtggtcaggttgttgaggacagataggagtcatccactgggttggtcaatcaggtcgtcctatcatttagttatacatggtgaatgatctacataaaaagtagattttattagcatatataaatttataaat

SEQ ID NO: 34739 - DNA, 1705 bp, Cannabis sativa
ttttatttttttaatttttttaatcacaaaacataaaatttgtgttttaaaaaaatacaaatatatttggtaatcttttttattttttattttttgattttatttaagttgactctatgtttgaatctgaaactgaggtcgtggtcggactagggccaaggctggattctaggtcccaaaattcaaaatagtcgcagttcaaaatattgattaagaaaaaaaaaaacagtttaaaacaaatttaaaagtaattttttttgtttttaaatttttaaaattttttattctcaattaaaaatttaaaaagtaaaaacaattttatagtatatatttttagaaaatagtaacacttttttaattaaaaaataaaagatttaactaaaaaaaaatattaacaagcacacctttaatagaaaaaatatataaattttgttttattagagttaaatttaagtatacgtaacttttatgttttttttttttatttatttaattttaatcaaataattgggagggagatgatcattgtaacatttgtataaatataaatagttgagtgatattgaagtattttgatttggtgattacacttttttaagtatgtgtatgtgtttggagtgtgatttaattaagcgttacagataatatacatgtaaccctaaattagttattagtgataattaccccaaattagttatttagggttacatgtataataataattattatgttttggagtgtgatttaatagtttatttgcactttatttttggcaatgtctatttagaattttctgaaaattaatcaattgttttaaataattacaacatacgtacacagttataaaaaaatagcttaaaattttgggatagttacataaggcactattttttataaaaaaattatatttttacatttaaagaatttttttttacatttttacgatttttttttttatagaaattaacaatacgaaaataacatctaaattacatcaaaaaaaaaaataaataacatacagataacaaaaaataaacaacaaattaacatgagtacaatataaaaagaccgtattttctatatataaaattaaaaaattgtaaaaatatttaaaatttcgtaaaatcatatttttgtaattttttttgttgtttttgtttatttgtgaaataattcttataaatttttcctattaataccaatataaataggagtgtcaagcaaaatactcctttaagaagatgtactatttaaaaaatacaatttgataggagtaaataaatttttggtaaaaaaatgtaataaatatttaacaattaattttataaagccgcccatgcatgttttgttttgttgggcagattcgagtttttgtttttttgcaaaaatatataataacgtgttaaagtatgatcaatttatattttagtccttatatcatgaaataatataatgatacgaggggtttttttaggtacttaggtacgttgtataatattatacgtatagtattatattaaattgtattatatatggtaataatttttatgaatatataaatatataatattttagtataaattaaaatttaatggtttatttgttaggtcgcataaaataagagttgtagggctcgtttggaacgccgtattaggtcgtattatattgtatttattgtattatattgaattgtattttatgcaat

SEQ ID NO: 34740 - DNA, 2628 bp, Cannabis sativa
ttagattaaatgagtattttttttcgatctcacacaactttcacgggttcgacctcgttcttcacaatttctacactacaataaagatttgtgtacttgcgagttgataaatgtaaaatgtactctttcgatcacaataagtttttgtcgtcgttactggggaattgtaagaaaaaaaaaagtattttaatctagattggtataattcttctactagttattatagtatacctattatattatgtttcttaataatgaagtaaatcttatatacatataaaattattcgttattattattattattataaatttacagtaattttacgttattgtaactttaatatatattttattgttatattattatatatatatataaagtatattattattatattgtaattatattattatagttatatataataaagtatatatattattaattataattaataattaatatttttatttttgctaaatatttaaatattcaattttaaatttctgcacttataatatggtaagcaccgattcctaattttatttatatattaatattaatatttatacttctgttatatgtacaattatttattttctgtctttaaattttgcactttatattaattaatatttatacttctattatatatataattatttatttctatatttataattctatctttatttatgcacttatatggtaggcatcacctcctaattttttttttttttgtaatcttaacttttgtgatacttggtgcatgatttgctgtgaacaaaattctaaaaattatttcatcaaaagaaaattttcgtgtgttgaaattaagattaaaccaaatcaagtaagaagaaaaaattacatcatgcattatttttcctaaaataaatactacatattttgagctgaaactttccataattcaatttttaccatctttttatgggttagatagagagaatctctatacatccatatgaaatattttttttagaaatttgttctactttgagattttaatttttttgtatgaatctgttaggcttagactttttctaatctcattaagaggtaagtctaaagcttgattaaatttactcccatcctgatccatttctacttgggatgaattagttaataaatttttgtccaaattttttcttatgtctaaaattgatgatattaggagagaaatctacgaattttatcagattgatcacgaaaatttttatgaatgttgggaaagatttaaaattttattgctaaaatatcgacactatggttttgaaaaattgagattggtaaaatatttttatgttggattatctccttctaactgtcaaatggtacaatcaatgcacataggagtatttttacaatttaaagggaaagaggcttgggagtctcttgagaatctttttataaattcgcaacagtaaaattgccaagatcctaaagcaaaagcttccaatacacctaagagaggtggaatttagaagaaaatgcaaatccatcccgtgagtatcagagaaggctgaatttaaacatgaaagaggtagttagagatgagatgcttaaataattagatgtgtgtattatataccctatttttcatagttcatgagtcaatttgatccatgttgttcctaagaagtctagaattactatagtaaaaaatgcaaataatgaattaattcccactaaaatccaaacttgatagagagtgtgcattgactatagaaaactaaatagcctcaccagaaaagactatttcccgctacccttcattgaccaaatgattgaaagattagttggtcacgagtattgctattttctcgatggttattcaggatacaaccaaatcctaattgcacttgaggatcaataatgaccacttttacatgtccttatgtaacttttgcttatccacacatgtcttttgacttatgcaatgcacctgcaacgtttcaaatgtgtatgattgtaatttttctaatatggttgaatattttttagaaatctttatggatgatttttctatttatggatcttcttttgtctataaataataattagtatttatgacataatggagaaaaaaaattaaaaagttaagaaaatacattgttcttattaaaggaattacaaataaattagattttaaataaatactttcattaaaattattgtgataaattttatgttgaaaatatttagtttggatttaattttatttgtgtttgattgagaaaatagcaattgtgaaaataaagaaaagaaataaaaaaaaaatggcaaacatgttaaccaaagccataaaaattagcattttcgaatcccaaaagagagcacaaaggaccaaatcccaataggccgatatttgcctctccagctgacatcaggtgccccatggaacctctaaatttgtgcgtagcagtgcaggccctacgtgaaacaggtaacaggcgcctttgtccccctcccttcctcatgtgcgtgtggcgcgcacggcccctcctgggcctttcgtttgctcgtcacgctaaccacgcgactggcctccatttgacccaagcccttcagcccaaaattgcttcaaccactatccacgtggct

SEQ ID NO: 34741 - DNA, 1274 bp, Cannabis sativa
gactgcagtagtatcgacgaagagttgcgtgagagggagaatcagatttgatgatgaggttgagaaattacttcaaagaagggttgggtctcgagacttagagggagactgaagaattgtgtttgtaaggtcgagaagttggttttgtggttcgtttgtgttgaaggtggtcggaggtgacttgttggagttgtgcgagaaggagaacggaagagagagggagtccggttggaaatcagggttacagggagaaaaatgtaaaagaaaaagaagaagaggaaaaaagaaaaaaaaaggacaaaaaatatttataattatttttcataatttttaaattactttttaaaatatttaatctaaaattatgtggactattaaaaatttgctacgtgtatacttgtgtacattgtggcatgtccaccatggcacttaacagagtcttttaaacagaaatgataaatagctaacagaagtgaggctttttacaactaaaaaatcaatttatgtagttaaatgtcactaatcataaagttcaggtagttttgccgccaatatttttcactaaaaatttgtcaggtgtacactgtggcatgtccaccgtggcacttaacattatattttaaacgaaaggagtaaatagctatcagaagtgaagtttagaggattttaccattaaaaaatcaatttatatgattaagtggtactaattagagtttaagtaattttgccgtcaactttttttatataacatattaatattttagacatttttattttactttggtcaatctctcatcctttacatttttaactagtatatttttatgtaatttttttacttatcttttttgtttttttaaaataaacgaatctccgcaaaaattactcatcccattgaaatattccccactttactctcaatataaaaatgcaagaagcagagttaaaaattaaaataaataatagaggtagagacaggggagcactacacgccctgtttctatccctactagaggggtaatactattaactagctaagcttctaactacaaagtaaatgtgtgaatatcattgtcacaagcacaacctataaattaggaatttacaaaagcaaatagtgaatattttaataaccaaaaaaaaaaaaaaaatagtgaatatttttgtcattccttaagtaatggggtcccatatgttagatatggtctcaaccttttatggttttccaaattgtgggtgttgacctatgaacaaaacgacgcatagaggactta

SEQ ID NO: 34742 - DNA, 2980 bp, Cannabis sativa
gatggtttgtcgatgattctgccttgtgtgtttaattttcttatattttgtttcgaaatagtatcgatataccatcgaaaaagcatcaaaaattgtcatctcttacctatttactctaattatcgagaagatatcgatatataatcgaaaaagcatcgataatcaattaaaaatcttagtttggcgagaaaaccagatctcgccattcgatgaaaaaaccagcaaaacaataccactgcaaacaacaatgacacagatctatcgaaaataaactacatgctaatcatatttaagaatttttttggacaatatctactaattattgaggtgaatgtgtataattttttttgatgataaggtccggccattcactaagataggtcaaaagattgagaaagagtgagctaagatagagagtgttagagagagaaaaatagtcaagtgatagagagaatgagagccaagtgatagagagagagagctagttgatagagagtatgtgtgattagttcaatttttttttaattaaccaaaggataaaacggagaaaatatttaaataaaaaaaattattttatataaattagttgagaatttaaattttaataagaggtatttttttttaagaatacaaaataaaatttcccaaaataaatcaaataaaatagggtaaatactattttggactttgtattttacaaaagttatcaattagactctctattttgttaaatgataaaataaaccttatattttcttaaatagtaaaaataaggtcctaaacttaattttcgataattttatttttaatataatcaatttgatggcaatttttaacaccggtagatacataaaatataactagttttattataatatttctagatcaaattattactaagttttattttgacaaaaaattaatttaaaattctatttgtatcatttaagaaaatataaaatttattttattgaaacagaaattttaattaataatttttgataaactcaaggaaaacacgttttgccgctcttaactacaatatgcaatatggttggttgattgagaaccgttaattatgtatacatattattcccaagctgaggccttctttacttgattctctcttctctatcttcaccagaacagaatattccatctccttccttctatgaagttaagctcagaccactcttatctcttactttgctaacctacaacaacaacaacaacaacaacaacaacaacaaatatggctttagcttttaatggcttaaccccacaaaccagagctctgggcttttcatggaggagattggttccttcacaaacgcaattctccacttgggtttgtcttccaaagaaaccaattgcccagaaaaccatttcaaattccgctgctaaaacctccgattcaattctctctgtctcagatgttgagtctcgccaaattgaggaggacaacactaatggaatcactcccacttccacttcgactactggtatgatttattcaaaccccaacttgaaatttttacggatttttttcgaaataatgtaaaagcaatagattttagatattttgtgtaaagattccaaatttcaaagcctatccttttggttttcattaatggaaatataaaaagcaaaggttttgaaggaaaataaaatttgggttttggttgtttccattttagatggaagattgtgaattaaatcaatatacttgaatttaaagcattgtaaaatgtggtaatttgttaatttgattatttatctttgttttatgttttaagcgtggatggaatttgccaaaaatgtatctggtgaatgggatgggtttggagctgagttttcaaatgaaggaattccaattgagcttccggaacgtgttgtaccggatgctttccgggaatgggaagttaaggtttttgactggcagacacaatgtcccactctagctgatccaaaagacaatgttgtttcatacaggttgattaagctactccctacagtgggatgtgaggctgatgctgctacaagatttagcatcgatgagaggagtgttggaggtccagatagtggtgtatttgcctttgcttatcaaccaagtggatcttatgtggctgtctggcccattgatgaaaagggttctcataatttgtttgagttggagcattgcttgatcaatcccgaagatagggagtctcgaatgagaataattcagatactccgtgttgagaatgagaagatagtgttgcatagtattagagtgtttgttgagcagtggtatggaccattcagaaatggggatcagcttggtggatgtgccattcgggattcagcatttgcttctactcctgccttaaaagcttctgaactggttggcgtctggcagggtccagctgcggttgctaacttcgacagttctcaggttttgagttgtgaacatattcatttattcttggttatgtttgaattggatcccaatttataaatccatgaataggttcactaaccgctaatgataatgttgttggtttgagtgtgtgcttgggggttggcatgtagatatagtttgcatagactaaaaagacagtttgttgtgtgtgtctgaaagatatcttagaaaataaaattatccatccaaatctgaacacatagctatgaaattcctcacaggaaacctctttattgatgatgaaataaaagaataatctagccttcaagatgctagtatctccaattacaaccttttttcgagagggctgctctctcctagagtctaatctcttctatttccaagctagtctaaatggggttgccccctctctatttataagcataggtccaatagaattaagacactaagaccactcagcctatgtacataaaagacttaagtatttcatttaacccttcgaatcaagatctccagttaaaaagtaaagtcccagttaaatcaatctaaatttgacac

SEQ ID NO: 34743 - DNA, 5169 bp, Cannabis sativa
actttaccataaatccatgaaagaaaggaaagagcttgcacatatcttggctcaaattctctcaaccagaagttagaacaaggaagaagaacacaatgactatttggggtctttcatggggaagcaagaaggagttatatttggagctaggaacactacaacaagtatattgacttggattcttaagctaagattgctaacaaggggtcataaaattctatcaacatcagttttattctttttttttttggttaataagcctgtaaaaaggggaagaaattagaaagaaaaaaagaaagaaagaaagagcaatacacacacataatcatcattggaaaatgtggttgattggaaattaaattgcagagtttgttagtttggtaaaaaccagagagaaattttattgaattgaataatctgaattgatacaaaagagttgaatctatatatagtacaaatccactatgactaatcctaactaactgttaacagaattaacggaaacaactaacttaacagcccccctcaagatggagtgtagagattttttacacccatcttcgacaaaatgttgttgaatgaggcaggaaacagaggcttcattaggatgtcagcaaggttggctttggaggagacgtgacttagcttcagtgatccattggtgatcttctctctgacaatgtggtaatcgatttcaacgtgttttgtgagttcatggaagacatgatttttctgatatgtggattgcagcgttgttgtcgtagaaaagaacaaaaggcatgctgattttgatgttgagttcttggaaaagggatgtgagccatgtgagttcacatgtagcattagcaattgcacgatattctgcctcagctgatgatcgagaaactgttgctgcttttttgatttccatgaaatgagtgtttgtccaaggaaaacataatatccagatatagattttctggtatcgatacaagctccccagtcagcatcagcgaaagcttgaagctggagtttgggaggtggggaagcatagaaacagaggccttggcctggtgaattttttaagtattgaagtattctggtggcagccaacatgtgaggttgtctaggagattgaaggtattgactgagtttgttaacggcaaagcttatatctggtcgagttatagtgaggtataaaagtttaccaataagacttctatattgagttaggtttggaaggagttcccctgaggtattactgattttaatattgggttccatgggagttgaagctggtttagaaccgaggcatgcagtgtatttgagaagttgtaatgtgaatggcctttgggatgcataaattccctttgagcatcgggcaatttcaaggccaaggaaaaaacggagggggccaaggtctttaagcttgaatctggagtcaagggtggaaatgaaggaatgaagagcagtggtgttgtttgttgctacaattatgtcatcgatataaatgagcagtgcaaggaatacactagattgatttcttgtgaaaagtgaatggtcattttgggcctgtttgaagttgtgttgtaataaggtattgcttagagttgcataccattgatgtgaggcttgtttaagaccatacaagcttttggtgagtttgcaaactgcatttgttggtaaatctccttttggacagtaaccttgggggagtttcatatagacatcctcatgtaattctccatgcaaaaaggcattgtttatgtccatgtgatgtagttccaattgttgatggtagcaagagcaaagagaagttttaatgtgttgaatttctctagaggagcataggtctcaaagtagtcaattcctggtttttgagcatacccttttgtaactaaatgagattttcacctctcaactgaaccgttaggattatatttaatcctataaacctatttgtttccaataacatgttgattaggaggtagtgggacatgggtgatttttttcaagggcatctatctctacatccatagcattgttccaaattttgtattggcaagcttatttatatgatgtatgtgtggagaatagattaagagcaagtacaacaactcaaaaatcaggagaaaacctgtgataagagatgacattagttaaaggatgttgactgatggtttgagtgacaaagtcacatttataatcattgcgatggataggtttttgaggttcacgacctgatctgatgggtttagagataataggttgtttatggataacattagtgttgttgggaggggtgacgtgtggggtagattcaggaactgtcatgtgatctaactgactgttggtagtcggttttgtcggatagtgaaaaaattgatcaatgctgttgttatgggaaatagttttgaaaggatagatactttcataaaaaacaacatctcttgagtggaatatgttgttagtttgaatgtcaagtaaagtgtaagctttcatgttgaatgggtaaacaatgaaaacacatgccttaactcgaggtgaaaacttggttttatttatgactattgaggcataagccaagcaaccaaagttgcgaaggtgtgcataggatggtggtttttgatgtagtaattgatatggtgtgttgtctttgagtaagacagagggggttcgattgatgaggtatactgcagtagtcactatatagctccaataaaccaagggtatattagatttgatggcaagggctcaagcagtgttgagaatatgctgatgttttcgttctactacaacattttactgtgatgtgccaacacatgaattgtagtgaaggacttcttttgtggcataaaatgcagatagattcaattcttttgcattgtcacttctaacagcttttatattgattttgaattgattgagaatgaaagtgaaaaaattttgtatagtcgagagcatcagctttggattttaaaagatataaccaagtgtgccttgaatggtcatcaactatggttataaattatttgtatccttcaattgaagggattgaatatggaccccaaatgtccatatgaataagatcatattgcaacagttatattgttgttagatggaaatggaaggttttttgttttgcaatatgacaagtaggacaattaaatggtgttgagattttagaaaaatataaacttttattgattttattagtaacaattacagatagatgtccaaggcgtgtatgtcattgaagtttatctagatgaatgttacaagtagtaattggtgagcctttattggggattgtctgctgctgtggatcataaagattcccaatgcgtttagctgtcccaatcttcgatgtctgagaatggtcctggatgtaacaatagttacctgtgaaatgcatagaataatttctatgttgtaataatgtatgaacagataacaaattgtaatggaactgtggcacaaataagacattgtgcaaagtaatgcagctgttaattttgacagtgccaacatgttcaatttgaacttttgtgccattagggagagtgacatatttatttgtggtgttatgagtaatggaagaaaaacaagatttgttacggcaaacatgatgtgttgccccactatctataatccaagaaaagggggaagtaatacctgaaaaatggttcatgacaacattatcatttgatgttgaagcatcagttaaaggttgaagttgttgtgtcaacatggagatgagttgttgacattgtgctgaggtgagttgagagggattgatatcaggtatgttggtagaaacttgagatgttgggggaaattcttgcttgaggaaccaggattgggtttgcgagttgtagtgttgtcattgggttttcgattgccataaccaagtgggaatcctgagaaagtagcacttatctttgtagtgacctggtttttgacaattactgcaatggggacaaggccttttgtttttagaggctgcattagcagcaggtgtggaatcgggtaaggcagattgggtgttggttgcagcagcaacaggtggaagggttctttggcctaaagttctttggcgttctagattaatgaccatagaaaaaacttttttaagagaggtacaaggatcaagaagaagaatctgatcacggattgcatgataagattcattgagaccctttaaaaattaggcaacctgatcatgatttaggtgatcttgggtctgaattgcagcagcacaagtacaaggtgttcttggccttaattggttaatttcatcccacatagcagtaagtttagtgaagtaggcactaatggaatcatctcctcgatgaagataggtcaaagtttcattcaaatcaaaaattcctggaccattttcttgattgaactgattgttcaatagagtccacatttcggatgcagtctcaagatacatgatgcgacttttaatttcaggagatacaaaatgtaaaatccaagacataaccatttgattacacctaacccaagaactgaacaattatcattagggggaggttgagggatagtaccttcaagaaatagagtcttatttcgtgctccaattgagagtttgaagtcacgtttccaaggttggaaattacgatctgtgaggacaggggttaccaacgccatgccaggatgatcagagttgcttaagtagtatggagattgaatgtcttcatacggaggtctgtccaccggagttgatcgagaaacagggacagagtgctctgttctgggtggattgtcagcggaatttgttgaaggtggtggtggaggagccatgggagcatcagccactggagggatatcagtggtagtagcagaactagtggctcttgttctaaccattattgaagaagaaggaaggattgaagatcagtcgagaagaagaagaaggaatcttgaagcttcaatttgaattcttggagctttgatcgctttctattgataccatgttagtttggtaaaaaccagaaagaaattttattgaattgaataatctgaattgatacaaaagagttgagtttatatataatacaaagtcactataactaatcctaactaactgttaacagaactaacggaaacaactaacttaacagagttgataaaattacatttctctaaccaagcctaagccta

SEQ ID NO: 34744 - DNA, 1745 bp, Cannabis sativa
gtatccttctttcacttgatatttcagttgtagaacagtgttttcttggttgcattccaggacctctttcagcttccattgtaattcttcatatttacaattgattgaaatgtataattcattcgatcatcaaatttttcattgcaaaagactaggaatggaatgtcttctttttcctgtgattttgaaattattattagtgtaaggcaacaattttgaaactgttttgattctattattgctaatgttagtaatgtatccgaacattttttacactgatttttataacaaataaaagtatatttataaaatatcatagaaacgtacttctatttcctttcctctgttcaagtcttgtatttccagttctgaaccctatttttgtcattttttgttttattgctattattaaactatgaaaaaactgaaatgcaactattacgaaacgtttaaatttatcacacgaactaaccatttgtccaagtgttttctctttttctactgtccaaaattaattcctgcaaaattgaataaaactattatgaaatgatgatgcaactgtaaatcaacttgacaaaacatggaacttaactccaattaacatagttgttgcttgattttattttgaaattataaaaaaaaaaacgactatgcaactgaatgtaagttatatgtattggttatacatgatttggattgattgggaattcctaatcttttcgttattttagatcagttcttactaattgtgaaccctgtgtttttcatcagttttatttgaatcagatcatttttccaaccattgtaaaactaatatgcaactatttgcataaaacttaccatgtataactgttatttgttggttcccatcaactaaaaaacctgcataatatttaaactatataaaacgataatgcaactataaggcaaccaaaacaaaaaataaacagacttatacgtaacatgttgtaccttaattcgaatttttctcttcttttatcgtgtttttttttttaaaaaaaatgaattccacattgtaaaccagcaatcaaccaaaatgcaattgtatataacgtagatacattattcatgagattttttaaaaaaatttcacatcataccttgttttggattcgaggggagctccaaatctgttttgttacagatatacattgtatgaatctggatttcgatattagaaggagttgttttgaacgggtaaaaccgtaaacaaatgtataatttcagtttcttcctagtttttctggttttttttttcgtaattttctgtttagatcattgcatgtcttcttttccagttgattttcgtcataattaatggttgcatggccctcgttttggtttcattctggttgtgttgctgatttgatcgatggaggtttgttcatctcttcatcgttcgtttcgtgcaacttaaggtttagagcatgtggtatttttgtaaatatttgggtgtgggctgcataaatgtttaatgggctagctcatagtattttgtaatcttttttcctttttttcttttttgtatttttctgtttttttttcctttttcttatttacttttctttttaaaaccagtagataaaatttatgcgttcaacaaaacaatataatctaattaacgaaaaaattataaaataatattccctacaattgtattctccaaaataatatttccctaatgttttgataatgttgacttcgcttttagccaacgacaatga

SEQ ID NO: 34745 - DNA, 1537 bp, Cannabis sativa
atccaagttcaaaccaggaaaattctgcaattattgtaaaaaggaagggcattacaaatcagagtgttatcttctcaagaatgaaataaataaagaaggaaaatctgatgttggagaagctggtttagtgtcaaatggatatgaatctggtgatatgctggttgttagaaatagtgtgttcaatggagattggatattggattttggatgctccttccacatgtgtctaaaaaaagatcttttcagtaactttgaagaaatttcagggggatcagttctgttgggaaacaacaaggcttgtaaggtgtaagggattagatctattgtcatcaggatgcatgatggtgtttcttaaacaattacaaatgtgagatttttacctgatctaagaagaaacttgctgttaattggagttctagcttccaatggttgtactgtgaagattgagggcaacaaaatgaatgtttttaagggagcaatggttgttatcaaaggtgagttgaaatggcttttattttatcactggtaaatttgtggttggaacaacagccttagtttcaagtaaagaaactaatctcactcatcttgggggatcaaagccagaaaggaatgatcaagttatcacaaactgactacttaaacaaacacttgaaaattttgggatggacaactcaaatgcagtatctacacccctagctcctcacttcaagctctctcaatctcaaaatccccaaactaatgctgaaaaaaggctcatggagcaagtgccatacaccagcattgttgggagcttgatgtatgccatagtctgcaccagatcaaacctggctcagtgagcagatttatggctaacccaggaaatgctcattagacagttgttaaatggatactcaggtatattaaaggcacactaaacctaggaataatctacaacaagcaaatagaagctgttgaagaagttgcaggatatgttaacagtgactatgctgccaacatagacacaaggagatctctaactggactggtgttcactatttttggtggagcagtcagctggaaatcaaacctgcaaaaagtagttgctcttttaacaatagaagcagagtacatgacagttgttatagccttcaaaaaagcactctggttgaaagatttgacagcagaacttggcttaaaatctaacaacataactatatactgtgataatcaaagtgctttccacttgattaaaaatcttatgctacatgaaagatctaaacatatagacataaagtttcagtttattagagaaatcgtagctaaaggagaggttcaagccaagaaaatcagcactgatgacaagacaaccctgctgatatgttgacaaaaagtgtcaacttgaccaagcttaaacattgtttaagtctactcaacatatgcaagtgctgattcctatctctatgttcaaatctgctacacacatcatattccttctaaaacctaaaatgactaaactaaggtggatttgtggtgttttagttcaaccattttatgtttt

SEQ ID NO: 34746 - DNA, 1190 bp, Cannabis sativa
attcagtccacgagtttaaattctattattgttaaagaaagaaaattatgacctttactatttattcttgttagaatattaactgtatattagttgtaaaaattaaggtaacttgtatttagtagtttcccatttagtctcctagctttgtatatcaatatatgttattctatggaataaaatgtacaattctcttcaccattgtttacatggtatcagagccactttagattcgaaattcgaaatttgggctgtcacaaaaattaggatttatagttggagtttttcttttcttaaggggttatttttcgaaaaacccattcggagtacttttcaattctcactgcccactcaggtaacttacccaggtgctgatcttaaaaaccccaaagactagtcactggaatctctgcgggtggggctcacgtgcagcctgaagtttttgtgcacatccccatgcgccgacacttggaggcacgtgtgacggtgtctttgacgacgttctttttctggttcttctaagcctactcgcatctatcttaagttgtaatttggtattttttttttgccttcttcgtgtttgggtgttcattctttgggttagcttttttctttttctcttttaattgtttttgcttttaagattatgggagagatcaaattagattcgaaagtagtggttgtttttgatgtggttctcgtgatgtctaaaatcacggaccatacatttattggttcgaatcatttggaatggagtaagacgattcgactgtatctaaggagtattgacaaagatgatcacttgactgacgattctcctaaagaaaagacgattcaaggaaaatatagctccgtgaggatgctcgcttgttccttcaaattcaaaattttatcgatgatgtggtaattagtttgattaatcattataaatggttaaagaactaatggattacttggagtttttgtattctggcaaagacaacatatctcacatctatgatatttgtgaaaccttttatcgtgtggagaaacaaatcagtctcttatgagttactttatggcatataaaaaaacatatgacgagcttaatatgttattgccatttagtcctgatgtgaaggttcaacagcgccaacgatagcagatgactattttgagttttcttgtaggactctcatctgaatttgact

SEQ ID NO: 34747 - DNA, 1876 bp, Cannabis sativa
  modified_base (30)..(35): a, c, t, g, unknown or other
  modified_base (728)..(731): a, c, t, g, unknown or other
atatttaccttatttatacaaatttattannnnnncaaatatttaagatattatatagttataaatatataattaattacatattatagaatttgtatttaattaattatcatacaataattatataacgagggtcccgaggctacctaacttccttctgaactgcaatgtattttgagaaacttctaagcaacattatataaaaaaagagaagtgacttctcatactttttttttttccaattaatatatttttactatttatgatactaatttaaataggaacttaattttattttattgtacatatacatataaaatggcactaattatgtttttattgtaacataagttttattaaaagcacaaagttgaatgtatacattttaaatgcatactattaattattgaataaaataaaaaaaaaaatattcatattcaaatatacataaaaaaaaatgctacttacacttataatttacttatgagttattaatttattttatttagttacaaaaaggtattttgtctttgaattaatattttttattcaagtaaatataattaagataatagttttttttatttgacttatactgttagcgatatttggtaacacttttatttttaaattttttaatcacaaaaataaaagtaagaattgtatttttaaaattttgttttcaaaaaataaaattgtgttctataaccacttttattttttaattnnnnaaacagaaaataaaagtgtattctataattttcatttttatttttattttttaattttatttaagttgggttcaagtctgggtctgagattggggttgttgtctgagtctgtgactagggttgggccagaatccgaatcccaatgtctagattggggccaaaatctaaagtattatttaaaaaaaatttaaaagtgatttttttaatctcatttattaaaaaattgaaaagtaaaaacagttttataaaatatgtttttggaaaatgtttttacttttcttaaaaaaaaaaaaaaactgattaaaaaggtattaccaaacacactcttagattttacaaattcatttaaaatataaagttcattttctttttatttagtttaaattgaaaaacataacacagtaggtataattaattattatgcaattgttttaatgttatgtcaaatgttaaaaaggttgtcctaacaaaatatatatatgaaaaaaagaatttgaaaaaataaatagagcatgtactttaaagttaaatatttaatttatttcatctcttttaattttcaaataaaaaatataatacaatatgtataattatgcgaatagttcaatatttatcttaacaaatgcaaaaaggattttttttaaaaaaaaaacagtgttttaaagttaaatatttaattcaaatgataccttttaattttcaaaaaaacaaaaaaaataattttacaaaaaataagtcttccgctaaattaaattgttaacgataaaaattgttgatggtgcacaattagttcatatgtatttagtaattttggtttgaaattacaattggtaattgttcaataatttttcttatagcatgaaagaaaataagtattgaaaaaaaaaaaaaaaattgagatgatagacacattacaattgttgtaatttatgattaacaatatgtattttgcttattccatatatctaatatttattattacagaacttcttttagaagatccatattttttattaattttacaatacaaatgtcatattttatattatctatgtatatttagcaacctaacaaaattaattatggtagaagaccgcgattagttcctaattaagaacggtacaaaacatgttccatatgcccct

SEQ ID NO: 34748 - DNA, 1000 bp, Cannabis sativa
atataaaatataaataaaacaatgaaattatatacagttagtaaatataaattattatattatatatttttaatatttacattgaaaaatcaaattaaattaaaagggtgacgaggcctaattcaataaaagtcttcatataaagttttttttttttttttttcacacaccacacgatattattaataagatattttttttttgttaaatatcttgttaatatcggctcattggtttagtgactactttaaatttgaatgaataaaatatcgaagaacatttaaaaacctgtaactttgaatttctttaatatcaatactatattttgtatttcagaaaaaaaaaatatatttaaaataaattataaagcttcctttttcaaaaaaagaaaataataaaataaagcttatatcggatatatgttaataaataaaaattcaaatacagatattttagaataaagataaaatactccttttacactctatatatatttacattaggactgggattgtaaattctataaataacaacacttacttaccttattattattatatgatcactggtatagtacattaatcatattagagtgagattaattatacataattcggggttataattagtttaattagtttcttcttcttatatatatatatatataaaacaataataataataatatatataataacaatggatgatcagaagaaaaatcaacgaagttcatcaccttcaagttcaaaggatcatgatcatgatcatgatgattgttcttcatcttcaaagaaaacaaaaacaatggagttgggaaactcaagtacctctcatgatcacctttcattcttcgtaagttaaatcttctttatctatatttgtttattgttttaataaattagtagtatcttttttgacattttaatttatatatatatatgcatgatcgtgttttaaggattttacttttctttagtttttaacgtttttgtttattgtt

SEQ ID NO: 34749 - DNA, 1761 bp, Cannabis sativa
  modified_base (173)..(176): a, c, t, g, unknown or other
  modified_base (981)..(981): a, c, t, g, unknown or other
atgataattccgtcttttggaatactctttggaagctaagtgttcctccgaaagtgaaagacttgttatggcgtgctgctactaactgtctacctacggaatccagacttcgttctaaacatgtgcctattgataccatctgccctgtgtgcaaagtaactgatgaaatcatnnnncattgcttggtggattgttctttttccaaagcgtgttggcaacagttggctgctagtgttaatttgacggcagttggttcttttgccaactggtttgctacggttctacaacaggcggataaggagaaaaggaggttgatcgcaatgacatgttaggcaattcggaaacatcgaaatgagctagtatggtctgataagtcccctactgttgtgagtgttgctcacttagctcaagctttactcgcatattggactcagactctagattcaaaatttaatcctacggatgcattccttactgttgtcgatggtgctgaaacttgggccaaaccagctgaaaacaccttgaagattaatgttgatgctgccatttttttttttggaagtgcaacttatagctttgcaggggtgtttagggatgaaactggcgcattggagcttttacctgctgtcggtcaggggtgttgcaacccaaaatggtggaagctttgggtgttaaggaggcactgagttatgttaaacggaaagattggaggaaggttgtcattgaagctgatagtcttactgtggtgcaagcgttacatagctctattctatggtttcatactttgggagtattatttctgattgtaagatgttgttaaatgacttgcgagatgtttatgtcaattttattagacgtttggcaaatagtgttactcatttcttacctcgagcatcttatttggttgctaatcgtgttatgaggagtagtgaggttactccagattttaatcatgtaatcactatggattgcaattaatanagatgatgaattttttaaaaaaaaaaaaaataatttggcaaaattgaggtattcaattacctatacaaaattaaagaaaaatactaattttttgacaaatgacctttatataatttataaaaaaaaatgtgagacttttatccaaaaaaaaaaattgtaagaaatatattattcaatatatataaaattataaaagaaaacacaaacttagtaatactctaataaaaaatatatgtaatgcagaaaaaaaaaattataagatgccaccttatttaatttgtgcaatcctttacataaaaaaatcaacatatatatatatatatatatagatataaatttaggtaaatttacacaatgcacttaaaattaaactttttcttttactttttaacagttttttataggtttttcacttttttttctagaaaaaaagtttttttcatgttgttttttcgtagtggcaatgtgaagacaacagaaaaataacaatctgtatttttgaaaaaaaaaatcgatgaaaagatatattaaaaaataatagatcaataaaagtaaatttttcgtcaatcttagccttttatgtatttacgaaataatctcataaatttaaaattttatgataagagcccattatggcatctccaatagtgtagcaaaagtagttttctcattggtctcgacctaacatatttagctaaatatatatatactagcaaaaagctacgtgcgaggcacgtctactaaattttatgctaatttttttatatattatttaaaagt

SEQ ID NO: 34750 - DNA, 1606 bp, Cannabis sativa
tacatgtttaatgtgcatgtttatgaatgccagttagattacaatgaaatagtgatatcaatatacgtagagttgtattggataccaataaatgtatgtttggctcatgtactaattgatgctatcacattggtacgactagagtaccaagtataagctcatattatggtcaataatactatcgtacgaacgatctagactcagtaccgcgtaggacgtgaggataggattacaattgagtgtatgggtgcctaattgtaattcggtttatatttatgttatgattatgtttttcttgctgagtctgtcgactcgcaattattgtttgcatgcgtaggtaagggtaaagctaaggctaaacagcagtgagtgcaagcgaatgaagattgtacatattggggcagttagaccgagagcgtatgatctttaagacaacaggctgtattttgtatagttgctaggcaataacttttgtaccgaatattttgtaactcagttgtaaatattttaaacatggaatcacggttatatatagttatttacttaggaatttaagagtaattaagtaatgttttatttactcacgattttcaataaacatgttgattcgcaacggattacacaattaatataaaatcatgataacatgcctaaactattaggttctacaatttggtattagagccaccacgttgtcttctaaagattatcacgacatgtacaatcatcatcatagataagctcaattcacagttcagtaagcctttacaactttagtagtttattttattagtatattataaggaaagcttgataggtagcatgttattagcctgatagctgcataggcgcctgttttaatttctataataagtggtaattagcaaattattcttgatctcgatctgaccaggctagttcttggttttgcaagctgttcaattagaatggaccccaagagaaacacaaaaagccagagaaatttggtcagatccagttgcagtcacggagttcagtttcccctaaatattcatggccaaagcaaaggcccaagaggcaggacatgcggtcggggagacgttaacccactacaagctgcctaggaatgggagaacaggtttgtagccatgaaagtcagaatcaatgaacaagacaaagagatcagacgtctcaggcagcagggtgctcctacaatgcctgctcttgtggtgcaggtggctcctgcccctgtcatgcaggtatggctggttgatgtggtgaatcggatggagccactatatgaaaggttctgcaagcaggcacctctagtctttctgggaggtccagatgttttgaaagtcaaaaagtggatgacgattgttactcaaattctaaactttattggtgtcagcgacaacgacagagtggcttgtgccacattccaattctaggaggatgccctagtttgatgggatatggcggctcttaatgccttagtttggtgggatatggcggctcttactcgggatgtcactactattacctgggaagagttttagaagctgtttaacgtaaagtactacaacgaggcagtttgtagtgcaaaaagtgttgggctttgtgccct

SEQ ID NO: 34751 - DNA, 1961 bp, Cannabis sativa
ttaaggtagtagaataggtgagtgtatggtaaagtgcacgaggttccatctccaaactaattggcaatgagaggagtagctcatgcatcttatatatgatatttagtttcaacacattatcaatgtaagcctctctaacatatatacttatatatgtccacattaataatttgattgtagaatgattcttttatgaagtctttcttgctagaaaaataagaaccaactaagtgtatatttccttgacataatgtagctagcaattgtcgcattagtaatttgtctaaaataattactattaatgaagcatttctttttatgaaaataggaactcagtgtatactcctaatgtatctagctattatccaaataaaagtttgtctataaaatgtttcagctgctaattaagtttttctcattaggaaacgacaatattagttaggaccttacttgtttcttgcatatctcattggatatggtctgcaaaatgcaatctaatttttgttggtaaggtagttattttcgtgagtctcattcaactcaatatgtatattgagtaaataaaaacatactttccatgcttcttttgtttctttttatccttgttttcgtattcaagtcaatatgatttggattttctaccttaatgatcacgttgctcgctgttgtgctacttgtgctgagtttatctctcgagttggattttaacaacttaatttcattttgtgcctcttctttcctcacaaaaattcgtgctctttcattgaactcgttgatgttcctaacatggggaccttgcaaatcatcccataattctccccctacagttgacaagtcagttgtgattccagcttgaagggctgttaattgaatgttgtcattcaaattcttgactttggctacagctgtactgaaacgacttaagtacatcttaagggattctcctagttgtcgcttggcattggttaagaaagatgcttctggtcgcctatctcttgcagtttggaactgctttttgaaatcctttgacaattgttcccaggaagttatggaatggttggtgaatctgtcaaaccaaaacttgcagctcctgttaatgaagttggaaataatatacatcacaagttgtttgaaacatcacttgctcgcattatggtattgaagttatttaggtgggcaacaggattagttgcactatcatgttgtgagacatgagggtttttaaatccttgagaaaatttcaaattcaaaatatcaggatggaatggttctgtctctttgtctgagtcatatcccggtagtttctcatattctccatcttggtacttcctgaacttatcttctaattgtattacccgcaattgtattggatccaatgacttttggtcagcattttgatttagttgattacgtaaatctggtgcattacaatttaaatgctcacttaggtcagactgcctttggtttaatcgcccgcggagattaggatcgcaatgtctttatatcactaaataagcaactgaaagtttttaacgtaggtttgaagttgattcttcatagtccacgagtccatcttattaagaaaagtatttggaatacagaatataatagtatcagggataattatatcttacttttttctctctagattttttcgtccccttttaccgtgggttttgtccctatttatagttgtatagggtgacagttattttcttggggatctattcattcataatcgttcatgaaacgtggacattccacacgtttcaaaattgtgcatatgggataatcgtgaataaccgttcaactgcccttttgtctttatctatagacggttatgctgactatattgggtgactctcactaaatacacgtcatatttttttaccgtttttgtaggaaaaatgctaagtataaagttacaacgcttctcgcaattctcttttgccattttggaa

SEQ ID NO: 34752 - DNA, 3410 bp, Cannabis sativa
gcactgagtcacaaatcataaaatgttgcttatcaatactgaatcacaagatattttaacaaaagagttcaagaaagactttttaaagtaggagatttggtgttgcgaagtgtatttgctattacacaaggccctgcaataagagtatttaaccctaactgggcggcccctatattgtagaagtagttataggaacatgagtttataaattaacatggctccctggctcgctaataatagacacctagaacgacgagcacttaaggccctattatcagtagttaattctattttattttattaattgtgtaaaagtaattcatcttaatgaagacatcttattttaagtaattataaaatatttctttcaaattacttgggggactatgaatatatattaacaaggttcgacagtgcctagaaatatataataactaggctcaacaatgcctaaaaatatataataactaggctcggtagtgcctagaaatgtataataattaggctcgacaatgcctcgaaatacaaaataaaaaaaaagagatgaaaatatttgattaaaaaactggtctggagcagcaaaaaaaaaaaattaaatctttcttaagtagaaataaaaatagcatttgctgtaaatgagattattaaagtcttgcaaacgatattaagctaaatgcgatctgaataaaaatagcttgcatacatagaaagtattataaacaagatcccatagtgagtcttgataaatagtacacaagctaaggtgtagatggagcactaactactcgcacatgatcgatcaaaaatgttcaaaacaatcaagtactgttcaaaatatttaagttcgctctttacttgataaattaacgaatactgaaacaaaacaaaaagatttatttggataaagttatgtaaataaaacttactcattgatgataacatattcaacataatgaaagctcaaataaaattttctcacaaaagtagagaaaatatatataaatagaaatgacataaattatagtgtaattaaagctaagttggccatcttacaaagcaaaatagaattaattacataaataaaaatgacacaaagggttagatattgtctcggtcagaaggtcattgttcaaaatatgatgttattaaaactaagtctacatagttgaggtccatatttttgttcgctaaccaagctttataaatggagcacttggccatcaaagtaacccttacacgagcatcttttttggcctcatcaaggtctatttgggtgggctcgagtagttgttgttcaaattgacaacttctgcctttagttccttctcggacttctctaaatcttcaaagtttttcttaaaacgagtgatctctatttgagcatcattccactgagtagcaacaactcgcagtgttcattagccttacaaagctccaagttaggtggtttaaatttagaagatttttttgatgacccatgtatgccagaaaagaagcttgcatgaaatatgaagttagaaagagaaaaaaatagaaggtatgatggaacaagaaagttgaaaaactacttgattgcatgagatctatacttcttgccaagtggttgctaggagtgtcgttattgaacaagttctagtagtctgattaataagtcataaaatggcgacatgattgagttacatattacgagtaggccttggaaccttcaataccaacatccaagggcaacagacaaatggggtccaacagtatgacctttagtttgacagcagaaagtaacctggtggacaaaccccaagatttgcttttttgtgctcgtagattcaggggccaaagtaggattagttggggaaacattgtccttctctagaataatgccagtggtaaaagtattcttttttccagtccctttcttcttcttcaaaacttgaatctgctttatagagtatttgcctcggaggcacttccttttttaccttgcttgactgagacactagggctgcagaggagattctctccaaattatcaatgtctacaaagataaaacaaaaggaggttaaaatctataaagtgaggttaattataaagtggcgagatcaaaatcccacctaggtaattgtcggaagtgctaggcgatgaggggttgctattattgttactaaactccctataaccagtgatcataaagagatcaaaggaattaagtggagacatgtcccaattccaactagcagccctatgagcatatgtactatattggttggcaattccataataagatatgttgctagtcaactgaatatgaaattatggataccaactattaaatatattgcataagaggtcaacataattctaaatatggaaattatactggctatccttaaatttgaccaggcgagtcgggttttggtcgaggacagtaggggaccatccataaaagtgagaggaattacctcgaggagccccttttgaagtctcggtagcttctcgagttgcaaggttattcttgtaataggtgcgagccagattgtcgtggtcctcatcattaagatccacagggacttgttcccaagcaaaatacttgcgatcttttatatccacggtattctggttttttttgagaaggctacaagcatttagattattatcattcaatagaaagtcggcttctcacaaaccaatcggaaggttgacgagctactcgtgacaacgttggattgctgcgattagggtaggtctctttagaagggttaaaaaaaaaaaaaaaacagcaaacgaccaatgagtttggaggttgaaaaatataaaagtaaaatgacaagaaaatacttgacttacgtatcagtagaaaaggtagtggtgccaactgggtgaaggtcgctcgtccaaaagaagttctgcttgaattcttttttgtttggcagcatgactatgtgcttccaaatactaaaagccgccagaacatttcttcctcacaagttaggacttgacagcataaaagtaagtgatttctaaaggggtttggctcccccaacctaagatgtgctacaaagattttaaataggcgagagaagggcttcgaccttgatgtgctcaatactccacactccaatatgcaaggagttgctggtactacacctagagccgctctgcaagagagttgggggatgacagtttttctcacccttctccaccgaacgaactataaattcgttgttgatttttatcccacaggattgtaagatgggtccaacatatgtaatagaccttatgttagactcaataagttatgcctcaaaggtaacatcaggattttgaggcatcttggacttttgagatttagttgttagaatactgtaaactctgaatatagccctaattaattcatgagaatcaaacaatagaat

SEQ ID NO: 34753 - DNA, 2151 bp, Cannabis sativa
agtagctctgatagaggagtgtagtgcaattcttcagaagaagctccctcctatactgaatgatcctgggagtttataccataccttgcactattgggaggcttgagaatatccatgaattgtatgatcagggggctagcatcaaccttatgcctttattagtatttaagaggctacaactcagaacggcaaaaccaacaactgtaacactatatctagttgatcgttccttagcccatccaagagtaatcgaagatgtccttgtcaaggtggataaattcatatttcctgctaattttatagtccttgacatggaaaaagacaacaatattcctatcatcttgggaagacccttcttggcaacatggaaagcactaattgatgttcaaaaaggagagttgaagcttagagttcaaggatatgaggtagtacttaacatacttaaggcaatgacttatcctgaagctagtgataatggcttttcaattgatgtggtggacaagttggtagagccaaaggaataaagtgaagaccctcttaatctgactttggtgcaagaggaggtggttgaacaagatggtaaagaagtgatggatgcgatgtggcttgactcttatggaccattaattaaaaaaaaaactatgaagaacttggagtcattccaacaacgtcagttccatctatcgacaagccaccagaacttgaattaaaagttttgctagatcacttgaggtatgagtatttaggagaaaataagacacttcccttcattgtgttagcttccctttctatcgtggagatagaaaagctattgagggttctaaggaaagacatgagagccattgcgtggataataggtgatattaaggggatcaacccctcaactgtgatgcatagaatcttaatggaggaaggggaaaagccaaccatagatgataaacgaagattgaatccacctatgaaggaggttgtcaaaagagaagtcctaaagtggttagatgttggggtggcataccctatttcagatagtaaatgggtgagtcatgtccaagtagtacctaagaaaggaggaatgatgatagtgaagaatgaaaagaaagagttaattctaatatgaattgtaactaggtagagaatttgtatagactaccgaaaactcaacaaagtgactagaaaagatcacttccctctcccattcatttaccagatgcttgacaatttggcagaccgatagtactactagtttcttaatgggtatttaggttatcatcaaatagaaattgcatcagaagaccaaacaaaagacgatattcacatgtccatatggaaattttgatttttggagaatgccatttgggttgtgtaatgctccagcaacattccaaaagtgtatgatggcaatattttctgatctaattgagaagtgcaccgaggtgttcatgaatgacttttcagtattcaatttatctttcgatcaatgtctaaacaatttgaaaatggtattaatgagatgtgaagattccaatttggtgctcaactgggaaaaatgtcacttcatggtaaaagagaggatagtgttaaggcacaaaattttaaaaagtagtattgaggtggataaagccaaggtattgacaattgagaacttaccccgtccagtgtcagttaagggagttcgaagcttcttggggcatgttaggttctatagaagatttatcaaagacttctccaagattgttaaacccttatctaatttacttgctaatggagtgccttttgagtttgggaaagactgctttgaagcctttcaaactcttaaggagaaattaatttcagcgccgattgtcactacaccaaattgggagctaccttttgaaatcatgtatgatgtcagtgattatgttattggtgcagtgttgggacaaagggttgacaaggtatttcagactatttactatgcaggtagaaccttgaatgatgccacactgaattatgttactacagagaaggagatgctggccatagtgtttacatgtgacaaattccgaccttacttgattggaaataaagtgatagtgtacactgaccattcaaaataaaagtatttgatgactaaaaaggatgcaaaactgagactaattcgatgggttcttc

SEQ ID NO: 34754 - DNA, 2606 bp, Cannabis sativa
gagatagagtttcatttttgccataataattagtattttctcatagtattcaaatattaattttagggagatttacacaaaatatttaaaatcacaattttttttttttttataattttacgaattattatatatatttacggaatggtgttttttaaagagaaaataacattgtttttcatattactgcaatattatactatatttgtgaaatatgaaaatgtgtaaacaacgtcttttttaaaacaaccttaaaaataacggtccgtaagaaaaaataagttaaatttttttaaaaaaaaattgtattttgtaaaaatatatatttttaattatttttgaatatttataaaataattcgttaattttatggccaatatatgtataataaaaaaatcaggaggaataccattaaattctatagttatttaaatgatcaaaatcaaaaagtattaagattagtgctaattataatatcttattataattttttaatcaattttcacgcctaaaattatatatcggatttttttttgaaatatttcatagcgatattcgttataattacaatatcattcctgtaaattttttaaatttttttaaatagtttacaaaatagagttctttatattccagtctaccatgcaaattcaaaaagctttaaacttattttcgacaatgtaaattattcaaaaaattttaaaatatttacagagatgatgttgtaactatactgaatattgaaaaaaaaaattaaaaaaatatattctaatatgtaatttttttggtataaaaattgactaaaaaattataataaaaagttgtataaaataaaatttggtaattgatttgattatgtttcattcttttttttttattattttggtatttttgtgtgatcaattagtggacacatgaatatgagagtgtatgtgcatttcatttaattttgatttgatttgtcattgcaaattgtcctcaatatggcataccttcctatgtttttggcctagtttttcaatttcccaaagtataaaagttgtaaacatttcattagaggaatgcattaaaaagggccacaaaataagttctactacttgctatgctaggcaagagagtaaattaaactaaatgcacacatttcttctttgttgttttgtcattatcaaattattgaatgagcttttattatcaaatatgaatcaaagttgcacaatattctagagcacccaatttgtctttcttcctagctagtaggaataaatttgtctatagttggtgaaaaattatttccttacttctcctaaattttaaataatttactatattgtgttaaaaataaaatttaaacaattaattaaaaaaaaattataagtgagatatttaatttttatagacttaagatcatttagtagctagtaagtgggatatatatttgttattgtcaatgaaagtgcatttgtttcaaaaaaaaaaaatatttgttattgtcaataagagtacatctaattaaattattacatattgatcaatggggatgagacaaactatatgtaataatttccctacttctcctacaatatagggagtttaagaggggaaattaaatagtagccaactaagctatatacattgagttgttgttgttattttagaatttaatttcttactttgcttggtcatttcgttaattaacaaacataaataaggcgtgtatttgacatcttttaacatgtattatcgttattattgtaattaagtatttaattttatataatttaatttattaacttttatgaaatatcactcaccaattgtaagatactaccactaaatgatgctaaacaccagtgaccgtttgtattttatagtcatctatcttggcagttacacacagaaccaccgagatagggatgctaagattgctccaatttttcagtagtgaatgttggtattttatagcaatgctcctaaaattatctatcgtgcacccaactctatcttaagtttttatatcccactaataatattaccaaaataaatttcaaatgcataaggacttatgtaaatacccatttttagaaaattcttatatatatatactaagttaatgttacatgcattgtacgtataattagttttttttaattagatttaattagtaatgttaaatgtaatacatgtatgttcaatttttttaagtagataatgtatttttattttttaatttttaaaataaggtttaagattttgatatttaagaattttttttacagctatattagtgtgctcttcactctttagatgtgattatatatacgtattttatatatacaataaaagaataaattttattgctatacatattttatattgattactatccatatataaagattatatcagaaaatattttgacaaaatttgagtttgattagagaattaattactttcaaaatatattttatatattatacccaaacatatattttaaaaaaagaatgataatgatagaaacaatattcttaatttgcagttaggattgtgtggttataataattataaagtgtacaaattattaaaagcatatatatatcattaattat

SEQ ID NO: 34755 - DNA, 2750 bp, Cannabis sativa
agtgtgttaaattatgatgcaaaaatctcacaataaccaaaagtgatccaaatttgcatcataatatagcataatacaaaatttttaccacaataaatattatacttttatatttaccattataacatttttaatattttattattaaagtttagctaatatattcctttacattaaatgacttgcattattattatttttttattaaagtttacatttaactttgtattattattattattttatattttttaataaattattaagtaagcattaaataacctattaaattttacattaagatttacaattatgcattgaagcacaataataaaagttaatgtaaaaatatcacaaaactattttttatataaaattaatatagctcaacattcatatctctagtaatgtagtgtagtgtatatatatatagagagagtgagagagtttagaagagcaagatgataaaaaaaaagtaagtatctacatatattaaattaattaattacatgaatgaatgaatatgaagtaatatatatgaattttatagttatagttcatcatggaaatcatcctcaaaatcttcataagtatcatcattataaacagtgctgtaaaatatagactcgtggttcaacatctcttcaagtgtcaattttccatccttgttatcatcagcctgataataacaataattaactccaacaattactaaatgatcaaattattcatcaccaatattatataacttacaaacatatatatatatatatatatataagtctacttttgtattttcgagtacacctaaaaaaattacatcttaatttttgttttgtgtatgtatattgtagttataacacatatttcttaaaataatataatcaattatataaatatacatatagaatgtttaaattttattaatgttgatacaattatattcttaaaatagaaaatggcataagttattattaattacctccttcattaagtaaccagcataatatttagcataggagagctctccaggatgaagataactgagtatgggaatcaattcttcaactcccaaaaacctgtcacatacatattaatacatacaaaattaaaacctacctacctttacttcttttattctgtatatatatataaatatttatatatatatatatatcattttatagtacattttatgtttctctctctcagaactatttttgtatttttttttttactcaatttacacacatgagctgatattggattattggttatttttctcttagaattaatttaattaataccttattgtttaaataatacaattatggtaataaaatagttcaaaaatgtatgagctaaattttcccaaatatttttggtaaaatatttatgtttgtcaaaattagtaagaagaaaagaagggtacaccactactatgcataatatacaagtattgaaatattacttattatttattaatttatcaaaatattatgtatataatgtatatacatatttttgctatattataatatattatacttgtctttgttgatgtcaagctctgcaaacttctcttcagctgaggatacttgaagccaagaagtttcatattccacataattcttgtagatttcataagcatgctcacaaaattccatgaaattcagtttaccatctttgtcagagtccattaccctgcatttataatatatataaatatatatacatattaaattgagaattgctaaaagcgggattaatactttttttcggtattatattattattagtataattaaatattaaacctcatataattgaaaaaataacttttgaaaaatatcgttaaccaatcataaaatattgcatatagattaaattatatatataaatcagacaataaataatatcaatgtaaatgtatatgtatatgttacatactctagtttttctttcaacagccattttttaatttcttcattgtcactatcttctgggtgcaacaaactgcataaatacgaacaaaataaggattattattgtcatatattgttgagttcattaattaatttaattgtgaaatgagaaagaaagtgtttggtaattaatgatgtattactctttgaattcatttaatgaaagggttccattatgatcaatgtcagcattgatgaactgttgtttccaccatccagcttctccatgccccatctcatttttctctgttacaacttacaataccccttttaatcacagtattaagtttccaaaaattctaaataattttgaaaataagattttaacaatcatatatacatatatatatatcagaagtacctacctatatcttcatctgaaaattgagggaggtactcaaggaaagaaatggaaccatcatgattctgatcatgtgaaatcatttcttttttagtcctttgattgagtctctccacggccatatttctaacccaattatttagctctaaagaattaatgaacccatcttttggtgatttgtccaacatagggaacactatcattagcctcaacgttatgttcaacgttccttctgagccaatgtattgttccacttcatcatcatcaacaccatcctcatgatttgatgatccttttccctctgtgtatctttcaattttagcaacaagagggtcaaagaccaaggcccgggatctgttcccgaatcgacgatttatgcggccgaaatggctatggccaccgcc

SEQ ID NO: 34756 - DNA, 976 bp, Cannabis sativa
acctgagggtggccccagtgcacggaccacacgttctcggagaacccaacctgatgttggtcctagtacacgaacaacccactcgaagaaaaatacgcatgggagtggttagaaccccaagacgagggatgaagagcttaatcatggaggtgcccagtctatggaagaagatacttatgaaatggaaaactgccgcctcagatgccttctagaagaggcacaacatcgaaacggtgagttagaatgtgatgcagcctcggccagggcagcacaggggacaaatgctcaaactcaacctgaacatggagtgagaagaccacgaggtagaccttgtggctcatgaaccaggggacaggaaaatgccctaaaagagaaacccagagaaaatgagacaccccctaaaaatcaaaacgaacagccagacggaagacaaccagaaactgatgaacgagaaaccccgcatcacaatgaggaggatcttgagactcaatcgggagaatggaggtcacctaccagaaatcacaagcgttcttcccaaacccatagagcaaggactcatacaaaccgtaatgggagaaatacgaaaaactgctctcgggggaaagagcagagcatgaagaagtaagtgtgacctcgaggcggtcaagaactcacagtcgatcagctcaaagagaagaaagtatgatcggaaagtatgggaaccagtaaatctgcgagccactcaatgccaaagtctaagactaggacacgatctgtgagtaacactaggtcttctagcaattactcccaactagatatgtgagagcacttgaatcggaagaaactggacctttgccaacagcttggtccaaagcaagaggatccaatccaattgcggataaacgacctaaaggacaagttcaggagatatcaagtgggggaattagggaaaccatctgaatacaactctgacgaggagcttgaggcctatcatcca

SEQ ID NO: 34757 - DNA, 1338 bp, Cannabis sativa
aaatacaacaatttcaatagtttaggggacatttttaacgaccttaaaagttcacggggtatgatttagtacatgtcaaagttcagaagacaaaagttttaattagcctaaaatgacctatgttaatctagtcagtgtggagaattgtagatagtggggttatcaagagtgtgtggaatgagctcatcttgtaaaaagttatcaaatcagtgttattttgcatattgatttagaaaaccattttgtcaagtattgaaacaagctagattgcaaagcaactatcataatattttgccaaacaccttaccatgcagttatccaatgattagttattagaagattaatgttatgattgtgtttttggctgaatttgttatgttgaatggcagagactaccaccattgtctacagaggcgaatcgatgtgaacgagcatttgttggaaacacaatcggtcaggcaaatggtgtgtatgacaagccactcgatcttcgattttgtgattttactaatgacaaatccaacttgaaagggaaaaccctttcggctgcgctcatgtctgatgccaaattcgatggcgctgacatgtctgaagtggtcatgtctaaggcttatgctgttggagctagcttcaagggtaacacaactattccttcatgatattttgattcaacaacataaacacatttaaattttgttaaattaacaatgtgacaattatttattagcttaaagtaacatacaaaataacttctaaggtcgttcctacaactcaaaaattgcattacacaaccccgaatttcacattttcatgttgttagtttaacaaaactcctcatgaaagtcgtttaaggtggctctgtaacttaaagaattggtggtctgtaattagtgtgctattcacatttttatcttttatactaattttttgatacaacccctttaatttctgcatgtaaatttgttaaattttatatgttgtctttgcttaaattggtctattttctaacaaatcaagtagtaatacttgtactcttaggccaaagcattttcagagattttctagttgaaacttgaaatttacacatcaaatgtatgctatagggattggaattcaataagaatattaaattgctttcatctattcatatgtttagatgttaatattgtaattgtatatgttgcaatatccaataaaatatgaagaaatagatcccacaaaactatacaaacatgtctcactttttaagtactacatttcatttttatgtgccataatgtgcaatatcaaattgaaaaatgtaaaaaagagttaggtgttagtgagttgaatgaaaat

SEQ ID NO: 34758 - DNA, 2248 bp, Cannabis sativa
aacacgccacatacaccatacaagacactaagtctatttcccatctcactcatttgagattttcctaacattgttctcactattgtattattcataaagagtcactctagaaatttaaggtaaaaacttgtaatctgagtggtattatctctcgaattaatagaactaaaagagaagtaggtcattacccgttaaccaagggggccgaacctctataaattgttgtgtctatttatttacttgctttaattatttacaaggggtgatttcgaccataaataaggcttcgctgtcagttgaccaaatttgaagtgaacattttgaatccaatccaatctgcacaatagctcaaatttaatccaatccaattcgcaaaagtacagattagatcagttatttttggattggtctttttaatataaaattatttgatatttattaaaaaataaaattacataactaacaagttttatgtctccaacaacaaattaaaataaataaacaaaattttgaaaagtttaaaggaagaaaagaaaaactgtatgtagaaagaaatgtttaattttttaaaattatatttttcttatatataagaatgaaatatgtatttgatttattaagttttaaaatatatttgtatcatatgtataagatttttaaattattattttttatattaaaataataattgtatatataatttgttttttaaaaaaatataaatgtgtgtgaattagatttgatcggttacttaacatgtcaatcaacattccgtctatacaaatatgaattttaaattttccaatctaatctattctgcatatgtgtgaatataatagatgcccatactttataaattagattgtgtaaattatattgaattagatattttaaacattttaggagtgtctttttgttacttttctacagcttacgggtatcgaatttcaaaagattacaaccaagacacataaatgcttgataaaaacatatccagccgaaagaaaagaatcaccttcttttatgtaatgccctccacacttatatatcctccatctctcatacttgatttaatgtaaaatttgatgtttcactaataagaaatgacatagtatcaagaaaaaaaaatagtatatttcattgaatattatactattcgttcctcaccatacgtacgacttcagaccactacactggtccaacgttcaaataccaagttcacatcatgactcaatcttgtgaaatgtattcttggtaatgaataatgaatattgtttctttttgagaataatgaatatagttcagttagtactttcattgtttcacaaatttttaaaccaacacattttgtataaacatagatggaatcgtaaactatgtaatcaatcagcaaacatcaattagataataacagcattgctggcaagccagaaattcatttagctgcaaggagttgggggcatgtaaccaacaagagaaaataattcttattatgatcaacaaaagagaaatctaaaattctctaacaataaccttggagaaagaatattaatgaccagcatacaattagtattatggttgaaagaatggcaaaatttcttgttgtaaggattctgaagatatgaagcaaaagttttacactttctaacttccaatttaacaaggagagaatctctcttcaaaattgcagtaccatatagcagaaaatgtctagctgccactgatttggtttatcttttatgcttatggagctctatcaaagggttttgtgtcattataacaaatatcccagactgcctccatggcatcctttgcagctgcttctgagcagtaaggatttgcaattaccgacttcataacccttcgtcttacacactccttcaaacattgcaatgagaatccagtttaagattgagttgcaaacaacaaaacgatgtaagaaactaactcatacaagcttcatgtgagaaaatggacaaagaaataaattaactaggcaagtaaggcatgcaacatccacaaaaggaataagatgaaggtataaaagaaacactttacaaagatgacaatttcatgaaccagctactactatacctctccataatgagatgcaaaagatgacccaaaaatgtaaagatgaccattgaaccaattaaactagtctaaaactattacaattttttttataaataatacaaaattaatttaaacaggtaaacatgagaattcaatacgtgatctttttggc

SEQ ID NO: 34759 - DNA, 3258 bp, Cannabis sativa
  modified_base (3228)..(3232): a, c, t, g, unknown or other
gggtgagttttgggtctcggtcccggtcgagcccagtttttggtcaaagtcccccatctaggtacggatccttggtctaggtcctggtccaggttcaggtttctggcccagatcccccatcttggtcacagttctgttcctaggtcccacgtccgagtctcgggtcccaagtccgggtctaggtcccaattcgggttctagtcccgtaaggttcaaggctcgatccaggtccaagtcccgggtacgagacttaacccaaaacaaaacccaactcatgactcgatcccggaccaaaacaaggactgagacttaacccaaaaccaaacctaaactcatgactcgatcccagacccagaccaagccgtatactgtgactgggatttggactgggacatggacaagaaccaagaccggaaatcgaatactgacccagacccagacagggattgaaacacgggacctagacttggacctaaacccgaacatgggacccgagctcagacctggacgcagcccgagttctgaaaaacctttacccagactcggactaagactcgaacctcgaccataatctggaccaaaaccctgacccataatgaaacccgaacccaaaactgagactagaactgaacccaaaccataacccaaactcataccagaacttggaccgagacctcgactaggactgggacccgaacgtggatcaggacctaggcctgacctggtcgtaaaccttcgaagggacccacaccaggatctataccttaatagggacccaaactcaaacccggaccaagacaaggaccgagacctggactcgaacccagatcgggacctaaactcaaaccaagactcgagacctaaacccaaacttggacccagaccaggacctaggaaccggacatagatgggggacctagactagggacctaggccacgaaaccaagaccaagatcaaaattcagtactcaaaccaaaaccaagacctgacctggacccaagaatttgaagtccgacccatacccgaacccgaaacctggccaaaacccaaactaggacaggaacctggaaagggacatggaccaaacccgaactcggacacaaacccaaaatctgacctgaacctgggacccaaactcaaacccagacctagaatccgacccaaacctagacctggacccggacccaaactcgaacccagaccgagatcaataccaaagacttagacccggaactaaacctggactcagattaggatcagaacttgggacttggaccttgacgtagagccagacccaggacccgaacccacaccaaaagcctcatctgaagctagattaaaatctggactcgaaccccgacctgaactcgaaccctaactcaaacatagtatcacaactataactggaaccaaactaggactaggacttggaccaggacaaggacctaaacccgaaccggaaccaagataaaagccagaccgagacccaaacctcaaccgagactaggacgcaaacccgaacccagactaggacccaaacccaaaaaagaactttgaccaggacaaaaaaatcaggatagggacctcggcaacagaactaggaacgggacttagtacccgacccagaccccggacttgaacctaggacctagcttgtgacccaacacccgaaatggaacgagaataggaccgaagattgggattttgatctggacctgaggcttggaccaaacccatagtcggtgtttggatttgggacccaacccatgactcgaacccaaaccagcaccacccaaacccggacctgaacccaatcctagaccaaaacctggacccgaacccgtaccctatgacctgaaattcaaatcgaaactggaagtagacggggacctaaaaatgggaccaaaacgaggacttggacttggaactgtaaccgtacatcgacgtagacccagaaccgtaaccggactaggacctagactccagctcaaacctagacccgatgcggaaccaacaaaccagatcccaacccaaacctggactcggacccgaactcagacccaaacatggaaccagactcgggacacaaacaggggctaggacctagaaccgcaccccagtctcgatcccggatccaaactcagacctggaacctaaaccagaactagaccgggacccgtgatagggatctagatctgaactcgaggtccgggaaatagggcttggaacagaccaataggaggtgtctggatgtgggacttagactaggttccgaaccggaccaggacccaaacccgaacccagacctagacccaggacacaaaactagaacgtgacaaggaccccgacctagacttaaaaacaaactcggacctagcccgagacccaaaccgagacaagaactcgggccttgacccagacctaaatctgggacccgatcccagacacaaactcggtcctagattggaatctggatacgaactttgactcggacccagacccagaccgggatcgaaacatgagatctagatttggatagacatcttgacgtagacccaaacatggacccgcaccagggaccctaactcggacttggacctgaacccagacccagatcaggatccaaacctggaccaagacccggacccaaactcggaccaagactcagaccctaacctagacccagacccgaacccgaaccaagaaacaaaatccgagtgtgggtctgtgttcgagtccgggtcctagtccgattactatattgggtctaggtcctcgtcctattcttgggtcctaatccacttcttgtttcggttctagtttcaagtcacgaggtacgggtcgagtcaaagcattgagtcccagatcccaagtcccatggtctgtcctacgtctaggtttgggtctagggtcgggtcccaaatcgcaatcaagttcgtaggcccaagttctgatcccggtttgggggaccaattcctaggtctaggtcccccatctatcttgaggtcctaggtcgcagtccaggtccaagtttgtgtttcgattcgggttcatttctcagattcgtgtccgatccaggtcccgatttgggttcgggtcccatcctagtctgggtttaggttttgggtcccaagtctgactttggttcttggatcctgtgttttgccccaatttttaagtttgggtcttggtctgggtcctggtccctgttaggttttatgccctannnnnaactccatttcaatgtaatctatttt

SEQ ID NO: 34760 - DNA, 1474 bp, Cannabis sativa
agaaaccaagcacactttgaagtgcttctttgtccttgtatatttgtgctttttttatttcaggatgttgcggatctgtgattagtagttcgtcataatctgttatttctggcttcctgtttttgttgttttctagttcctcaactattttctctgccacaagttttgcatagtccacgaagtcaaaattttctcccccatcttccagtattgtctcttgcattgtatgttgttgagttgttgagtcttctgttgttgttgtattgtctatgcaactaatgcgttactattttccaagaacgattgattgatagttcttgatgggttgttaatgacattcacacacaatggatatgttgtaaagtcaggttccttcagttttagttgtatgtagaaatgcaggctttggtaatcctttatcctccacgattggtatccttctttcaattggtatttagttgcagaacagtattttcttggttgcattccaggacctctttcagcttccgttgtaattcttcatacttacaatttattaaaatgtattgtccactagcttcataattttcataattcatttgatcatcaaattatccattgcaaaagactaggaatggaatttcttatttttccagtgattttgaaattattattagtgtaagacaccaattttgaaactgttttgattctattattgctaatgttagtaatgattccgaacattttttatattgatttttataagaaaaaataaaatgatctttatgaaatagaaaagaaacatacttctattgcctttactctattcaagtcttgtatttctaattcttaatcctatttttgccatttttttttgttttaataatgtcataaattacaaaacgttttaaatttattaaacaaactaaccatttgtccaagtgttttctcttttttctctgccaaaataaattcctacaatattgaataaaaccataatgaaaatgatgatgcaactataaatcaacttgatgaaaaaacttggaacttaactccaattaacatggttatagcttgattatattttgaaatcataaaaaatgactatgcaactgaataaaccttatctgtattgtttatacctaatttagattgattgggatctcctgatcttttctttatttcaagacagttgttaattgtgaaccttgtttttcattagttctgtttgtatcaaatcttttttacaactattataaaactaatatgcaactatttgcacaaaacttaccatgtatatgtattatttctcggtcctcatcaaataaaattcctgcataatatataaactattataaaacgataatgcaactataaggcaaccaaaacaaatatattccacattggaaaccaataatcgaccaaaatacaactgtatataacgtagatctattattcgtgaggttttttgaaatttttcacatcataccttatt

SEQ ID NO: 34761 - DNA, 3798 bp, Cannabis sativa
  modified_base (68)..(74): a, c, t, g, unknown or other
  modified_base (1934)..(1944): a, c, t, g, unknown or other
  modified_base (3764)..(3773): a, c, t, g, unknown or other
aattttgtacaagactttcaaactagcgagaatcctgtaggagatgggagtcagctggaatggggcannnnnnntgtgatttatatagtctttgaagtagccccaaagagggaggatgacccctgcacaaatatgctcaaggctccaaacgcccatactagttgaaccactagtgctagtctcaccagtggttcctaggttactactggcaaagcatgcagggtgtagcaactgaattcaccttctcgtactaacctaacctggcatgattgcccaagtgcaactccacaggtctttagcatgtcgcccgtatagcctgagatagatcacaccttcgattctattaactcagcctcgaaggtgacgctgagatcctgaggagttttagacatacgtggcttgggaggcataatctcgaaatccaagtcacctggttcaaaagtaattgtgacgttgggtaaatacaaaggcttccgcgcaggaataaaggacacgctgggtggctctggccaggctgcttctcacaagaatcgacgtctgcctttagatatttcttgtaagaagtgcctgtagcgactagaaatatcttcctgttgggttctcactgtgtgttccctagccctagcatcatttagttctaatttggaggtgggttttgagggattggatttatatgggatggccaattctgtaggaaaatcaaactctaaaacttctagacgataaattcctaaaccagagtgggacattgctaccagcaaaaagtagtcccaatccctggagagaattttatgaaatcagaaggtaatgagttggagatcttaaaacaacctacatattgcctgaatcctagtatgaacagttttaaccctaaaaaactaccaaaactagatgagatgataacgatacaaacgaatcaagtaactgatctacactatgtaataaacatgagaaagaagaaagtaacttaccatttgaagttagggcttgggacaatgcctgggaattctgtttgcaaaccttcgaacgaagcaaggatcgctttgaaaaaatgaagtcggaggaaactcgcaggaaaaaggtcaaagacaaggatggcatgcaagtcttcgaacgggtttaatggtgatccttaacgaagaagtttaagggtttttctcaaactttctgaaatggtggaaaggtggttccttttccttattttatacccatgataatgatttcaaaaaagatttgatccaatggacgtgattcgaatcggaagtggaaaagatggtcatataattctgatgcacctcgaaaccgcacaactgccaaaatcagagggaatgcatcttttcaaaaacagaggaacgtgactaaaataccctttgtaatcattaaaaagctctttctaattaaaaagaactttttaaggggcaattattatacccgaagttcggtaagcacatcaaaggaggacacgtgtcgagctgggaagaactcaaacatgcaaacgacaagtatgcttagcatggaacaactcgttagaaatataatttgtagggtatgtttataactcggctggctgaatagccttctgtgagacagaaacgtacgaactgctaacttatgtattgacgagaaaccatgtgggtacacacgttaacgacgaggcttcaacctcgttgcgtgaaagagaaagcgacaacactaaaaatacttagcgtatattatacgatatacaaactgagtatagatagtatgacgagccaagataataaagcgaggcatttatctcgctagaagatggtgtgcatgcgaggaagatcctctcgacaccagagagtatagttatcagagttaagacaatattattcccaagaagccaaaatgacaagcaactactcgctatcaaagtgatcttggctcccttctcggcgaggcatccctannnnnnnnnnnttaccgtatatctttaattacgcgttcatcttggcccaataaaattggaatattcacagttgtgtaaaaacctcatttacttggcttgatttgtaatcatatccctcaattttagggataatggttgtaaatatattttggtcagctttataattaattaacttgcactatgcaattataaatagtggcagagaagatcaaagaagggggacggaaaaaactcttatgcaagaggccctaaaaaaatactcagaaatcagaataagattgactcgtggactatgcaaaattgtaactgcaaaaccacgtaagaaacccggtgttcatactttatttttatatagcttttattatttctgtgttgaattatcatcgtgaggcacaaatttggttaacaaaaatctgcatttacaatacatatatccatttgtggatggtgtataagatggcccccacaaatcagataccaccaactggagtggtgcaatatattcagtgagagattgtttgggaaagggaagcttgtgaattttccctaaacaacatgcagaacataaagaagacatggttttattagagtcattgtgcttattacatgagtgaagaacagacttgaaaaccttttttgaggggtgtccaagtctgttatgccacaactcgaatttagaaaatgaaggggcattacatttgacacatgacaaacactgaataggagaactcaagggggaatcagaatgagtttgagttgtgatgtaggcactggctttagctgtggagtgtggatgttggctggaactagagggatgcagctgaatttgggatgagtcaaaagaatacaggccattcacaaggtgtcccttcagcaaggtaagatgagtcttctcctctttgacaaaacacacatcatcatgaaattggaaatagacatcattgaaattggtttgagaaatagacagacatgtgccatctccaacaaacaactaatcagaactagtgttttctgttggtgtcgtgatgttttgaggatcgactgtgcagtgattggtggcaccaaagttagggtaccagtttgtatcccgtccagtatttgagcttgaaaatgcctgcatttgagctgtattgatgttgctagtgttgccagtaggttgtgtgttgctggtgtaggctttgttaaatctgtagaagcaatcaagtgcagcatgaccagtcttgaagcaaatttgacactgaagtcgattgttattaccactgggaaatcgtcctcctcgatcgccattgaatcctcctctttgattactgaatccaggtggtggtgagggccaggactgggatcattgaatcaaacctgtgttgatctaggttggccagagttatatgggggaaaaatgagcctgagttgttgtagccattgtagggaaattgagagccattgaacctaggataggcagctctgaaatttctattggtgttggtgtaatttgcttcaggaaaatcaggttcagtgtaggccctattgacattgagatcaattctttgtcatttttctcaattcttgattcggatgcaaggagcagagcttcaatctctacaacagagtagctttcaatccaagtgttagtagaaatgacaaaggtgtcatactcactagggaggcctttgagatagctgcaacatgatcacgagtgctaagaactgttggattatattttaccaggatctagattttactaccatgtatgttatttaacatcctaaatacgaatttctaaaaacgatgtaatttaaacacctataaagtttgagaaaccttacagtggttnnnnnnnnnntaaatgactccttccgctcagatct

SEQ ID NO: 34762 - DNA, 2025 bp, Cannabis sativa
aataataattttttttaattactatcataaagtataatagtaatttttatttttatttaaattactattatgttttcaaattacaatgattatcactacattgaatattattaattttaaaattataatattaaataaaattagcatacgtgacttgacacgtaatatctatttaatatatatatatatgacaactgatatctatatataaatataagataatgaagatttttcactcacacatatatataatatttagctttaacattcttcctatattttttctttcttacattattaataaagatagtatacatattttttttatatatatttgtagttacattaaagttgatctatgaatgatttgaatattacaatggggttggggtcgatgtcttgttatttttctgttactttgtagctatctttttattattttatagtagtttttatgttgttgtttaggtgttctatagttgtgttttagttgtttttatacatttttttattgtacagttatttttttgttgattttgaatttatgtgcatttgttagggtgtatatttttagtttattcatcataacttttttattgtatatatgtgcatttgttttgctatttttatgtcgtgttttagttatttttaagtgattttcagaatattttttttgttatacaattattttttagttgttttttgatttatgtgcatttaatatggtgtatatttttaatttattcttgacaatttttttgttatatgtgtgttgctttgtagatgtagatacatatatttagtttatttttgaaatactctgataagttttttttttttttaattcacacaatgtgcactagtagatattggcatactaaaattatattgttatcaagttaattttttgttgttttaattatatattaccattatattatataccttattttaaaattatacaattttctattattaatgtaacattttatttaattttgaaaaaaaattatcattttaattgtcactaactcaaaaaggaagaaaaaaaaataaaagtatgaaatgtaacaaagaaattttataaaaaaaaattacataatagtacaaatagataattaagttgttaaactaagttaaaaaaaaaatttgtaatacaaaaacttgttgattagttgatattgtttcgcatattgcaacgaggtcgatgtcttgttatttttctgttgctttgtaggtgtctttttgttgttttatagttattttcgtgttattatttaagtgttctatagttgtttttagtgagggtaatagtacatatcaactaataacttaggatcttggatttgaacctatgcctctcttttttccagttttcccactctctcaccactaagttagccttagtgactttatagttattttttagctgctttaatttttcttttaattttattgaaacacgatatttttacaattttaaaattttaacacagtatttttaaaaacttaataacaaaaaacaaaaacatatgtatacagtaaaaatattgaaaaataacaaaaaagatatgtatttttgtaaaaccccctaaaataaataagacaatttttttttcatttgtttgatatagaatattaaaattattttttaaacaaaaaaagagtctattttttttttaaatggaaggattgagtgtagaattaaaaaaaatataatgtgcattttaataagattggatatggttttatattattttggatgaccattgtacttaaatactcctctgaataaacaacttcttatttaaaaaagtcttattacacaaattctgaagaaataaaatgcgcttattttgtataaaaaatatacagattttatataacacactttcatatttgtaatttgaattatgacaaggtttaggttacaatagataactaggtacacaaatacaatataacaaaaaggtaggtggagatgactttaggctcttggtagattattaagaactaccccagaaa

SEQ ID NO: 34763 - DNA, 3333 bp, Cannabis sativa
tttataaattttcactaagcaatgacttaattgtgaagaaaagagatgaacatgtatatgcattctttcttatcccaagatggcaaaaactggactgcatcaccacaaatcatgtccaataaggactcatcccaaacaaagtctcgatgctccacatctcccttcaaagcaccccatcgacccttcaatgatgaaggaaataaagtgggcatgatggtgcactggcatttatacacctctatgtaaaagtgtacctgccttctcatcatgtgaaatgtttcatccatatgctacacaattcatacaaataagtaaaaaatgagcacattaaatgaaaaaaagagcaataaatagtacgtagttttagaaacttacatcatcagaaagtcattcattgttactgaacaacttctagaactaacttgggttgtgtatactagagaagcactccattcgatacatattcccagtgacacatatacactagttctagagactcaacaataacttcttatcaactagtcgaagtgggtcaacattcaaattcacaattgatggcttcgccttcttcttcattttagtgtactcattaaaccacctcggcctctttttcggtctcttctccactcgtggtggagctatgtctaaaacttggaccttagggtcttgagtatctccaatggacgtgatgttctcaggtatatggagtgcgcatcagctgcatcatcaggtttgtaatcatctctaggagactcggggtgtgcctatacctttgtctctatatttggccttctctgatcttccatgagggccattagagtcttcaagtaacccataatcttcatctaccctttcagaatagcaacctggccttgcttcgaagaattatgttccctctcaacactctccaaccttgccaatatggcagatgactgattcctgaggctgtgaagtgctagtaatagatgcaaataggggaacatgaagttcctcttgtggtggagatggtatagtctctctaaagattcaagctacagctgcccgctcttccaatgttgaggcaagattctaggcctggctatgcaaaacatcctaagttggttgcccatcgtcgcccaacaccaattcctccaagtcaataaataaaggtgactcacctctggtgacagtccttacaaatgcttcctcattaggttgaggacctaacacaaagtacattgtcaactgcaaataaaaacagaaatattataagattgaaattaaaataaaataaatatgaccaaatttaaagtgtaaaaaacttatatttttagcaaattattttattactttctccttgccaagtgtcaccttgtccttactctcccagttgaccatatattctaggaaaacgacgcgattttctcactacaaattcattagccagctccaatatggactcatatgcccaatattgcaacacaacaatatagccttatgttgagtactttacctccttttgagaagtctccctttcaatcttcttattcgtatggttcttcacttctacgaagtctttattacaagtttttatcaacttgttgaaagaaatcttttcttacaggtactcatagtatataattgtaggttgttagccatttttttcataaaaggaggaaccacggtcttctcctctttacaagtgagaactcccataataaataaggctattcccaacttgtaaacatcatcagcttctgtgcaacccttgaaaactttgcgcaattggccaaatgtgatggattgatcaccattgaagtattccacaatcaactgattggaatttgctttctcttctatttcttgctccgtaggtctgggtaacaagctcaacccgatcactaaggaaaactcggttcgactgaatctacatctcttctttacaatatagaagtggacttcgtctccttcttagatttaatcttgtgcatgaacaattgatggatcaatgcacccaaaaatttaagtggctctctctcaaaaaattatttaaaaagggattccttcaccctttcaaataattggtattccacaaatttttctttaatattttgatagtaaaaaactaccgccacacccagtgatacgacatatgcaatgctctaaaactggaattataaggcgtggaagtattgtattctaaaaaagaaaacacaagaaaatacaagttagaccatctgtagcaaagcattggcccaacatcaggcctataccatcgtcctccatcgtactagaaattacattcaaagcatgaacaattacaatggtcccttgtcggaccaactatcgggcaccctatcgtcccatatcatacctaagttaaaataccaaaatttaatgaggtattaggcccaccatcgttctgaatcggacctatattgggcctaagttaaactacaaaaatactaaaaaaactataaatttggataccacatcagaccctacattggtcctatcgggcctcactaaaacactaaaagtacacattatcgggcactaaaacaaaccctacatcgagtctatatcgaacctacgtcgatcaatcaacctaaatcccttcccaacaacatgatacatcgagcctatattgggcctatatcgggccaagctaaaaaactagattcttccctaaaacatagattcgaccaatccaaccctaaatctaatccaaactcaaaatcacagaggtttaaccctaaatctcaataaacctatcaataatctcttacattttaacccttaatcatgcaaaaatacaatacattgtcgtggttggagaagctgtggtcatgatggtgggtcaacctttgttgggtctattcagagagcgctagagagaagggatcgagggggacgcgagtggtgggtggtgggttgagctccttgttccgttcagagagggagagagaaaggaggaagagagagagagatgtacgggccggtgtgttgaaatgggagagataattttgagttttatgaaaagttaacctattctacaaattttgatacacttaaatttagtgtacacattttagtccaataaaagcatagaaattcatattttcaattttaaataagatttcatgaaaaagaaatgaaaatccaacgtggaagatgaacatgaaataattgagatatattcataaaatttctccaatttttgtagtttttttttatttttttttaaataaaagaaattagcgcaagtatggcacataggtaaacgtttataggagggaagattttgaaaaggaataattacataaggcactattttttgtaaaaaaattatat

SEQ ID NO: 34764 - DNA, 1376 bp, Cannabis sativa
  modified_base (497)..(497): a, c, t, g, unknown or other
tatccccaaaaatgttatgaaaagaatagtaagaaaaaaaaaaggattcgaaatattcttttcggtataagtaaaaacagaaatgttagcggcatcttaatgttgtttatacaatttaatttagaattttatatattttaatttaaaaataatatagaatagcataagctgtttattaattacactctatatttatatagactttttcagtttaactaaaaaaagtaataatatatattacaaagaaagattaactggtcaaataaataaatatacagtccaaataaaaaaattacacaaataccttttacacacaccttcaactcacaatccacactttttggaattgaaatcttcgttcgatcgaccaacccaacacaaccgaaacgaaacccaaccaaaaagagaatcactattaattctggcgacttcacctaagaagatggttggaatcaatcaagtcagatgttgtttcaaattcatgaaaaaaagtgcanaaaaactactacgaaataaaaattcaagcataaatctaatttaattcgcataaaattaatgtcctgacttcaattttcagatccatgaaaatggagatctcaaaaagttaaactggagttcccaaataatccaactcaagtataattaaaaaaaattacatcaatactatagtaaaatatttaccctggtgtatttttcgttattttctaaatttctaatggtgaatttgttcatattaaatcacaaagtcacatgtagatagagttacgtacgtggaaacactgttctaatttttaatatttcataacagctgcgttacagttgcataaatattttgctaacagttatttttccacatattactaataaggtacaagtaattatcgatctgtgataaaaaaaaatactgacaaatagattcttacagatatacattcacatttaatattttttagttacaattaagttacacgttagttgaataatagttttgctactataatatcatagtattataaaaatagggctcgaaattgtcaaatacgcaacctgaaacgataaaacacaagtgctataatattcgtgtgtattaaatacgtggaattattatttgttttgtgattttatattagttggctagcaacaaatataattgcattatagtttcatcacagttgccttgaagttgacttcttctttccctcttggtcgttgaagttaattttttttttcaagcaaagacaccttcgactgcttcttcactggacgatgaccacctttagccatgggaggagcgaaatcagaatcatcatcgtcgatgactgggcgtttccctttagccttgttaacaactgatttatgacccgtttttgaagctt

SEQ ID NO: 34765 - DNA, 1116 bp, Cannabis sativa
  modified_base (444)..(446): a, c, t, g, unknown or other
  modified_base (607)..(609): a, c, t, g, unknown or other
aatgcgagatgactgttcagatggtgtctgatatcgcccagaagtctttgctatagcttcgccctccgagagtgcgtggttccctcatgccttctccgggaggtatctctttagccgatcctccaggtttaaaaagacttagtcaaattataccaaagccatactcctcagatctacgtgtcgtgaccgcattggtccacgtattttggacaaaatcaggggcaaaaataattaataaaattttgcatttaatttttaataaataaaattatcaataataatataaaataaaataatatatttataattttacttatgtattagaattttattttggctaattagcaatttttttctccgaactttgacatataccaaattatgccccctgaacttttttgaccgttaaaaatacttcgtgaactattgagattgttaaatttnnngacttttgtctaatttcattcacttttactgttttagtgattgtttatgtactaaaccatcctgcccagactttgatatctaccaaatcactcccctcaaagtttgatatgtactaaatcatgccccgtgcacttttatccatgttagaatttttttactnnnattagataaaagtccttaaatctatcaatcttaatagttaaggggaaattttaacggtcaaaaaagttcaggagataaattagtacatgacaaagttcgaggagaaaaattactaattagccttatatttttaaataattatttattaaaatagtgaaaaaaaattaaattagctactgcgattctattagttagtgagtatttctataaaagaaaggctcattgctataaaaactaattatttagctataaaaaagtcaaacaagataatgatagtcctgttcttctgtctcgggttgatctaggaggtgtgaatactgaatatattagatattttttggtggaaaattaaggtaaaaaaaatgaatatttatcatgtgacattgacaagggtatttaggacaatatgtacctaagcacaaagggtggtgcatccgtcactgtgatgagatatatatagccacgcgttttgtcgtatacgcccaaaataagagagagagagagaga

SEQ ID NO: 34766 - DNA, 2074 bp, Cannabis sativa
ccgtgaggttgtggcaccctgattctggggaccttgaccatcaataggaatgtcccttatctcctctagttgttgttcttgggggcgagtgggattatttggctcatgttcttcaatgttgggtccttgtgcccttctggttcatgaaccacggggttttccttgtggtcgctggacaggttgctctttctttactggcagtgcatcattttgagtcgttttggctgtagccatggcccgttccaactcctcatttcttcggttggactctctgagcctttgacggagttgtcgattttctaactccacaatgggacgtatctcatggggtcgtatgcattagactctcttctctcaggaacttcttcctcagggtcacttctctcgaagttcctctcagtaggacctcttcccttgtttggtctagtttaagtttgtgctccctggggctcttttcccggtcaacgtgttgtctcttcttccacgactggttcatcatgttgagtattttccatgacgaaatggtctggtttaaacaggaggagatgtgcttcaagttctttttccaaaggctctcaatgaaggcaccaaactattaactctgatttttgctaacaataaatgaagccttgaaaataaaaattaattatttataattaataaatatatgcaaaacattaagaacttttacgtggttttgtagttaaaatctacatacttcacgagttattattatttatgagtattcccttacaatgtgtttagattgtaagagaatttctcaaatatccactcaatctcactaggtcattccttcccaaaaatgatcgatctattttcccttaggttctatccttatttatagattttataactgctcataaaatgtggacaattcccacgtttcatatttacaatatctggataatatgaaataatagttgataaccgcctcgtttttatagttttcattgccgagataatatatccaaaatatagctcgcattcttcaaagatttttgggaatgactagtcgtattctgcgagatactaactagtcaagatatttgtcctcgttgttactatgtcaactcctaagattagtcttttaggaatcctgatataagtcacattttgtgtatttcccttagtctttcaccatactcacgagtatgtgggttaatgagttgcaagctcttaaagaactcgttatctaccatttccagtgatattgttttagttcttgtatgcttctgagtgaccccaattagctccgagatgacctctgaaagttgttatctcgcaatactgtgtactttatcatcaccatgtgtgttagtgatgttgtagcatagcacgaggttggtatctatttatggttgcttctctcgaggcaagataggcattgtaattatgatcctcttttaatattcgagaataatattcacgtgtcttgtccatatttatggctcaaaatatgggcataatattttttatatgactctaataccatgatagaatttaggatggaagtgaatatatcgtaaggtgtctaaggttccatctcaaagtgaattgacaatgaaaggagtagcacgtgtatctatatagtattatctttctacacattaacaatgtgagaaaggtattatttatttcgaaaatataattaatttaaaaggtaataaaataatattaattaaataaactaaaaaatttgttcatttctctgttaatataaatcaaattaaaaaaataaagttaaaaccaaaaattctactacatagccacttttggatcatattttgctcatagtgcacctgattcgcactaagtgttgattttatattttagatccaatccaatccgcataataacttaaatctaatccaatccaatctgtaaaagtacagattagatcggttattttagattggttacttttcgataataaattatttaatatatgtgaaaaaatacatttttttcacataactattaataaaataaaataaatcatttttattttatatctccaacaaaaaattaaaataaataaaataacaaataacaa

SEQ ID NO: 34767 - DNA, 1145 bp, Cannabis sativa
atctctcttattttgatttttttaagaaaataaagcattttatagatagagaaaaatagatctcgcggtgatacataaattgttaactggtattggcgatatcacaatcatactagttaagttttaagtaaaagttcagctaaccacattataagctttaaagttacacagatgagaaactttaaaaaaattacaacataataaaagtaagtctaagacaattactaatatagttatcgaactcccaacatgaagaacgacctttaagagcattaatgacaacctccggattgctcttcaccaccacaaaattgtagctcttggctattgcagtctccactgcaagtaaacaggcagtcgcttcgccaatgaggcgatctgagaaggggaaccttttcacagccacccacacagtcaaacccatatggtcacgagccacaaccgccacacacatggtcttccacccaattctcacatcataattaaccttaatccaatcgagtgtgggtggaccaaccagaaacatcatcagagacagtggatgagaggatggataaaacataatctacataacaataagtaatcctagacatattagtattgtgtactttgtcattacgagctctccaaatcgtatcaacaataatagatgcgtacaagaagacctcattaacattgactccttttgaattaagaccccacagaaatttaacacaatcccatatcctcacccctagtatcattaattggaatgaggccccacagggacaagctccatggacttcttttctctagcacaaatagggtaagtagtaccttcaatagtcaattgttgcccaaggaattgttggggattgttttaccatgatatagatggaaaatttgattatatatgcatactaatgggggaaattatttccctaaagttatgcatttcaaaattaaaaaaatatgaccactttacattaaaccctaaaatacccctctcatttttcaaacctcaactctctatcttcctctatctctctcgttgttctctcaccatctcaccctcactaaatcaccaccaccgagcaccaaatcaccgcctacccagaccacctaccaccgaccatcgtaagacgcaactccaattctttaccact

SEQ ID NO: 34768 - DNA, 2837 bp, Cannabis sativa
tccaaataaaaactttgacttttggggaaattttagaattccaaacttttgaccaaaacttttttgaagaagagaaagaagaggaagagggaagatcttgagaggaaaaagtaagatgattagcaaacttaaccgtaaactccccagaactatgatgaccccatataatatcatctttgccaaactcacctaacacaggaacactaagaatctcatcaaccaaaggagcagaaaaacaactggcaagtttagcaatatctcaatccccagaatcagttataaaataagacaaaaaagaggaaggaggcaaattatcaaaagaaaagaatttaaacctattattaggaagccaatggtccttaatggttcgaatatcactaccattaccaatcttccataagagaccagaatttaacaactccctaccccataaaatactcctccaagagaaggaaggattgtgaccaggattagcctgaagaaaagtactacgaggaaaatatctggcatgaaggacttgagcaaggagagaggaaggatttttaaagattcgccaagcttgcttagcaagcatggcttgattaaaatgaacaagagatctaaatcctagcccccccataaactttgatttacataaagatttccaagacttccaatgaatcttatgagaatttccaactaaaccccactagaatctggccatcacagcttcaatacccttgcacaatttgacaggcaaacggaaacaagccatggcataagctggaatagcttgaatgactgccttcaataaaacctctttaccagccctagaaaaacatttaaccgaccaccctcgaagcacagaattagccctatccttcaagaaagcaaaagaatgatacttagatctagataaacattgagggagtcctaaatatttacatatgaaaggtcgatcctcaagattaaaagcattaaagaaagtagtacgaatatcatcagacagagtattaggcgagaacagaatagaagacttagaaaaattaataacctgacccgaagccttagaataaacatcaaaagcctcttgaagagctaaacatgaagctctattggcagtacaaaaaataaggctatcatcagcaaaaaatagatgggaaagagatggggcagttcgagaaatagcaatacccttaagcagaccaatatcttgttttgcccgcaaaagagcagaaagtccctcagcacaaagaataaagagataaggggaaagtggatccccctgcctaagacccctggaaggcttaagggaaccacagacagaaccattaatcaaaaaagaaagagaagtagtagtaatacatttcataataagagagacaaatctagggggaaaattgaaatgaaacatgacactctccaggtaatgccaatcaacccggtcaaaagcttttgacatgtccaatttaagagcagcccaccctagcttcccatttttcctagaattgatagcatgaataatctcctgagcaataataatattatcaaaaatgacacaaccagagacaaaagcactttgataaggggaaataactttatccaaaacgacctttaaacgattagctaaaaccttggagataaccttataaaaggtagaacaaagacttataggtctaaaatccttaagagtatgggcattctgttttttaggaattagagaaataagagtagtatttacaacagaaaaatcaattccctcattaagacaagaaagaacagccttggcaaagtcaaccccaagagtggaccagttcttttgataaaaataagcattgagcccatccaaaccaggggccttgtctccagagaggttaaacagagctctccttacttctttggtagaaaaaggagcatccaaaaaagcagaatcagagtcatccaatggaggacccaaacaatcaagaataagattaacagcatcagcatcactaccaggagaactaaacaaatcagaaaaataggaaactaccagattacccatggtattatgatcagaaacaatattttgattatcatctttaagaaacttgatggtgttattctttttacgtttagaggcaaaacgatggaaaaacttagtatttttatcaccagctttcaaccaatgagttctagatctctgcctccaataaatctcttccttataaaggagagcatcaagctgagactgaagacattgaagtcggaaacggttatcctgatcagaacaaggaatatcctgaattcgagcaatttcacgctgaaggtcagatatacgagatttgagggagagattcgtatttttattccaggtctgaagagcagaaatacacaaatcctgcttaaacaaaaaactttgaaaagaactccgagggctctggctagaaagaccacaatcccaagtgtccttgactaaagaaaaaaattcaggattctccagccaaacattctcaaaaagaaatcttctactatgcctagaagaagaattaaagctatcatccgtaaggataagcttcaaagcccgatgatcagagccaaaaaaaaggaaggtgatgcaaaacagcatcaggaaaaagatcactccaagaatctgagataatagcctaatcaagatgttccctaacagaactatttttccaagtaaatttatttcccacaaaaggcaaaggagaaagatgaaacttagcaaggaaattagaaaaagcatccatatccctattatcataataagtactaccctctttgtcatcataggataaaaagctattaaagtcacccattataagccaagaaaaagttggagcattataaaaaag

SEQ ID NO: 34769 - DNA, 2649 bp, Cannabis sativa
agattaataacagtctaccctctattgctgggctggtatagctttcccaaccacaaaatttttttgacatcatttctttcaccttctcacttttcagcttagtttcaaccaaagctccaacccaatctcctttttttgacaaactttaatcacagcctcttgctttttctctttattgaggcctctaacattccaacacaaaatattgcaacaattcataataaatgaaccagtgacccgtctccctgtgtcccactctccttattttgcaacatctcaaaagtattcttttctttgtgatgcaccccatgctccctaacaacttgcttagccttgagaagatgaactctttttggtgtttcccaattttcctcagcctctccctctctttttcagctccagtcaacttagccccctgatttgattctcgagcaacctctcggccactcaattcccctgccttctgttgagaaataactccatccttcccccttctttacccaatcttacctctactttattcttgccatcaattcccataactgtagcctccttagatttagtttggacatcatttccacctttcttctcctcaccagcccctactcctttcacatcttttttgacccattgcttagcctcacctttcctacactcagccatgatatgcccgaaacccccacaacttttgcacttaaatgacaaccatttatagtccaccccctgctcaaccaatctccctttctcattaatatagtgaattactctcggaggattttcagttatatccatttccaccaaaactcgagcaaatttgaccatggatctatccttcgtaactctatccaccattatcggattacctattgtactaaccgaagcactcaaacaattcttcccccaatattgcaaccccaaatcatgtaaacgaatccacaatggtacagattttataagtttcacaacatctaaatctgtagtccaaggtctagtaattaccggttttcgatcgaattggattacaccatgctcaaggacgtgatctctagtagcttcatcgtttaacttgactaaggtgaattctccattcatacgcacaatctgagcaatccccaggttacctcacatccttcgtatgaagccttcaaacacagcaaacggaggattcgcaccaagcaccatacagataacaacagagctccaattagccgcctgcataaccacctcctctgcatcaatttgggcaattttaatgcattccttgatcataggttcttcaaatctcagtcggccttcctgttcctggaagttactagcagaaaatttcctccaatgactctgagattgagtctgatggtcttcggtttccactatatctgcccagttcagatcctcttcattccctttcccatcgcctaggtcagactttgctacctccaagtttgcttctccttcttccacaatcgcatctgcaacaacaacttcttcaagaacagtacaaacctcagccggtcggctttcctcctcacttctagtgccatattccacactcatctctcggattacaggctttcggatccctcggcgcctcttcgccatggaaggaagctggagagaacacacaggcctccctctaccctattaatgttattaattccattccattttatactataccaatcatcacaattcttattcagttattgattccatagtttttaccaaacaaaagaatagaaattccattccattctattcctatttctattaccattggcattcttattccatttttattttgtaaccaaacgccaccttacttctttgtcttgcaagttacaaggatatttccgccccattcaaaacaaaaaaagaaaaagggagattatatttacacccctcaaacttataactacaccccattactaagtttaccccaattaaatattgtttttataatcacaccccatcacatttactaaatgggtattttttagtacaccccaagactttgaaaaaaaaaaaaaacttctcaaagaatgggagaagaagttaggcttcaccataatcgacgtctttccctgagccaagacttcgcactgaatccaccagtacttcattgtcgcacaagactttgcggtccaccactctcgctctctgctccgccaaccattcgaagaaccaccgcgagttacaaaagccaccgccaattgacgactgatatttatctctagtcaagtcgtgtttcatccttcgtgtggttggtgtcgatgaatggtttagaacaacatcgtttcattgctcacaagcccataatccttttcttctttaaattttctcatctttacactgatagaactatacacatcagatttttgtttaaaattttaaaaaatattaattctaattatatattattctcttagagaattaaggttgggaatttttggaatatattgtagcatgtatgaatcttcataataaaagataagactttcttgttaaaatttttgatttttattttgaatggttgagacatagatttcaattcaaatgcttgttgggaataatggcatttatttgagtttgtgttgaaattttttgaaatagatgggcattttactgatttgattagctgaaaattttgaa

SEQ ID NO: 34770 - DNA, 1999 bp, Cannabis sativa
acaatatttgaggtgcttgactcattatcattttcaagcagtgagataacactgtatttagtttgacttttactactatattcatccactcttgcttttaagtaaatgaaaaattaactggtagtaaaaagccttgcaaccaataatatatttttaatcctgttattacaacatcattgagaaagatagtaatattaatgtatgctaataaattgaatgagtttaaatggtagaatttacatttgagatgtgaatgagctcttttgcggtataatctaaaaactttctacattttcaccgaagaatattgctattagtgagcatgtatggtctgttagttgagcttgaaagaagtatctaaaaaagtatattcaaatacaaatcaaaaaaatttaggtaacaaattatgataataagatttctactaaattgaattaatataaaccttgaaattgtctcagtaggtgatttgttgcactcatagcatttaaggaatgcaagtgatgttttattgtcaaaatgtacttgttgatagtattttgtgcaagccatgtaccagaagggttatcttaaatttttatcgaagattgatggccattcaaagagaatggttgctctcataaagaacaaaacctggctcttagttccgcttctagaaggcaggcaaccaataggatgtagatgggtttacaggatcaaagaaaatcctgatggcagtcttgtaatcaaaccagtaactatcagagtagtgctaactcttgctttgtcaagaaaggggactataatgcaacttgatgtaaacaatgctttcctaaatggagacttgaatggggaagtttatatgatccaaccttcaggttttgaagatcccactgccaaacatttgtatgcaagctcaacaaaactctttatgggctcaaacaagctccaagagcttggtttgataaattacagcaatgcttactcacatttggtttcactacctcaaaagcagacacttcattattcattcaacactctgctcaaggtataattctcatccttgtctatgtcgatgacattctaatcacaggcagcaatcccaatctcgtagacaccctggttaatgcacttaatcaaaaattttccctaaaagatcttgacaaacttagctatttccttggaatagaagtcaactacacaacaaatgttttccatctctcccaaactaagtatgctcaagatcttctggccagaactaaaatgcaaggagctaaacactccaacgcccccatgaccagtgacctgcagctgttaacatatggtagtgaccttgttgaggatattcaactataaaaatcatttgttagagctctccagtacttaacaattaccaggcctgaaatctccttctgtgtgaacaaagtctgccagttcatgcaaaatctcctacaagctcactggatagctgtaaaaagaatcttaagatacattagtggtactcttcactttggaatgcatctcaaatcccctgccacacttgagttaactgcattttgtgatgcagattgggctttggatcccagtaacagaagatctacttcaggccatgctacccatcattgttactcctatagttgattaagtccaagattatgaatatcaataacctcatgagtggcatcttctcctgtagatgttgttataagtaaaccctttctcaaacgattatatgttggaagcttttcaagtgcaagccattgaagatcatcttcatcttcttctcttcttgagaaagaagtgttatgtattcttcaaagtatatagtgtttgtgccacaaaaggtctctataatttttgaccttaaagggaaggttgagagactagagaatgatcttgtctttgaatgtattaatctaagcggcggtgatagaacaaatctatggctcaagaggaagacttcttgtggtggtgatttatgccgtcttttcttataagttctcctcttttttcttttttt

SEQ ID NO: 34771 - DNA, 1162 bp, Cannabis sativa
tataagttttaaatttgacacgttttctgagaaaattctttgattagcaaagatagcactgtcaatgaaaaagtactgtagcgcaccttagcattagggcgttacatagtcgttcttggaagtcgactcctcgataaccacatcttgacacacgcttgactgcgacgtggacacgctattatcataggcaaaagtaagcttttatggtcgattaactcgtgaaaattcattattttctctctaaaatctccacatgtctagaacaaacagatcagagcaagcttccaccatgtgcagcatcctgaaagcttgcgagtaaatgttatctgcatttctgggattggacacgtggcctccaggttgacatttaagactcattaatgggaccctcatcatggatacggttggccaagcccacctagataggaccctcaaggtgttatcttagtctcgtcctcacagtgccttccgccctcggcagatcaaacacagaagacagctctagtatcatgaggccggagggaaaggagtttctcagaagactctttcagtttccttatttgttttctcctatcacaaaggaaaactcagttctcagatttggccaaaatatcatatcgcgattaaagaggaaacttcccataacaaacgcagagcagttatttcagattattctcccattataattggataaggttttgacctgattaactgaagcccgattgacctagtcagcaatcatgttcttcatgggctagacttcatgagtaggcccaaagacactgttcagttgtaagctccccagtagagggaaaaggggaaatcctattataattcactaactactataaataccaaactaatctcatgaattatcagtttaattctctcatgcatttttgcttagacaaacatacaaagttacatccttgtgtacctttgagaatatttacaagtaaatacattattgaataaaagtgactcgtggactaaggctagttaacgcccccaaccacgtaaaaactctttgtctcttattatattttttctttcgattattgtttcttcagtttttattatttatttcatttctaaaaatttcgagaaacattactccatcaaaataaaaaaaaaaaaatataggaaaaataaataagtaaaa

SEQ ID NO: 34772 - DNA, 1776 bp, Cannabis sativa
gagattgtatgtactatgtctaattcaatttaaaacattcattttgtaaaaaaaaaaaaaaaaatcatcattaaatcaaaacaagtcatgaaaaaaatgaaaacaacaaagaaattatcaccacaattctaagtccaatcaatctagaaaaaggggtaaattgagaggtactgtttttattatatattaactaaatataattgcaaaataattttaattgataaatattagtttttataatcaaaatactaaatatataatttcacataatttgtcaaaattagaatccctaatgcacataatggggatataactcataaaactgagtataaattaaagagtaataaaaaaaagtaaaaattaaaatagaaaataaatttcctcaaaaatataggggtttttacaaaaatattggattttgaataaaaatttacaatattttactgcaattcagagatttttttttacaaaaatatattatccttttataaaacaaccataaaataaccaaacagaataattaaaaataatagtgcaacaactaaaaaataaccgtaatagagaaaatttaatacagtatacattgtataaaaaatagtattttttaaaaaaaaaatctacctcacattaaaaaaagaattgaaattttcagtagtgtaaaaaccccaaaaacagattgggcctcattcatgttcaaatggcccatatataatttgtgtaatgacactttcttttagttattgctagatacagcccatattgattttaacatttcttttccaagtagaaatggcgatgtaactgactttgttttagtattatcataattttggggtttttattttttttttgaaaaatttacacaaagtacctaaagtcactttttaaaattttcgtagtatatattaatggactggcattttattagaggaaaacagcattattttcatgttgttacaacattatatattttccgcaacggaaaaataacatcatttttagaataaagtaaaaataataattcctagaaagtaaaaaaaaataatttgtaaatacattaattttttgttgtttttgagtatttatggaataataatcctttcttttttgtagttctcatgcagaaatctgggtcacacccacttgctagattagcgagaatgaattataagttaagtatataaaagagagacacaagaatttatagtagtccactccttgtatcgcgacagtaatggaataacgtctactttgagttttatttctcaagagatggattacaaaaaaattgctaagtttgaatactctaatttttagagagagaaactagagagatgctctaaccttatggctacttttttgaacttaaaagatgacctagtggagctctccttttatagtgtcggaggtcctattaaaatgacaataaaataatccaaaaaatatggaaaaatacatttaagctatttttaaccgtaaatgatgatctaatggtaaaattgactccggaggtcggtcgttaattttttgagcttgagtcgtgtctgcgggacccgcttcgggtaagttgtatcttaaatttgtacctctcttaagggtgaaatttggagtcgataaattcaaaattgtgattgaagtgtatgacatgacttgatagaacattaaaatagtttggaaacgcaaatttaatcgtgtcaatcagattagtgagttatggttgttttactaaaggttgttctgggcctattggccaggttgacatctcagcgcccaggt

SEQ ID NO: 34773 - DNA, 3688 bp, Cannabis sativa
gtaaaataattccaacagttttttccgtgcgtatggaagatagatgtctccttttttatttttggtatttacagtataaaagaaaaataaagtcagggcagtaaaaaatataattttgtcgtgtaacagtataaataaatatttgcccaaaatctaatatttttgtgaaaccccctaaattttaactttttaaatctctcgaacgttctctcgtgaaaaccctacaggggtgaggcaatgtcttcttcctcccgtttctcgtccgtaacttgtcggtcggcatcgccgatcaatgtcgaccactttcagcaagtcttgtcttttgtgacatggtgtgattgtctctggtttgtgtttgtttcttgtttttctgggttgtgtgtgcttctggtttgagagtctaggtttggttctatctttattttcttccagggtccgattgtctttctggggtctgttaattttccgaggagtgactggtttgccttgttttctgatgttggctttcctgtggtgcggctggtgtgcgattggtgtttggggtgcgttaatcttcagggttgcgattggggtgcgactggtgtttgattggtgtttcctgggtggtttccaggggtgcgattgggctagagattattcctgggtcccgttgtctttggggtgtcttcgggttgtctttggggtgtctttgtgttggtgtgcgatcagcccaggaagacaacataggtatattttaccatatacgtgtctatttgtcctcgttggtggtgtgggatttgtccagggctgtggtagtcaaagttattgtttattggtggaagttaacacagtacagtgctccctcatcgtggcagtcaatgcagaattaagcacttaaaggtcaagaattaaaaccaattaaacaagggactaagttaagctcattacagggtcgtggttcgggttcgtgattattttttctaggttgagattgtcttcccggggtgagatttgcctggtttggtctggctggtttttgcgtctatagccttggtttgcggttgctctaggctttggcgtgtttggttgttggtttcagtcatggcttcatcgtcttctccgatggaccttagtttggagtgtgtgtcgattatccctctagaggaggaggaagagcctgcggtcagttatgaggggccccttattgtcgaggcagaggttcatactcgatggagtattgtgggtcagttcttaacggatacgccaattgatttcatggcgatgcagaacttatggttttgctttggaagcctggtatgtgcatgtatgtgaaggagctaggaggtaacaagtatattttttaattctatcatgaaattgacatccaaagggtgatggataggagtctttggatgtttaaaaatgctcctcttatctttgaacagttgaaaccaagggatgttcctcgggaggttcctttaaatcatctcgatatatgggtgcaattacatgatattaagtcgggcttcaaaatagaacgggttatacgggatgctgggaattatattggtagctttattaagtttgatgagaataattttaatggtgtttggagagattatttacgggtttgggttcatttaaatatcgaaaaaccattgaagcgtagaatgaagctataacagattggtggtgattggttctggattaattttcagtatgaatttgtgtcgactgttttattttatatgtggggtgattgggcatacggatcagttttgttctcgattgtttactcaaccaacctcaacaatcgttaagccttatggcacgtttatgaaggcaatgcctcgatgacctcagtatgcaatgggagctaaatggctctgggctggggcttctagctcatctaatgttggtggcacgatgatggttgagcctaggcagtcgaagatgagtacagggtcgggttttcagggatcaggtggtgctgtcaacccgattgccatgaataatggagataattgtgggcttatttgttctccagctgcgttgagcgaaaataatgggagtaaaggatgggaggcggtagagaatagcaattccaatttggaagaggagggaatggtttttatggactctaaacgtaaacatactagtaaggaagtttctattggcgttgttgggccgatggagggtgttgatgtgtgtatgggggatgctcttgctaatgtttcaaaaaatatcactttggcaggctcggtcgagcgagcgagccagtcatcatgagtattctaagttggaattgccgtgggcttgggaacccagggactattcaattccttaaagatatgatttatcaatagaagcccatgtttatttttttttttgagacgttatgtttgaaaactcgactggagcttctagcatcacaacttggttatgagggtctttttttcgtttgatgctcaggggagggtgtggtttagcaatgttatggaaggataaggaggatgctgagattgtcgagtattcgcaaaatcatatagatatggtggtacgatatgatagctctcatatctggtgccttacggggttatatggagaacctaatcggtcattgcgggtcaatacttggaatcttatgagggtgctaaaggaagagaatgatctcccttggtgtgttattggggacttaaataatgttcttagccaagatgataaaagaggtggtaattcttatcctgattggcttatagatggctttcaacaaactgtctctgattgtaatcttgtggatcttgagcttgtgggtcatccgtttaattgggagaagagtaggggcacggatagttggatcgaagtgaggctggatagagcgctagctaccccttcttggatgagtctgttttcgaatgcacggttgattaacatggtcttttccacatcgaatcattgtcctcttttcttggatccatctttttggttctatgcagcttctaggagggtgtttcggtttgagaatgcttggctgcgtgattttaattgctatactattatccaggagcaatgggaagcttgtgtatcaggtaacattgtggacaaagtggcggctattcaggatttgcttggtgtgtggggtaggagcttaactgacaattttaaggagagaattcaaagatgtaaagccagggttggtgttcttaaaggctggttggatgtggagtctctttctgaatataaggaggcgagaaaacaacttgctgaaatctatcatcaaaaaaaatcttttggaggcaaagatccaagcaattgtggcttagggagggtgaccaaaacacgaggtattttcacgctgctgctagctcaagacggaaaaataatttcattcatgagttaaaagatgagaccgattcttgggtttagtgggggtcaagtttgtctcaggttataatagactactacaccgatatttttcattttatggggtcgaattgtgcggaggttcttgaggttattcaatgatccataacatatgaggataatgttgctcttttacagctagttgtggaggaggaggtaaggcatgctatcttccaaatgcacctagacaagtcacctgggcctgatggattgacgcctgctttctatcagaagtgctgacatattgtgggtaaggatgttgttaagatggttcaggatttcttcc

SEQ ID NO: 34774 - DNA, 1708 bp, Cannabis sativa
  modified_base (174)..(175): a, c, t, g, unknown or other
tccaagcttagatcttgttattactctacgatagaaaggaataagggttagagatttgagcagaaggagtcatattaatccgttgcaatcaatgtaaatttttctaaactcttatgtgtttaatttcatcgtattagaaaattcatgtttaagatgttaatcaacatacttgtnngtaaatctagatcctagtaaaagtaaatccaaacagtatttagtataaagcttctccaaaatcacattctccttagtcataaaatccatgattttgtgaatttcccatctatatgttttactcctcttatggttcatgattctttactatttggtaactacatttgtgttatcattaagtaacactagcagttattccatgtatggaataatggctaagtctggattgaactttctcgagtttgaataattctctaattgtctttaagacagtcttattataattcggccttactagtagagttagagattctggataggttttaaagtttctctaaaaatcactgctccactcctagagtaatcatcatttcttaagtaaactttctagcattgacgcaagtctagaaatctagtttggtgtagcctaaggattttaatgaaccacccttataagctaacaaatagttcttctttttgtatttcaggatatgtttaattatcttccaatgattcaatctggattgaactaatacttactcacaactcccactcaaaaatagatgtctggtctagtgcatacaagagcatacataagacatcttactattgatgcttagagaattcttttcttggcatttatcttttctagagtagttggaaacaactcattagataaatgaattccatgtctggaagtcaagtgacctccattagtgttagccattgaaagacactctatcatcctactaatgtaagctgcttacgagagaacaagtaatttgttttacatatatatcttgacaatttctcaatcattgtttccaatgactaagataccatctacgtaaatcactaggtataccacaagcactagtgtcttccaagtcatacttagatgagttccttgaaacccccgcactatgacaagatactgtgacttttttgctgcctctttagccaacttgacatacaatacatggagattgagaaataggtgttattgggagaaagaaaaagcagaaactggtttgttgatcaaagaactaaaggctgaagtaactcatcagatacatttgttttggccaaagaaaatttcagaggaggataaacaatggtttttgactttgtgaataatgtaattgtatagaattaattgtggttttgtggaatacatgtatagatgatcatttaggcccttgatgggtgctattagactgtaaacacttgtttttgtgccattacattttctgattcatcaaaaaaaaaaaagatactatgactttatatttagagatattagtgatattgtcctcttcagttgtcacaacttgcgttggttcaacaaaggcagttggatcatcctttactcggtgtagaagatgatggaacacttttggagtgaaactgaatggtatccccactttgttgctactttagttttgaaattatatctatataatcaacgcctcgaaaaaattgttggaaattattttaccaggatcttagatctgctcacaagtatgttgattaa

SEQ ID NO: 34775 - DNA, 1063 bp, Cannabis sativa
aaataatctcttaattttataacattaacattttcaatgagtaaacatatatattggatatttagtactgaatctttaagagctttgaaccattgttgaatcatttaatatttagtgttgaaccattgtagatttcataaaacaggaagagggcaacagtaatgtaatatctcagaaaatataatgatatttaattgagtatattttattaaatatgtgattaagtgagtattagagtaggattataatcctacttaagctaattacgagttaattagtgaaatatgattaaagaaacaaataaagcgtaatttattaattacggagatttttggactacgggggtgtcgtggataccatttccaaaataaaatattgtcgggttcgacgaccgtgaaaactcgatggagtgatcaagatgtcacgacgatataagatggattaattagaattggaattaattataccgaactagtatagaattttaaattatcggtttggcaagattagttagaatgaccaaaatactcctaggacctattttaggctattgtgtttttgaggggcaaaatagtttttgtggaatttaaagttttgtcttttatgcatgtaacatctagctgaaatagaaattaatttgggttattttctttatttgaattaaatgataaagtagaaattagatgtaaaaacctaattgagtgatattggcatcaacctctttctctttccatctctcacgacaaccctaagaaccacctaggctaggagaattcattcagcaatcttacaatttttagaaaaaacaattaaggtttagggaatgttcaaagcttggaggtaagtttaatactcttttccttgaaatttctatggtttgaaatgagttttgcttggggtttagtttaattttggggctgtgatgttaagctaagtttagaagatgcttttaggttggatttaaagtttgtttaagcttgatttgcttagagctagtggttgtttgagttgtattggtttaggtgaagtttattaagcttaatttcatttaattatgcaattt

SEQ ID NO: 34776 - DNA, 1627 bp, Cannabis sativa
tgaaatcatgtctcctaagccccgaaaatcaaagaccctttaggaccccaatgttaccttcgaggcagaacttattgagtctaaggttaggtctcttggggcctacattggtggcattctacagtcttgcggcattaagcagtggaaatggtgcgttataaggcctgtggcacctggggaattaagatggtttcctccagaaagaataatacgcgaggagtgtagtggtcccagcacgagtaactcttcgggtgttggagcttggagccttgagcataccaaggctggagcggtccttcccctcagagattactttaaggaatactgcaactacctcggggttgccctgttccagttgaaccccacctcatgcaggatcctcgtgagccttaaggttctatatcacatcttaggctaggagtgcgctactccgttggagatagcttgcttttactctgtcaaggaaattcttgcgagaaataacgctgcggggggcttctattatcttggagcctatactggcgaccgtaagctcatagttagtttggccaacaagataattttaaagaggacttcttctagacgacgggtttatctccaataaacactactgccttctgaattatacgtaagttcttttccttgcgaaatcattcatataaacttgtagcttttaaagttgcttactaaatttttatccatttgtagcagttcctcggagaccagttcctaccctagagatagccgagcgtcacaaaaccttactgagcctgccctatgggttacaagatgcatattttttgctaaatgagcagaacctaaagaacgttggcctccttgcatcagacgaatatacttgcgattataaaatacctaagtatacctcgtggcaaaaggtccccgtcccagaagaagaagaaaatgatgactttgtggctcgcgcacactatctcaagagagtccctcctcgggtagatggaagatcctgaggtaatcaatgtgggtgttcgcccacagtgcttagggccgaacgtaataccttagtctcctttcatgatagtcagtataattttttcatttggaatcctttcctcatagatcgcatctcccataggttcgatagttggtacccacattttcatgttcaaattagctgtaacagccctttctatgggtttgctgaacagtatggaaccatgttggatagagcaagtcacatagattcaagctgggacttagattcactaaactcttatgacatatttaggatcacagaatctagagagtttagtgaatattataatccttcctctccatcctctgaaaaatatggtaaccctcctaagtgggagttcttccacatgcttattaattttaacatagtgttaatgaatccttcttgctttggagatatggacatagacttggagaatttgttcaaaagtcctccccaagccgacaagagatccaagaagagggtaacctaagctgatgaggcctcagactccattaaggaacccaaaaggaccaggaccaaggccaacaagaaaaaatccttgagccagcttactatcgaggctgctaagtctcccgatgcaaggagtgaggtctctgctgcagggattga

SEQ ID NO: 34777 - DNA, 3000 bp, Cannabis sativa
actctcacgaggatagacattagatcgatcagccaattgaatgactattcccttttcttttagtggcccaagattcagcgaagcatacatagaatatggcatgacatttattgaagctcccaaattatcttttttttttcaaacctgcgctatagcgtctagaacccgtgctatagcgcctagcaccatttttcatactccagcttgtttctcgactcgattgctccttgtttctgtcacctgattagtattttagtcataacttcttcaatacaattcagaattgggcgattcaagatgttctggaagctaagaacgagatctaaaactttcatgttgagctccaagtccagttctgcttctaaggttgtcaaaatttataattaagttctgtcttgtaaaaccgagctcaccaacctccacaattttctaccaaaatgtgctaaatccctcaataaatgcatgattagtctttaaaacatccaaaacaattaaaattatactaatcaataatttaaagaatcaatttaagaatattagtacataaattaatcatatttataagacaaatatggactcatcaaaatacgtacaagaaagtataaatattattaatctttatattatatgaagtaaaaaaaatccaaaaaaccctaactaaatatatatatatattagaattaaactcacttaatgtgtcaaagttagtaggtccatctattcactcatcagatgaatccaaagaaagttgttagttataacagttggctttaataccaaattaaagaaaacctcaccaacaactataaataggattgtctctactctttcaaggaattctaagttctgatctctaatcttcaaagctcacactttagattcagattcaattttagagagagtgtccaagatcatagtgagtgtatatggaagaatgtaatgggagtatcactcttgaattgatttcccttattgtgagatatttccttgtaattattcactatgttgagttttatttttggacatattcaattgtgtactacttactattcaagcaataaagatccatgattcattttccatcttgagctaggttttttcttatctaatttcatttaagttctagttttgattttgttactggttctagttttatttgtgcattcttgaatattgttactgctataacaacctgttttgagagtgagtattcaccacaaatggtatcagagctcaaggattagagttcaagaatcacattcaaccaatcaagactcatcttcaacatttcaagaatcaaacttgaacttccaagaactagattaaaacaatcaagaacctagtttgaatggctacaacaagacttaaggtaaacaagttcaatggttcaaatgattttagcctatggagaattaaaagtgaaggcctttctagttcaccaaaggatctataagacacttgatgatgaaaccatgaaattatttgaagacagcaagaagaaacttgagattgaagccaaagcacacagcgccatcctccacatggggaagttttagatgaagacaaggccatgaagaaatctcttgcaaacaagttgtatctcaagaagaagttgtacacacttcaaatggatgagtcaaatgaattaagaaagcatatatagatgattataaaagaatcattcttgatctgaataatcttagggtgaaaattgatgatgaagaccaggctataatcctgttgagttcacttcccaagatgtatgagcactttgttgatacaatcttgtatggtaaagatactctgaccatgacagaggttaaggctgcattgaattctaaagaaattcaaaagaagggagatgagaaagaagagaccaatggggaagaattactcattgttaagggaaaaatccccaagagggaatacaaggaaaatcagaactcaaatggctacaaaggtaaccattcaagatccaattctagaaactttacaagagggttaagctctaatgaggctgtaggaaagcaatgatattactgcaagaaggaggaccactttacagataatgttttggctttaaaggctaaattgaagagcgaaaatcatcaaaagtcaagtccaaaaggaaaggcatggagttgctgatgttgatgatggctatgagtcatctgatgcacttgtagtgtcatatgatgcatttgtgatgtctagatcaaattcaggtagagattggattctagattcaaggtgttcatttcatatgacaccaaacaaagaactatttaagactctttcagagagtcatgggggcacagttcttcttaggaacaacaaagcacgtgagatcaaaggtgtgggaacaatcttgttaaagaatcatgatggagtcatgaagaccttgcagcaagtaaggtatgttctagatctcaaaagaaatcttctctctattggtatgtttgataaattggggtatgttgtcaaagttgaggaaggtgtaataaaaattgcacaagttattaaaactgtgatgagaggaaagttgagtaatggattgtacatcttggatggaaagacaatagtaggtagtgcagcacctgttattaactcaactaaacacagtcaagcaaggctatgacacctaagattggggcatgttagtcagagagaacttgaggaaatgaataggaaaggattgttcaaagagaagctaatagaaatacttgaattctgtgatgaatgtgttttggggaaggcttgcagattaaagttcaacaaggcagaacatacgaccacagaaaggttagcttatgttcattttaacctttggggcccatctaggattctaaccaaaggtggagcacactactttatgagtatatttgatgattatagcaggaaagtctgagtttatttgttgaaaagtaaagatgaggctctaggaacctttgatacatggaagatgctgctagaaaattagactggaaacaaactcaaggt

SEQ ID NO: 34778 - DNA, 2651 bp, Cannabis sativa
ccacaccccaagattttcaattttgcactaacagcagcatccacattcaattttagtccttgattggtaggtggtgtccatggagtagctctgaaatgttgctgatctattgcagccgtgtctacttgcctggaacgttgctgatctgttgcagcagcaggagaaatactggtgcaggaagagagttgctggtttttttatctgtgccgaataatttctccaggtgcgagttggcaaatgttgcaatggttaggctggatcttgacacacctccatgaatcactttgtttcgctcatgccagatagcccacattgtacatacaatcaattcaaaatctggttttgagtgaattgaagataaacgtattaagtaatcaccattgtgcatagtttgtgcatatacatggtctatggtgaactttgtatctctccaaacctccctagcctttgtgcaattgcacatggcatgacctattgactcccacgcattatgacacaaggaacaagtggctgaatttatgacttttcttcggcatagtgcagtagccacatgaagagcattttgcatcactctccacgcaaatattttcacctttgatggtagatttagaccccaaaaagttttccaccaatccttatgtgcgcttgaaccacttgaatttcgtttctcagctatattttcagccaaatggaaacccgaatttacagagtaaagacagttgtggtatgatgccatatgtatcgatcattgttagggaagaaacttagaggaattgtaacaattttatccacatcaatcggttgaaagtatgcattaaggagtggtaggttccattcacgttggtctgtaatgaaatgtgatataacgacattgtttggacccgagtaacttactggtttgaagttatagtgactggggatccatttatcaacaccagccaacaatttgaagctgttaccaatcttataacgcaagccctctactaatagttcacgtccccaatgaatgccttaccaagtaagtgagggagagtgtccaagaggtgcctccaaaaaggtgttggagaaatatttgtgctttagtcggttgaaaagagaatttggcatttcaaaaattctccacgcttgttttgctaggagagcttaattgaagtgtacaaaggaccgaaaacccattcctccttcaaatttcgacttacagagcaatttccaacttctccaatggatttttgaaccatctttgtttgaaccccacaaaaagttagccatcatggattccaattgattacaaaaagttgttggtaaatggaaacaactcattgcatatgttggaattgactggaccacagctttcaagagcacctcctttccaccaactaagaatagtttttcattccacgcatgtaatttttgccaaatacgttccttgacatcactaaacatttcttttttgtatcgctctgaaaacgtagggagtccaaggtaacgttcatgacattcactaattggcattcctaatgtctgatggaagaaattctttgctgcttgagtggtgttaggtgagaaggacataactaacgttcttgtattcagcaattggcctgatgctttgtgatagatatctaagaccttgttaatggcattttcagaactgtttgtagcttcacaaaaaaggagactatcatctgcgaaaataaaatgtgaaattgatggagcatgacgtgttaactgcaaccctctgagattgtgagttgattcttcgctttgtagcaatcgtgataggccttcagaacagatcaaaaaccagataaggtgacaatgggtcaccttgccgtagccccctagtaggctaaacatgaccaacttcttctccattaagcacgaatgagaaactaatagagtgaaagcaactcatgatcttagaaacccatttatgatggaaacccatctttcgcataacctcctcaatatagaaccactccactctatcaaatgctttgctcatgtctaatttgagtgctgagtagcttctgttcccccttgttttatgcttcaaatgatgtatcaactcaaaggccacaatgatattattagtgatgagttgattggagagaaaagcgctttgtgtttcagagattacaacaggaagaacctccttgaaatagattgcaagagtcttggaaatgattttgtaaatgacattacataaacttattggtctgaaatctcccatgccacgtggaaccttaatcttaagaattaacgtgatgagtgactgattaaaggattccatactacagccatcatttaagacgcccaaagcaaccttcgtgactacatccccaacaatgtgtcagtatttgtggtaaaacattgctgacattccatcactcccggagctcttatctggattaattgtcttaatagcattgtagacttcactacttgtgaatggctgaataagagactcattcatatcagatgtaattgttgttggaattgttgcaagaatgtgactcaaagcttccaagttaactgctgttgcagaaaaaagctcaccaaaataatatgtaatgatatatgtcataccatgttttgaacttacaacattaccattattatcaaccaaagatttaatggtgttatgttgt

SEQ ID NO: 34779 - DNA, 5159 bp, Cannabis sativa
cctctttaaaatctggtattcttttttactttatcgtttttgtttctcttttaattatattattcaattgcttatttgactcactgtcgttggccaaaagctagatcaacagtatgtgttaaaaaacaaataatatagcagtctcccacatgattaaaatttgtgtaacacactagtacactaatgtaatattatttaatcagtcaaatatctcattgttgagctcaaatttggccaaatgacaacagagtcgtatttatgactaatataaccacgtctacagaataacagcaagtaaataaaaatggacacagtattttttagaggtttggcccccttagataacgggtaatgacctactgcccttttggttgtattgatactagacattgttatcccaatttttgcacacatgacgtggcatatccatgtgggcaagattaatgccacgtgaagtacaacttgtcaacaagaacgccaaatacttaagcggacaaagagacaacgaactggccaccttaaggggtctagccagactccccctagttggccatatcgccagcataggctggctagcctccaacaaaaggaaaggctgcacatcctaacaggcacttggccaaccagcttacaccctggcaggcactaggtgctagcttgcaacctggacaataattcaagctacaaattaggcttcaaccacccacaaaataggccataaatatcagctattaacctattcttggggattaattaacatattaattgtttattattttattatgtaacagatatattatatttcctatttttaagggatattaacctattattctcttgtaagctctcctatataaataacatcaacctaaacctaatttccctaattcctaagcaccctaagctctcaagctttatgtctcaaaccctagctctctctctccctttcttctacatgccctagccattgtagatgagactaagtctccttcatctctcttacttgacatttgcgttatgattctcactattttaatcttaagagagccacttccgaatccacaacagttgtaatctgagtggtattatctcttgtattaatacaaccaaaaggggagtaggtcattacccattaactaagggggccaaacctttataaaagtattgtgtccttttactttctttttcttatcatgtacaggtggtgatatctgtcataaatgcgatcccgttgttggttggccaaatctaaggtcaataattaagtgctttcattgagagtgttatcgactaatttaatctaacaccatggttaacacaaggagaactctggctataactcctacctcatcagatcttcctcaaggccaaataactattgatcctaatgtttgtgttccaactaaaattaaaatctccacgaattttatggatgtggccaaccctaccaactcaacaggtacaacaaacttgaccaatacaattggtcaggttgacacttccaacctgactgatcccaatgaccagcctctactgcacagggtagatccaccattggcacctcatactaaaggtatggccaatgtggagcaaccctcgggaaccataactaagtttggcctttgatattatgttcgggaaatagggcctagaattggtgagccagccattggtgagcttcatgtggatttaggagatgattttgagttggccagagttagagaggttgtttgccaagtcgacccaactaaagaaccacgcgttattgcatgcaatggattcagacaatagagacataaatttttaagatggatggatgactaggagtacatcctctaatctcatcaagcaaagctaggccaccataatagagaagctagtgacttggtaaggaagttaaatgaaagagctacccgaagaggtcaagatcttatcagagatcctctccaagggagactagtcaatagatcaggcaagatctacaaacaaacatcccaactaggttcttcaagaactaggattgaccttcccttgccccaaagtggacaagtcttgccacatagatctagtggcgggaccaaccactctagcaaacagcggattggggggctggccagggatttctggcacaacaacacccctacttggccaacatttcgttggtcaaccttttagtggtgcacctctggccgaccaacagggtgaacttcctccctgaaatattcaggagcaagttatccaaaggccaatcattaacgagctaggttcaggaacgggtggaaacacccaagacaacaacaactcaagaagtgagtacaattgcttcaggcagttagatccatcaaacttcagcaattggtgtgatctacccctatcaacacataggttgtactagacaatcatgggagaatgaacgaccaaacactgcctaacataaggttggctggctaagaaaagctgcctagggaagggctgatcgaccatggctagtttccttacctagggctgggtagccaaagccagctgctaggcctagggcttgccatccctaaacataccctctcccagggtatggttaactaggctctggccaatccagggctataacctagtcaagaaggagcaatcaactagggtcctacagtgttagatccttttgtgcaagcttagttggatcaaataagagacgtgatcaaggatttggctggcccaaaaccatcagaccttgaactagataggtaaaggggcttaccattctcgtcttacatcaatgccttggccttgcccaagttcaagatgctggtatgaaaaatgtgtatcagacgagaagacccttcacacacatcaactactatgagatgaaacttcatctccagaaagttactagtgatgtgcggtgtcgggtcttctcgacaaccatgtcagaaatagatcaacagtggtacttcaagctgggtctaggaagattcaattcttggaatgaattttttaaagaattctacactcaattctcatcctcaagaccaacaccattgcagcttgcaaaccttgtcaaggtcaaacaacgacaaggcaaacctttgaaggattatatgcaaaggttcatggccaaggccacaaaggtcaaaggcgtaattgaagaagactattatatgaccatattgggggccttccttccattgagtgacttctagaatgatatccaaaggatctcaaccaacatcatgaaggagttcctcgatagaactgaaggctttataaagctggaggaagtcgttcgacaagcccagaagggaaagtcaacaataggcagtcttagaaagctatacagccccaagacctgtcgaatgcccaggccaacacaagtaatgttgaccatacccctagtggcaagcgcaacaacaataattctgggcagaacagtgtcaaaaaggggaaatacaaacttctcccacgccatgaaactagaaagataaggaggagaaatacacatgcttcacccttctaatggagaaacttgggaccatttatatggccacacaagacagtatcccatacaagaagccccctcccatcagaagggagatgagtaagagggacatgttgaagttctaccaattttataatgactttggccatgacaccaacgagtgtctgaacttgaggagggagattgaatttctaataatgaagaaaaatctcaacttgaatcgttatgtttagaacgaccaatctcaggcacaagctgcccaaaacggagaccctatgccccctctaatggagggtcacctaggggtcataattggcggatcccatgttataggtgagactagcaagacttgggaatactatgctcagacactctatcacgagcctaaaagcgatgtcttgatggttgaagaaaggggctcaaagtagctcaagcttggggagcctgccatctcttttacaaagggagatgttgcccaagttaacttcccgcacaatgacaccctggtcattactgtacaactgaggaacatgacggttacaaggtgcatggtggataacggagcctactccaacattctttttagatcaacatatgaaaagatggggctctaactaactaacttggcaccttacacacaagtaatgtatgggttctttagttagggaattgcacctatagggtacatctgactgcccttgatggttggagaaaatccaacaacaagaatggtaaggcataatttgtggtaattgacgtgccatcagccttcaatgctatgataggttatccagccatgtacgacctaaaggtggtaacatccatctaccacctttacttgaagttcctaacaaggcatggggtaggatgtttgaggggaaacaaacagtttgcccacaactgttacaacttggccttgtctaaatccaagaaagagaatatgcccgccaagagctctgatgaagagcccagaaaatggcaattaagcccagccaaaagtagggaggcagacatagatcctcgcatcctatagacaactttggacctgtagaagaactggaagaagtgaaggttgatcacacttttccaaccaaaagacagaagattgggaaaggtttaacgccaaaaataaaattagtattgataaaatttctgagggaaaaccttgacctcttcgcatggtcacacggacacatttgtagaatagaccattctgtgatgacccatgaacttaatattgatccaaacttctgacttgtgcaatagaaaagtaggttgttggaaaaagagcgcgcccaagttctaagagatgaagtcaaaaggttatgtgccaatgactttatcatcaaagaattctatatccactttgggtatccaaccccatggttgttcccaaaccaaacaacaagtggaggctgtgtgtagatttcaccaacctgaacaaagcatctccaaaggactgctgtctacatccaaggatcgaccagctagtagatgctacagctaaccatgagattgcaagcttcatggatgcttatttaggatacaaccaaaataagatgcacctaccagatcaagagcacataagcttcatgatagacctaggcctatactactacaaagtcatgcgcttcgggcagattaaagtaggggccacctatcagaggct

SEQ ID NO: 34780 - DNA, 1489 bp, Cannabis sativa
  modified_base (107)..(113): a, c, t, g, unknown or other
gattgatattaattaatttatgagaaatgctaaagagcattagtggtgcctagcaccctcctatgtgttaatattgctattaatccaactaagtatcgggtcccatnnnnnnnaatataatagcttttaggaagtaagtatcgctagccaatcgaaatgcaacatgtcgagaaggtgctaggcccactagtacccaataacaatgctcttaatttattaatgaaattgaccatcacgtttatttaccgcctcacaaccatgcaatcataaacaagttaatttaattatctattttttaccgtcatttaaattaattaaatcaaccgcttctgtaccccgaaaaataacattggaaaactaataaaactataccagacaaaacaagcacgttttcaataatttaataattacgtctcaaaagataaatgatgtaaatacaatttataataacacagttcatgaaataataaaaatatgtaggcgacattgcataaaaagataacgtgagctagatctgataataataaaaacacaatgtcacgcatgtaaataacaaaaaaaaagccatgcccagctgagagaggagaagagacactaatattataggtaataatagtaataatatatgtaattttgagtagaattaattattaatgaccaacgccgggactatgtccaggagtggttggtcgaaaagcatcgatttcattcttggtaccaaccaccagcagcggcggtggcttggattttcccttgcgagctggatggctgatcatcatggtatgtttcttcaactgatgatccaccctaattctatgttttcttgcttcaacattcactactacctcctcacacaaaatcatcattacaaataaacacaataatatgcacattttacttgatgatgatttcaccattttcctgcctatgtatacgtacgtactttgaactcttatataaatatatatatggctagtgcaactgattttatttttgcctagcttcttaatatcgaagatagatcagaagcatatatatatgtatatatataggtaagattataaagatatatagcaggtatacttggaatgtgttgctccaaacgctatttatagactttgaaaataagcacacagtcacatgcatgtgatgccctttgcttttgagaaatattaataataaaaaactcaaaaaatatatgaaaaagaaaatgaaaagttgagagacatgaatcaagtccaaagtttacggaagattcggaaagatattcgaatacttactgcaagagttaaaagagagaagtatactatataatatatatatataattaatgtggactgttggatcttgtatgtgattaatttaagggttgagattaaatagattgtacacgtaacactactacaatgtaggcttttagctttctttttttcaacccattttataaaaagggaagttaaagggtgtaaaaatatctgcattgacattt

SEQ ID NO: 34781 - DNA, 2581 bp, Cannabis sativa
cgatggtattatcgtatgaacgttttagactcagcaccgtgtgggacatggggataggattatggttgggtgtatggacgcctgattataatcaaggttattattttgttattgtttatgcttttcttactgagtttgttgactcacagttgctatttccatatgtaggtaaggacaaggctaaggcggagcagccgtgagaacgagcagatgaaaattgtacatgtcgaggcagttaggcatggatcgtacggtctttgggacatcagggcttattttgtagtcgcttggcgacaatcttttgtatatgcacagtgaaacttttgtaaatacttttgtaaatgggatccttgttttatataagtgtattattctaatgtttacaattaattaagcaaaattttaattactcacaattttcaataaactcattggttagcaacgagctgcacagttagttaaaaattacgttaacatgcctaaaattgttagggtgttacagaggtagaccttggtgttatgttgatcaagagagtttgagcaatacgagaagttatcaatctaagagttactcaaatacaaggtttgtgagacattatgaacgaagacaactagatctttgtgagcatttgcatagagggcaacttgatttacgaaagcatctaaatcagaatgcatcttacttgtgtcaacagcttaatgctaactgacagtaagaggatccaatccaatttcaaatcattgagttggaggataagtttaggagataccaagatggaaaatacgggaagttacctggttatgactcggacgatgagcccgagcctttccattccgatattatgaactctaaattcccccagggattcaaaaaccctcacgtctcgcagtatgatgggacttcaaacccatttgctcatctcaataactttaataccataatgcaagctagtaacatctcaaataatttgtgatgcattttatttccaacttcgttaactggagcagtgagtaactggttcgataaaatcactcatcactcgataatttcttaggaacaactgtccaaggattttaagaagcaattttaggcagctagagataggcgacccgaagcatcatccctaactaacataaagcagtagccaggcgagtcacttaaggcttacttgagttgctttagtactaccgctagtaaagttagaaacttgaatgacagtattcagcttactgcccttcaagcagggatcgcggctgacctctcaatagctgggggcgagctatgggatgacttacaaggtcgcccagtgagaaataataatgaattcaacaaaagagcgcaagttcttgtgcgcaaagaagtagaagaaaatgagatgaagttgctgaagactggctcgggaaacaaacctagcactaccacggcaagtaccgtctcgacaaaggctgaaagtccaagtggttcgaacactaaaagaaaagaagactcgagagaatcatctaaaaataagaagaaacagaaaaagcacgataaatatgtgccaatttatactgttttcaccgagcttaatgaaacttgagaaaacactttctcacaaatgagcatagggttgcattccgcaaacctgagctaatgagacatgcgagacaccaatgagattcaacgaaattctgtcaatttcataaggacgtagggcatacaacaaaagaatgtcgacagttgaaagacgagatagagagtcttatctcgcacagtttattttcgacaatatgtaagacgtcagggtaatgagaaaaaccagccaaatccgcccaacaactaaggcaaccaaggattaaaacctcctcctgtagaaggagaagatatattcgttatctcgggagagccacatctcgtttgagagattagtaatgtctaaaagagatatgtcaatgaaatcaagaatgggaaatcagtgttttttgctccagaaacactaaagaaggccaaatcaaaagaagaacctccaattgtattctccgaggaagatacgaaacatgtaaggtatccacacgtcgatcctcttgtgattactgttcaatttgccaacaagaggataaaaagagtgttggtggataatggaagctcgataaatatcctttacatgaatacacttaagaaaatgggactacaaaatgcagagttaaaaccttgcatggtgaacttatgcggatttgctagagatagtgtcaccagtcaacgcatcattgaactcccattaactataggcaagccaccattatctacaaccttgatgcaagatttcttagttgttgatctaccatttgtttataacataatgatgggtcgccctggattaattggactacgaacactcagttcaatcaaacacctatccttaaaattccaaacaccatcagaagtaggtatagtgcgaggtgaccagctgttagctcgcgaatgttatcgcatagagattcaaaatagaagagccaaccatcaattaatggtgttcttaacagaagaaggcgagaagaaggaagaggatctagatcctagaattcaagacgagaaaaacca

SEQ ID NO: 34782 - DNA, 2103 bp, Cannabis sativa
tagtatttttaatgtacttaatgttatatcggtatgatactcaataagtggtttgtaattttttttgtctcttgtatttttttcatttgtgtggatgatctttgtgttatttactattatttttggtaaataattattaattagtaattaattttttatgaatattttttgtaccatttactatttttttatcttttatgtttttttgttttattttttaaaaataattttttgtacttgttattggtactcatgtacttaatgttatatcgatgtggtacttaataattggttagtagttttttttttgtcttttttttttaattttactttttatgaataaccgttagtattatttttttagtaaatgattttttcattattattactatgtgacactttaaggtgttcaataccatattgatctggtactcaataattagttagcactaatattaatatgtactgtttcaaaaaaaacaatattaatatgtacttatctttagtaactttaattagaattttaattttttttacatctaatctgctaatttaattagatattttatctgtttttatttaaatacaattgataaaaataaaaaatatgatcaatccattaattttaaggatagttacgtgacacgaccacctagtgtatatatatatatatatttgtaatatatatatatatacaactcgacagtactatatatgcagacccagttgcttggtttcacatgcatttgcttattcattaattggttttgtcttcttttctctatttaaggttaagtactttttcaccttttttttctctctgaattttgttttcggggcattaatttgataataaaattacagctttttctttttttatttaagctaacttcttgatactctttaccctcatttgtttcttgtctactcctattctagttagggttttattaatcaattaaggttttggtgtaccatggttgcatgagcatgattgttcagagtaatcgaaaaaatgattactcaataatataaaattatatatatatataactttcttatgagttttcttcatgaaataatatatgagttgtatattttttcatagtgttgtgtttgttgagtctattatggattaaggatttggtcaaagggaataatctttcaattggtaaggttaggtgtacatataccaacatagctaaataaaacaactaaacacattttttactataaattttactatatgtaactatgtatatacataacatcttcaatcaacaataaagaacactttcaaaaaaaagtaattggtaaaccaagtaaaggttctggtcaaagagcagaaaagaaagattaaaaagtacttgccttaaataaaaaagacatgaaaaatcagtaccctttcacacagacaaacaccacaaataaaaaggacattttcaatgcaataatctcataacaaatagtccaatactccttttgtttgtaactacttagtttgattcattggttattagaactacttgggactagctaaagtgaccatatagagaatattagagcatgtatattaaagagtctcgtattaataatgtgtaaaaattaaattctatatataaaatgcatgaattatttctttcattaccaattgattttgagatggaactacattatgtttctcaacatggtatcaaaagccaaattaaactttaacgagtatttaatctaaatctaagaactagtcctataagacaagccaaaaagagtcgttgtgaaccaaaaaagtcattttgatcgagccgtctaagattaaagatcaaacaataaccaccatcttgagagagtctcacattgataatatgtggaaactaaatatcatacataagatgtatggactactcctttcattaccaattaattttgagatgaatcctatatttctcaacaaaaatattacttaaaaatgtaatttaaaaaaggcatctataaaacaaaagagtaattggttattaggggtgttcatccgatccaattcgcacttttttgggtcaaacaacatccaatcatcactaagtgcggatttcatattttggatccaat

SEQ ID NO: 34783 - DNA, 1890 bp, Cannabis sativa
  modified_base (1467)..(1467): a, c, t, g, unknown or other
  modified_base (1862)..(1864): a, c, t, g, unknown or other
ccatttcctgaagcagagacctctttcccagcctcaggaaactcctctataccagaaagaggctgacgcaaaggtcctctgatgcaggccacgggttggcgagattctctgatagaaaccatgctaacttctctcttgggcccatctgaaaccatgccaaccttcttcggggattcctcgtcaaccaggggaggatctctaagatcgctcacaagatctatgtctattcttgtaatgacgaagagaaaaggtcaatggggcaacaaaaagcatacaaatttaatgatatgtataaaccgactcaaatctccattcacaagggatgatactcaccttcaaagatcacttgtgaggatcccccatggcgggttacggggttcccctggtttggatcggtcggaagctcctcagccttggaatccatcgtttccagttccaattgagacttaaagttcttgggaacgaatggtagatggttggtgcatcctggtattatgagtttgggagagtgaacttatgaactcagaagggacattccagcaagagagagatgatccattttgaaaatggatttctcccaaaaagctagaggtttgtgaaatatgacaagcttaagccgcgctgttatacacaaagtccagtgacaagaaagccaaagatttggaaatctaacggttgggagaatggcagaatatgaagaggtgattcataatgaccctctaaactgtgcaaccgttaaaatcaaaggatgcatcttttccaagaagggattctgacgaaaatgccctgtgtaattattaaaaagctctttttactaaaaaaaataactttttaaggggcaattattattcccaaaatttggctgccatctcattggagaacacgtgtcatgataaggggaatatggatcaatgcaatcgccttatatcgaataactcattattgaagtgagtatcagagtatatttgtaacctgtagattttaaggtcttaggcgaggagctaatatacaaactagtacttagcatattagcgataaaccatatgtcgttgaatgcaaattgcgaggcatcaaggacattacacattggaagacgaaagcgacaaatatcaattacaaaagtccttagagtataaactaagtgttatagacggatcaactcaagaataagtaagcgaggtgcctgtctcgttatggggatctcatacaacttcatcatgttatcgtcagcgaggctcacaaccctagcaagttaagaaactaacattcaaatgagcttcgaagaactctttgtaaataagaatcgcgatcgacgcaaggcatacatcgttgacctcagaaggaaaagtggccccagctcgctattgagatcactgaaattaaagacgtgtttaaagcacgattattttgacccagtaaaagcatgaaaatcacagctatatgattttcaaatcataaaccgcattnacactacgtgatatgtaatcaaatgccatgattttaggtatgattggtgtaagcatattacagtgaactttgtaattaagtccactatgtaattataatagtgacagataagattaaaaaggggacaaaaaaaatcatacaagagaggccctgaaaaataatcagaaatctgaataagattaacttgtggactatgcagaattttcactacaaaaccatttaaaaaaccctgtgttcatctttttatttctatagcttttatttattttgcgtgaaatcactactgtgaggttcaaatttcgttaacgaaaacctgtgttaacataaactaatacatttttgaaattctcattaaaataaaataaaataaaactggaaaattattctaatttatnnnggtctaaaattaataaataaattaat

SEQ ID NO: 34784 - DNA, 1163 bp, Cannabis sativa
gccggtggcggacgtgggcgtcgtaaattcatgagtgattttaatcactttgtcaaaaaaaaaaatattatcatattcattttatatgatggtgtaatcaagagaatttatatataataatatctaaagtatttggtttggtgtaatggaatggtaataggaataataatggtaatttaattaaataagaatggtaataaaaaattgattacaatgtttggtttgtagttggaatgaacattgtaatcaaaattattgtgtttggttttgtatgagcatgtaatagaataaatttttgattcaccgaaataactcttttttttatttatatttataaaatatttaagaaaagggtaatatagacatttgacttttataacaatatttttattaaaatattagttttcctttataatggagtgtaattataatggagattttttttggtatataatcatcatcgcgatactcgatgtaataagtattacattgtaatagattacaaaagttaaaagagaaaatctaataatgtaatggaactatttattaccattattctgatctgtatttctggatgaagcacacatggttaaaaatagaaggtaatagtccaaataattactgattaagtctccttaatcgtggaaggtcacgaagagattattttggcctgggaagggtatgatctgggagaggcacaaagattttttacaaagaaaatgactatctaggacccagaagccttatcattgctctgggactcagagaagaccagactacctataagggtaggtagatgccaaagagccatacgaagagtctaagagagatgccaattgcgcaaggagaatcagaaggcacttgcgaggcgagagctagatggctttatgatggttatttatttctgacacagaatcagatcttgtctcctatgtcaaaccatggtagtgcgtgcaccaccctttgaatactcttctttatctaacggctcctctgagcattttatccacaaagtgtaagcgttttcccaatatgtgccctacaccaacaatggtccccactatacagttgatttgtgttggaatatattttaccatgatctagatttactaacaagtatgttttaaacatcctaatatgaatttctaaaacgatgaaaataa

SEQ ID NO: 34785 - DNA, 4067 bp, Cannabis sativa
  modified_base (1578)..(1579): a, c, t, g, unknown or other
agggcataaaacccaacacttatgccggtcatatccccttggcaccacgggaaaaaatctgtggctgtctttaatgtttcaatgatcttgcttctttcctctagctctaggttctttcctagacggataacctaagtggagtcgaggtcacacacactacttcctcggtgtcctccataggttctacagttgtttcggatcctatgcggggatccaactcgtcttgctccatgaatcttggctcttcacccctgtaaactactaatactgacaggtgcattgcgacgttgtagcattgtctcgcctctccttggttttccctcaatgttcccactccagcttctcgggtagagaaattgaggcataggtgcaggatggaggtaatcgctccaaaatctactaaggtcggtcggccaaggatggcattgtacactgttgggcaatctaccacaacaaaggtgtagtatttgaaagtgctttgtggggtgtctgggcatagggtgataggaagccgcactttccccattgggataagcattgttccgttaaatcctgtgagttgggagccgctgggtgacaaatccctgtccgtgagccctattgccatgaaggcttctttgaacaatagattcatggagctcccgttatctaccagtatccttgtcacgaccttattggcgatgggagtctctataatcagaggatcatggtgagggaaacgcactgattttgcatcatcttctgtgaaagtgataggttggtccatgagtcggggtctttgtgctgggagttgagtgatttcccatacttcattgtcttttatggccccagcgtaatgctttagttcgtttctagtggttcctccgatatgaggcccactggagatcatggccactctcccatttggccgtggtggtaattcgggcacctgtggagggagtgctcctccggggggtacaccggctacttgttctccgggcacacccccatgtcctccttgaggtaaagggcctcctgctggagctggggttagatggggtaatctgttcttgatccattcatacaaatgacctaatcgaattaggttctcgatttcgtctttcaggttcttgcactcattggtgttgtggccaatgtcgttgtgatattcacaccttttgctgggatccctccgggagctatctctatacaggggaggaggcttccgataatgcatattctgcctggtggcaaagtatacacgctcctctgtatctgtaagctccgtgtattgagtgtattgaggggtatataccccctccggtgccgcttatcctcagttcgggtgctgcccttcgaggacctttgggacagggtttggacactcatccccgagggattgcccatgggtgccccaaagtgtgatgatgcaggactcagggagaggctttgattatatcctggggtagcggagaattgtattctgctcatttcaggagtggtcggaggcagggctcccgaaagctatgctctaggtgcatatcctgatactccggtcaggtagtatcctccgtaagccactatttgggcttcttccannttgatgtacttttggacccttttttggaaatcttggagattagctgctccctcatgttgtagttcattccagaaaggagtccccgtgcggatcccagcctggtgaagggccagttgtagtccgtcgtctaccttcatggtctttgaagcctcttctttgaatctttttataaagttctttagagtttcagaaggcaattgttttataaagttctttagagtttcggaaggcaattgttttatattagtcaaggccgcgacaaactgtctccaaaaactgacttgtagcttgctctagcagtccactgatcatggttccaacttcttgaaccattcctcagcagagccgctcagcgttagtggaaagcataaacactttgtgtcattgctgaccctcatgacagtcatcactcaggtaaacggaaacagatgatcactggggtctgaatctacggtgtaagtcgccatttcgggcatcttaaagttcttggagagctcttcatccaatatgtgctgagtgcatggttcccggttcgcgcaattagagtctgagtcatcccctttttgtctctgggagaccctggcaatgtctttgcgtagtgttgccaactcagccaggattccctcattcaacgtgcctctggagattggcaacgcgtatttctttttaacaagatggtttcttaagtcaccaggcttttcattgattttctgtcttaggtcagctggagggtatcttcaatttccccccctctccccaggctcttggtgcacgtatatgctcgttcagtcctctcgattctgagggccaagactcgctcgagggagcttgcccctctgcggacctttccctttcgggaaatttgattgaactttttgcagatcctgggccttcttctttctccttgggatcgaagttggatttttctcaaggttttcctcgaaagggtatcgtataaggcttggttccctggtcttgggcttctgagtacttgatgaggactcttttggtgtttcctctagtcctgctgggatgtcctttgggtgtatatgtatccccgctgtatccatggcttttcgcatgacaaccattacctcttccatccttttattctgttctttttgagcagcaagtttgacttcatgatcagccaccttttgccttaagaccagcagtttcgtatagctaccttcatagtaggtgtcgtacccttcgaagttttctttgtatacctcatcgtttgcctcgtctcgttcctcagaacccacatttactcgtgaggccacttcttcaccttttgggttttgagcatccggaggaggacggggctgacgtgtattgtttcgagtttctaccattgttactctgactatttgactgttgtctttttaacgatgcttccttcagctctccatgaaagcaccaaaatgttgatcgagattttcggcaaccaattaaatgatataatgaggagagctatggaagcattaatgcaggtgatttttacgtggttcaagcattaatgagtcgtagtccacgagtctttgttatttatgagagttcttatacagagaatattcttggtgaatctctatctctcttctttactcccttcgattccttaatcgatcgatcaatccctttttccttctatttttgggtatttatagtctttttgtaaggatcaccagaaaaggatcgcttgtctctaagtgtcagccacttaggggcacaaattcctagctgatataaaatagggcatacatgacctataccgtaggtatcttagggattaggtgaaaataatctttatccttccttgattgatgtgattcttcataatggagtcgtcactagactcgtcgattatcgtgtaatcgccgtaaaagaggcttacgccatctatcaaatccttttatggggcatctgatacgtttcccccatgccacattaaatgtgatgtgactgctcgaacgggctcttcttctcattaggagatgcattgttacatttctagctcccggagagtaaaggcgtgctttatgctcctctccgaggggctcactcattgagatgcacttttctgtccatttaagacttagccaatttttgttggtgaggtgctcttaaaatctacgtgtcacacgcagccactgccacgtattttaggaaaaatcacaagcaacatatatgttttacatattattattattgtcttcttttatttcatttgatgggatacaattaagttttttctatttctcattaacacaataatacttaaatattacaatttttaataaaatttctctaaaatactaaaatatctaccgtaaaccaattatttaaaaaactatatctaaataaatatatataacgcgttttacttattattatatataaatcatcatatacatattcatatttttcgttctcatcctaaaacctactcttcattcatggcaaatgctttgtttttttttttttt

SEQ ID NO: 34786 - DNA, 2473 bp, Cannabis sativa
tgaactattaatattcttttatttaaggacttttgtctaattttagtaaaagaagtctaacatgaatgaaaattcaaaaaacatgatttagtacgtgttaaagacggggtgtgatttggtagattttaaaatttagaaaatattattatttagtatataaataattactgaaatgataaaattggaccaaaaagaaatggtaaaattgggaccataaagaaatagtcccacttatctatcaggtcaggtagcaccaatccgttattcatccactgccgagagcaggaggttttcgctgctctatggatacgtgaatccaggctcacgcattatcctctactctaggaacccagtgggctagactttcgtccaatccacaaaacccaattctcggcttgaaaagtaaaggcccaattagcccattgactcaaagtcaggtttttacaccacatactaaaaattttcaattttttttattttttttttactgtagggtgaatttttttttcaaaactactgtataagttttatactgtgttaagttttcacagttgttccacgattattatttattttttttttgaaagaacgccagttcaattaacaagaggaaaacaaaatggggatcacaggaggatcaccctccccacagtacaaactagcagccagacacgaacttctagttttcctagccaaatcatcagcaacaagattttggcttcttgaaatgaaataaaaattacaaagatctactaacttaattaaatctaaaacttccaaagaaacattacaaaagttccaattcggagggagcttctttgatgagaatgcatgaactaaagtcctgcaatcagacagaattaaaatcttcctccacgaattcgttgtggccatcgacaaggccattcgaattgcaagggccttagcagccatagcattcacgcattgggcagtatccaccttgaagcaccaagaattgtcctcagggttgagaacaactgtcgccaaccccgcataaccgtccttccaagatgcatcgacgaagaaaatcatctcaggcctttcgagggaactctgctcagaggtgaatgccccaggtttctcaattgggggactcatcttattccaacttactgattctagactcacctcccttagctcatggatcactaaatgtaattgaggctttcctcctttaagtctgaccctgtttctccatttccaaatctgttgaaacacacagccaatatagctaattatctcacttctcttaagatcagatagagaactaaccagaaatccacaaattgcctcaaattagtgcacgacagcaattcaaccatcataggaaaggggccattgaaccaaattgctttggcaaacgcacattctttaaacaaatgtaaacagtcctcatgctcattgtaaacagtcttcatttcccacgattattttttagttgttcaattgttgttttaattattctattttattattttacggttattttataaaaaaaaaacaatatttttataaaaagatttgtgtcacagtaaaattataaatttttacctaaagttcaataatttttttttttttgaaaaacctatatcgttttctgagttttgatatactacgtagctcttatcttcatttcccacgtgggactcatagtttctaatctctatagcctcagttctcattttttgtgtagagagctcctgaagcctttacacccaaaaatatatcagtagaaattcaaagttcaatggcgtcgacggtggttgagaaagctcgtaaagtggtctgtgtaaccggtgccggtggcttcgtagcttcttcccttataaagcttctcctttcaaatgactatatcgtccacggcactgttcgacaactcagtatgtactttcttcttaacttggtcactctttttcagctcaagttctgattttgggcaaacccctttgctatttcgttaatcaatccaaatgggttaatcgtaaattgctttgtaatgatgtttagacgatgctaagtatgctcatttgaataaactcgataaggcatctgagaatctcaagctatttaaggctgatttgttggattatggttctttggtttctgcaattcatggctgtagtggagtgttccatgttgctagtcctgttcccccagcttcagtcccaaacccagaggtatcaaacaattcaacaatgaacaatcccatctttgaaattttctctcatagttacctcagttgtgtactcatttggttttttcaataatgcttattggatacgtgtattcaaattcaatcagtaaagctcatgatcaaaatttcttgaacttatgaattataaattcaaatttaattatttaactacatataactcactcaaagttttatattgctaagtggcataaatttaatgtttattttttgcggtataagtattcaatgtttgtaaaa

SEQ ID NO: 34787 - DNA, 1841 bp, Cannabis sativa
tatttttaagacggatctaagtgtgtctcatagtcatagctcaattatgaagttatcaggctcaaaattggctcacaagacatattagtacactttactcgggaattgagtggtgtaattaagtgtgggatgttggagagctatgtcacagcccatgtggcatcatatgcgagaagtggcaccccaaaacatctatttctaacacttctctccaatttcatgaatctcaaaccgagaggtgacattcattatcactcctctctaatttggtatatttttagtcgagaataataattctcccaatgtttgtgggattttaacctaggaataagtgagatttttatagatatttatttatttcttcttttttattcattttgaggaataagatacgggatttgaaagtgagaaatcccgacatgtgggggattactaacaaactgtaagcctaataggctatggtgagggaaatcacttgctggctggacgacaaacttgagagacaaaatccttggcggctgcttagaacacataaccccttgagattttcttccttcatatttttcctaagtactccatactttatcgacaccaagtcttcattactaaatcaccattaacttaaacagttaccataaacaagagaccactctcttttcttgccacaattagtttattgttcccaaaaccaccgtccttatcagatttgtgaatattgggtctcccatgagccttgtgttcataagtctcgatatagattttacttagaaatctattgttgtattattgtccacacactcttgagaacataactctggagtgtcagatttaatcaataaaaacaaaagtagacgtagtttcattaccatcgcgacatgagacgaactactataaatccctggtatcaattttatttattatagttttatttagtcaaattaatttatcgcagtccacttattttttatgatgtttttaaatcagttgataaaaaaccgcatcaacatgcactattaattctttttttttactgtaaatttgtgttttgcagtaataagctttaattctattactgcagatcataacaattgtaattttagtaactgaaatttaattaatatattaacatttgtaaaaacactatttttaaatcttgatttaaaatttcttactaatatatataataaaatttaagtacggtacatacatatagatagcaaatatagtaatttttcaattattaatatataaaacaaatcaattattaagtcttaatacgacgagttagggcatcgtgggtatataacttgaatcaatgtcaattactgacatttttggtgtcgttcataatgaataataatgtgtaaatagagagaaaagagagtcaacgatatttttctactggtgcccaatcgaatcatacacggaagttcgcttgtagggttttcacgatatttttctcttaatggaaatctattaataaattaaaataggcaagtcttgtctttcatgacatggtgtgattgtttctggttgagattggttcttgtttttctggtttgagattgcttcaggttctgccattgttttctggtttgacagttttgatttttctggtttctgccattggtttcttcctgggtgcgactatttttctgctttcctggggtgcgactggcttgccattgtttttctggtttggctttcttggggtgcgactattttttggtttgccattgttttctcgtgtgcaatttttctaggattgtttttttggtttgtgtttatttttcctggcttgtgattgtcttcgtggggtgggtttttttttggtttggttg

SEQ ID NO: 34788 - DNA, 1476 bp, Cannabis sativa
  modified_base (481)..(484): a, c, t, g, unknown or other
cgcaatatattgaagaacggcacatacttataagttgacttcgaaatgaatctgttaagtgcagccattcttcctgtcagggcttgtacttccttaggctttgtcggtgatgtcatgtcagttaatgccttgatttttttgggatttgcttcaatacccttcgcgttaactatgaatcctaaaaattttcctgaggaaactcaaaaggaacattttttcgggtttagtttcatgttatacttcttcaaaatctcgaagcataccgtgaggtctgtggtatgatccctacttttttattgattttactagcatattatcgacgtaaacctcgatgttctgcccaatttggtttgcgaacatctcgtttaccaatcgctgatatgtttccctagcattcttaatccaaacggcatgactttataactatagagtctaatgttggttacgaaacttgtatgggctgctgctttatattggttannnnggccgcttcgggttgtctatccctagcagcctcaaactgtttcttgaaatccctagacaactactcccaggaagttattgaatgatgagtaaactttgttaaaccaactgctcgctgctccaacaagcgaggtggggaaaaaatacatcttaaattgttcatcacattactcgctcgcattattatattaaatttgttcaaatgcgagaccggatcaatggttctgtcatatgacgagacatgcgggtttttgaatcccaaaggaaaaagggtattcattatatctggatgatacggctcaagctcatcgtctgagttgtatccagattgtctccttagtttccccacttgatatctcctgaccttttcctccagctcatttatcccaattggatggcatcctcttgctttggaccaagctgttagcgaaggtcaggtttcttccgattcaagtggtctcgcagatcccgttaggggtaattgctgacagacctcgtcttactcacaaatcgtgtcctactcatacactttctctttgagtgactcgcagatttactggttcccatactttctcgatcattagctcgttgagtactttctcctcttcgagttgattgactgtgggttcttaactgcctcgtggtcacacttgcttcttcacgctctgttctttccccctgactgcggttcgtcgtatttctcccattaagatctgcacgagtcctcgctctatgggttcgggaagaacgatggtgattcctcgcaggtgaccttcgttctccaggctgattcccaagattttcctcattttcatgaggaatttctcgttcatcaatttctggttacctcccattatcattttcgtgtgagggttctggttggtcatttggatattcagggggtatctcattttccccggttgttcttcttgggcattttcctgtctcttggttcgtgagctatgagccctgccccgtggtcttctcactcca

SEQ ID NO: 34789 - DNA, 3277 bp, Cannabis sativa
  modified_base (3229)..(3235): a, c, t, g, unknown or other
gttccattttttattttttttattgattttgtttgtgattttagtgttaaagataaattttgttagatttagggatagatttaggttttagaatctaacatctgtgattttgagcaagatccgttgggttctgatggggtctaatagggtcgaatgaaactgtgagtttgcgaggtaggagacgtaggtctgatggggggttcgatgagtccgatggggggtctgatgggtctgatatggggtccaatgggtccgattatgttcgatgtggggtccgatgaggggggttcgattgtgttagtggggtgatgtaaatagggggtattttagggatatcataaaagttgtcatatcttacaaatattacttattatgagtttaggggaaaaaatttacgtatatgtaagcataaaaatcaaatttcccttatatatacaaaatttataaatttttaaactatttatataactgattttttaatattaaaataaaaaaaaatttgtggtccaagtctagcaatactggacgtgaagcctaatttaattaaaaaaaaccctaatatcacgtccataaatagtggactaaaaacgtttttctagtccaacaatactcggcaagaaaaacacccttataatgtcccagaatatcatttccaacacaaaatagactagatggacttatcaagtctagctttaatggacttaaaaggggttttttgtagtagtgtttaactcccccttctgcacatctattaacgctctccccgatgctaggaatggtctctccaaaatgataggaatattctcatcttcctccatgttaagtattaagaaatcagcagagaatatgaacttaccaacatttaccaaaacatcttcgattataccccaagaatgagtcaaagaacgatatgccatttgtaaagtcactattatgggcttggcttctccggaatttaatcttttaaacatagatatgggtattaagttgatacttgctcctagatcacataaagttttcgtttgtatcgatccccctattaagcatgggatattgaaactactaggatcttttagcttgggtggtagtttcttttgtagaactgcattgcactcctcagtaagtgctaccatctcaaattcttcaaacttccttttctaggataggatgtctttcatgaactttaggtaagttgacatttgttccaaagcctctatgaagggaatgttgatgtgcagtttcttgaatattcaaggaatttcgaaaactgcttatccatcttattcttgtgaagtctttgaggataaggaattttgatgtgatggtcaatgctgatgggaggtggtgtttctttttgttgaagaccttcagtgtagtcttcttcttctcttatgttggtactggttcttcctcttcttcctcctttggtttatctttgtttggctcagcataggtcttaccacttctcaaggtaattgcattacaattctcttttggatttacctcagtagtactaggcaagttaccttgagccctgttattgatttaagaagctaactgccccacctgggtttctaagaccttaatggaagacttaatctccgtcatgaattgtaacaatgtgtctaattgaggattagaccctccactagagtcttgttgttgttgatattgctggctgtcctgagattgattttgctaaggataaaattgcttttggaagttctactgacgaccataattattctgatagtttccaatggcgtgggcttgtccattggcaatctgtctacatatatagggcaggtgtcaattgtatgagctcctccacacagcttgcagacaacttgagcttgcttggcttgtgcagtcaccagctttgttaatgcctccacctgggctgtcaactaagttatcgcatcaacttcatgcattcccgcaaccttttagttaggcctctctttgttgaccattactgattagtcatggccatctcttcaagtaattcaaaggcctcattagcactttttctcataaaagatccaccagctacgacatatatcagtgtttgggtgttactcaataatcaagtgtagaagttatgcacctgtaaccactttgtaatcccatgattcaggtacttcctcaataagtccttgaatctctcacaggcttcataaagagattcgttgtcatgttaggtgaatttgttgatgtcacctctcagcttggaaatcttcacatgaggaaagaatttgcaaaggaatttcagggccaattcctcccaaatagagtgggttggcaaagataccaaccaactctttgcttgctcccttagtgagaatgggaacagccttagcctgatgagatgcagtttgggtcttctgatggtaggcccccaaactgggctgaagattggaccatcttatagctggcttgatctcaaaattggtggcatcaacggcaggtggccttatacaggatctggctcttgtcaagttgggcagaaaatagtccctcaggctacggtcattgttgttgtgaccattagcctggtcttctacagctcctccattgttgcaattattggcgttgtcagccatgcctacttcttgttcaatctctattgtagcgctttccaatttcttctttaatctgctctttctacaagttttttctatttcatgatcaatacgtaatatggcagttgcaccttaacttctcataaactagtgaatctggaaaaaaaaaaagataagatcttgaaacaaacaaagttagtactaaaattgaaaaggaaaaccaaattagaacaaaatttaatttttactaatattaagtaacaatttccgacaacggcaccaaaaatttattataataatttcaacacgcaagtgtacgtgttgtaacaagtagtaagctcacaaagagtgaggtcgatcccacagagagtgtagttaagtactttaaaattaaacttttacttctatttggttgaataaaaattaagaaagaaaattaaaataagaaaactagtagaagtaagaagcaaataaataaaagaaattaacaattaattaaatagggcttcgattttaattgtttctattgattatggcttaatatgattatcttcctattatcaatttttatgcaattgcaggtttactaattaggtaatttatagtcttctcagatatataaatctcaattacatgcaaattttctnnnnnnntgataaattaaacatgtaacaggcattaaacacagaaaccct

SEQ ID NO: 34790 - DNA, 2599 bp, Cannabis sativa
cagtgtaattacatggtcagacaaacatgccaaattgtgtaattacctctaattacacacaaattcaattacattgtggctttccaaacgcacccaatgttatattttacattttataaattttgactatcaataataaaactaataaaaaatttacatttacataagattttttttttttttatttttttttatttttggaaagatgaattctcattaaccaagctcaaaatcctcatcaaaataaataatgggccaccatattttttttggaacaaaatgacatgaataaatatgacaaaaatgtaaaatgttggttatccccaacaagaatatcatctacataacaattgtaaccccattgagtagccaagatagcgtttaaatggtcactttcaaacaaatcaatctccaagtttttcctaaggcaccatttgagagcttcattgatagacaataacctcagtcatttaaaaaactttaatcctctttccctgatgtaccaacatttatattcattttgagcttttcagaatcaaggttatgagtttccaaacaactataatcatctacatttgatttctattgtggtgcacacaacttttcaactttgaattaattctaaagttttgatcaacctcttgaaagtcatataacaaaagaggagtgtgaattgcaatctcctattacaatctacacgtccgaaatcacatgccgaaatatttttttttcatagcggtatttgttatagttacaatatcatttctgtaaatttttgaaaaatttcaaatagtttacagtaccgaaaatagagttattgatattccagtttacctcgcgtgtttaaaaaactttaaaagtattttcaacactgtaaactatttgaaatttttcaaaaatttacttggatgatgttgtaagcataaaaaaaaccgctgtgaaaaaaaattagaaaaaaaaaaagttattccgacatgttttcggacgtggaagttgacttgaaagttgtaacagaagattgacagtagcattcctcataacaaaatacatgcatccacaattatttaagttggtagcttttgtattttgcccatacttcaccctatttctttcaaaccaaagtaaccaaaggactacaagaattacctcaacatctccacatggtttcaagtcaaccaaaccaacaagaaaatcagagactaatttcccactccaactggtccaaagattttcttgagctgactgaatacaaaccactaggtgtgaaatgccaaagcacttgatcttcaatagaatgaaaactaagtaaaatgttgagaatgtgaccacaatcaacctcccaaaaaatttgtttcacaaagctattattccatcttccatccacaatgaaatcccccaccttccaatcattcccaagttccttacatggcgtaataagcttaaacgtagaaagcctagacagccacaaatcgttctatgggtgaatttgcctccatttagtgcctcataaccccacaaaatgctccttcaaacaaaagaaataccctcattttcttggtgtagtgagaaaagagtcatgcttaaaatattttgccttaaccacccttgccataagatactccgggtgagtcaaaatacgtcagtcttgtttagaaatcattgcttagttatgagcagggtcggctctgggcatagacaggttaggcccgcatttagggcccattcattttaggggtccaaataaaaaaaaatacattttaaaaaatatacttatttttgtaataattcatttatttttatagtaagggtctaaaattttatttttgcctatagtccatttcaactcaggaccggtcctagttatgagtcttaagatctcggaaccctaaaccaccctacccctttagtaagcacattggttcccttttttctagtgcatttcatgtttttcatcattggatccccactagaactttgcagccatggtctcaagctcctaagaaataccctttttttttttatgattaaggtcatttattgaaagaaaagaacctagtaaccacaaaagggggttacttcccttaacaaacccaaactgttacaatttgaaactctagcccaacgggcgagttcatcagccaggccattctcagtacgaggaataaaagtgacagcaacattaacaaaaagtttacataaagtttgacattgtttaaacaaagggtaactatgccatccaaaaggaatggagcctatctcaaaagcagtagcagcatttttagaatctgtcttgatgtgtatggagtttgccttttgatccagcgccgattggagcgccaatttaatcccgcataactcaccttcgaacacactttcaaccttagaaacctccgtagctatccagtaatcgcacggtggttgttcctggttatgaacaattgcatatcctgcttcattttccacgacagacgcatccacatagcactcccagtacccctgtagattcttcgagttatcactcttcactggtgtctgcaactccaccttctcctcgcaccacacacgatttctaagaaagtcttcagttctcctcttgcaa

SEQ ID NO: 34791 - DNA, 2152 bp, Cannabis sativa
ttatatataattctattttgtctatcatatctaaatattttaaaaacgaatagaataactactataattataatgtattctgtcatataaaaaaagaaactgaatttttatatttttcacatttagatttaagaaataaataaaattgtgcgaaacagagcaagatagacttgtctcatttacatgtgctctaaaagtgggtctgcatagatatagggtctgcttttataggatctaaaaaaaaaaaaaatcaggcctttaatttgacaaaaaaaaaaattaattcaaataaatttttaaactgtttttctagtaaaatattttttggggccttatgaactaatattaaaatagtatttacttataaatattgttttttttttctttaaaaataaaatttgtgatatttttttaatcttaaaagtagtaaatatgatatttctcaattcctcaccaacaacaaataagtaatttaaaattatcaaaaataccattttttttatgttttatttacagttttatggcttaaagttttaatttacaaaagtatgctagtaagattttgaaattacaaaaatacattttactcagcaaaaaaaatcaacaagaataagtatttttactgaagaatttattgtttttactgaaaaagtatttttgttactttaaaatgttcaaaaagtgaaaatgaaaatttttccgtgttgacgtatttctgtaatattttttaaatttttttggtctattatgtaaatttttcaaaaagaaaagtgcacatgtcaaattcgaaatacttaatagcatgagtaatttgcgatacaaatacctaaatttaactcccagttgcagacaaatacctaactttaattttttacggtaataatactttagttatatttctggaactttcatatgtacctggccgttgagtgtctagtcattattcatgtgtcattttttattggtgtatttaaattatattttaaataataaataaaacaatttaataacaccgaccaatcaagaactgtcacatggccattgacttaacatttaagagtaatgtacctacaaagttttagaaatataacttaagtattatattaccgtcaaaaattaaacttaggtatctatttacaatcaagagttgaactttggtatttatgccgcaaattactgtaatagcatatactccgcaatgtccaccactgtataaattaacttcacattagataggtcccttcaaataaaaatcaagtgcatacaaatcacaagtgtaagtacttttttatgttttgacaaatgttattggagacttctctattgcttcatctattacttttgttccaagacaccatgaatgaagtgctttggataacctatattataattcagcaagacaaagtattttgcgaaaatagttttcatggaattttttattaaataattttacaaaaagtttcaccatacaagaataatcttataaataaccattatgatcataaattaaataagactattttataaattttattatttcacattgttaattaatttgacagcaaaaggtaaaatgacaataaattttactggttcacaatcattcaattgaacaaccaatacttaaagcacgaacatgagcaaaagacccatcttcttctccgagagttaaagcacggatatgcttcttcgggccagtaaggctagagctgaacagtcacttcacatttaatgtggcatggaaaaaacgtctgggaacgcccataaggggatgtgtcagacatcataaactcaatttagggcgattacacgatagtcaagggagctaatgacgactccattatgaagaatcacaccaattaaaaagggatgaaggctaatctcacctaacacctacactgcctactacgtaggttgtgcataccctgttttgtaccttctgggaacttgtgcatgcccatagttggcacttaaaaacaagttactctttttcttcttcctaccaatcgctataaataaccttcataaaaatgaggaggggaatggaaaaaaaaaaaaagacacagaaatattctctataagaaatactctctcattaataacagagactcgtggactacgactcatgaatgcccgaaccacgtaaaaacta

SEQ ID NO: 34792 - DNA, 4101 bp, Cannabis sativa
aaaaaaaaaaaaaaacagagaggtgataatgatagggatagattgaacccgtgattttttgaagataataagccgaaactttagtaatagcaattttttcccccttttacatatactaaattatatctcttaaacttttttagccgttaaaaatttcccttgaattatcgagattgttagatttaaggacttttgtctaatttcattcaattttacggtttcagtgattgtttatgtactaaaacatgctactcagattttgatatctaccaaattatacccccaaattttgatatgtatcatgcccctgaactttcatgttagaatttttttattaaaattagacaaaagtccttaaatttaataatcttagaattttttactgccaaaaaagttcaggaggcatgatttaatacatgtcaaaattcgaagggaaaattactaattataattgtgcatgatgtagttttcctaggcaaaaatacatatgttattctttgggtggatatattcataacatatatagagtatatgatttttgtatatatacaaagttgaataataaaataaccattgacacaattgtgggtgcagatgcatatttaagccaagagtgcagtcaaacgttcctaaattgcatgacaaatttcaagaaagcgggaggccgtacattcaaagggaacacatgtgacgctggagaagttatagaagttatatcggttgttatggaggccgctttgcttgctggcagatatctccataagccttaattaattatgactaaatgctgacgtacggcaagataggcctctctctacaaccacaataataaatttgtcaaggaactcaaattttatacattccgactcaacaatttcaaacacccaaccaattcttcatatcgatgatggcatttttaaattacaatcacacattttttaattttttactaacacccagatttttaaacatttttatagactatatttaaatatttcacggacttttttttattttttaattaccattggaaaagagcataatttaaatataagcaacctgaaaactacgtaatataaataaattagaatttttgcctcggacttatatgtgtactaaatcatggctcgtgaacttttaagttcgttaaaaatgaaccctgaactattgatattgtttgatttacaaacttttttctaattttagtaaaaaaatctaacatggatgaaagttcaagggccatgatttagtacatgtgaaagtttgagagacataatttggtaaatatcaaaatctatctggggagcatggtttaaaatataaacaatcactaaaatattcctactaaggtttctcttcttcaagaggaacacggtggaaaagagttatagttcattgtatatctatttgtataaacagttacgatgagtctaataaaatggactcatggattaaggatagttaacggctgaaccacgtaaaaatctcttagttgttgtcttgctatttattctgttattactttcttaagctctaaaaatatttagttgccgaaaaactcaataaataaaaataaataaggatgtatcaatgcatcccttttaaggggtgtattgtagaattatcctatactatttatttaaaattaaactattttcgcaaatcaatatttaaaaattcaaaaacaatttaactaatcatattttcaaaaacttattttcactacaagaaataacacttttgtcggcgcaattaattaattgcgccggcaaaagtgtacaattaccggcgcaagtcaacaaatgcaccggcaaaagaagtcaaaaaaatggatccaactccatgttttgctggcgccttttctcgccggtaatagtacattttgccggcgatgtacctttaattcaccgacaaaaagtggcaatccaaccgccaaaaggtgggaatatttagcggttctagccaccttttgccggcgaacttacatgcgccggcaaaagtgaaaagaaaaaaatttacttttattggcgcctaaatgcaccggcacaattgttgaaaaataggcgatcaaattctctcgcagtgaaaaaatgtgcgcgcaaaagtaggtgaaaacttttgccggcgcattgacttgcgtcagcaaaagtattggcattttgaccaattgacacgttgcatcaggatttggcttttaccggcgcaattgtgcgctggcaaaagctctaaaattttttagcggtcaacttcccgcccaaatgaaagcgtgggtgaaaatttcggtgggaacttttgccggcgcacttaattgcgctggcaaaagtcccaacataaatgaaacgcagtgtttcatgtgtttttattcagcctagacttttatcggcgcacctaattgcaccatcaaaaatccaggctaaataaaacttggcacggaccccccctcccccatttttcttttttttttctctttcttcttcccttgcttttctctacaaaccctccgaccaccactgtcggcagccccctttttaccatcccaaccactattttttcatcccaaccccttattttgtccactaaatcttcattactctctttttatttctttttctttacatttttattgtaaataattataaaaaaaaaaaaatccaccagattctgacgagattgtgccgccgcacctccggcaaacgctgctcgagcctccgattgttcttcgcatttcatcttttcactcaaggtaacctatattttatttattttaatttttatttgggtatatatagtaattttagtttatttgtgtgtaaattttgtgtataaaattgtgtttatttttgagagttttatatatatttatttataaatatgtgtatatgtatatatatatattaatttatatatgtatatgtaaatgtatatatatatgtatattatatatatgttatataatatatatattatatacataatatacatacatatatataaatatatatgtttatatataaatagtgtgtttattataatagtactatacttaaaaatttatttacttaatatttatttttttgctaaatagatttttggtgtccctttgctcagtgtttggcaaaaatcactccttgttatattggaaggttagtatgcttatagtatatgttttataatagtaaaagaaagtttacttgaaaaatgcatattaatagagtttgaatattttatatattcatccatagtgaattaagttctgtgaaaaatatacttcggtcggatgtgtgacaaaaattactatgcatgtaaactattttggtattgtgtttgggatttttgtgtaggtgttacaaatttgggaatgatcaattgtaaagtgttatgctgtcgaattttcggtagcataacattttcaatttgataataggttatatttaaaaaaaaataataagaacatcactgatatcatagatatgataataggttaaatttaaaaaattagttaaaactttattaattataacaaaaatattagtaataggttatttttaaaaaataattacaacatcactaagtaaatttaaattaaaaattgataatttaattagttaagactttaattataacccaaattcatttaaataagttggtaattttaaaatgttacaaatttacttgttgatatataataattagaaactttattaagttaaaaattgataattataaagttcataatttatttgaaaaaattcatttaaataagttaattggtaactttataatgataaaatttatttgtttttaaataatcagaaactttaaaatgttaaacaaattgttaatttaaagaaattagaaaattaaaaagataattaaagatgttaccaaaacaattatgtttatcactagtaggttaaattgattaagttaacttttgataaattaaaaagttcataatttaattgaaaaaattatgaattaaaaataacattcaacttataatagagtggaaactttgaaattttttttaaaaaaatgtgttaattttaataaaataaaaattaaaatgtaaatgtgatgaaattattcttgaaaactatt

SEQ ID NO: 34793 - DNA, 3419 bp, Cannabis sativa
tacattaaaatagtaaaatagccccccaaataaattataacaaataagcctcctaaattgagtggttatatcttatatctcttcatttaaagtaggcagaaatatttttaataataactaagtcgcataaaacaagttgtaatatatacaccttaaataaaaaaaaaaaaaaatcctatagaacaaaatttttgaatcttccactcctatcatagataaaaaaattgcaataacttccccaaaaaataaataaaagctttatttacttttgtttccatttaagcaaacacctatatgcaataaataacaataattatctcatttatgaagcaaataatactatacatgtgacattatctttccaagattgatttaattgtatagacttttaatgactcataacatactacataatgtttaattattatttggcaatgtggtcttttggtccaaccagaaaacccttgagaaaatgactctcatctatctcatagaacaatcccaatccaaccaccgtttcacctaattttgttaaaccaactttaatagtaagaattttatatacttattaaaaaaaattcaccaaaatatttccttaataactgcatcctttctttatatttttatgacaaattatgatttttttcctttttaaattttaacataaaatcttttctttaaaattattagatttaaggactttcgtttaataaactagtagacgcttaatgtgaaaattgtccacgtaccaaattatgtctcattgaactttcgtatacatcaagcgttcattagtaaaattgaacgaaggtccttgaatctaacaatctcaataatttaggtgtgaatttttaacagcctcaaaagtttaggtataacgtccccgcttcaaactatgaaattctttcatggggctactaaaaaaataataggcactttatagatatatgtagtaccaatcagtctatttaagtcatctttaattgtgtaatcaaatacctacacagtcttaaaatcatcacacttaatcttccccaaacgatgtgaaataacacaactcccaatcatttctcttgcagatcacgagactctgactatcacattaaaggtatgatttactacgtattaaagttatgaagaataaatcttaattagcctatttttaataagataaagtgattaagtcattcaaactcttatactcttcgtacaatgtaaaatttgtgcggtagactcaaccaattaaattggagcatttcaaaataaagttagaagccaaaccttatgtttcacgtaatctttatgttatacttaaaattaggctatcaactagaagccgatacgtgtactccaggaggaatatgaatcaactcaataattatgttattaaatgcaatttaaataactcatttcagtaattacggttgatagaaatatttaaactcgttgccatataagcagatgcgagataagaatactaactattacctgttaaagattgatgagataataagtccatgtcgagatagactgagtacataatagaagtgtttaaggcgaaataactaagagcttgcagctcattgacccacatacttgggaataagagcttgcgattaattagtccacatatgtgtacatggagagaataactatattcatccatctcgtcttctataagtagaagtaaccacctcgttaatgccatcatgataaaagaagattgcgaggagcattatatctatacttagcatttttcctacaaaaatagtaattaaggacaacttgtatttagcaaggaataacgtgcacaatcagcataattgtataagaataaagacaaaagagcagttgggtagttattaaatattatcccgtgcataaaaataaaacgtggagaatgtccacgtttcatgagcagttatgaatgattagatcccaaggaaaataattgtcaccctatacacttataaataaggatagaattcagggtaaaatggacggtaaatttgagagaaaaaactatatatattatattcattgagataattctacttggtatcatgaatatcatctataataagacggactcataaagtatgtaaattttaactacaaaattacgtaaaaaatatatagtgttcatttatttcaattaatttcgtagtatatttattacgaaaaaaagtttatacatttagttaataaaaatctgcgttaaccctttaaaattaacccgagccaatatattatcgtatttttgactccgcatcgttgacagatttttgagtcaacatcttccatagtgtaaactctcaacactcactaacttattaacccgagtcaataaaattatcaatgttttaccaatgttgcttaatacaaatttccaatctcaactcactatttcttagatatctctcactttctcactctaacttctctctctccttctcaagtcttccgttgtctcaacctgaaaggaaaatttaactttatatctatttatttggtcaaaatttatcctctaaatattagtgtatcaacattgttagattaggttaattttttattaaacccaaaattaccccgcccattttttcaactcactcttgtctctcttttcctccattctcgctcgttctcttcaagagaactgaaccgccacgaccattgccaccatccaagaccaccgtcgccatccaagactactgctaccatccaagaccactcgacccactaaaaaacaaatcggactgacccttttaactccatttaatccttctgagcctacgccaatctccctccttaaccacaaaaggagagaccaccaccatgaacatagaccacaaacgaaaaaccacgaacatataccacaaacacagaccacgagccaacaccaatatgacattctttgtaatttttctattttttctgagtcggtccgatggtgtccaataaaggcccaatatgttcaatagtaggttccaaaattaagtttttaaggttgacggagaaggtccgatagtggtctgatgtaggttcgatgcttaatatcagattggtaggcttttcgtgtctgatgggggtccgatatagggttgatggttgtcaatgcttggtaacagattggcaacattgtccgatgggatccgaacgtactgagtccagtccaatagcggactcagtacgtcttgaccccatcagaccaccatcggacacgaaatacatccaccaatcagttagtaagcatcaaaccatcatcgaatctatattggaccactatcggaccttcaccatcaacctcaaaaactttaatttcagaacctcctatcgaacttatatcggacactatcgaaccgactcaaaaaaaaaaaaatcacaattacaaagaatgtcttgttggaaattattttacc

SEQ ID NO: 34794 - DNA, 1973 bp, Cannabis sativa
  modified_base (1033)..(1043): a, c, t, g, unknown or other
ataatctttagtttccactttgagcattcctttgaaatggttcttagagctatttgagaggatttttagaagagctattatttttgataaagagtcgagagtagaatgggttgtaaagaaaagagaggacctatttaaaggctatgaggtttaatgttttttattttattttattatttcacttctattgtttgtgttccaagatgtttaaaaatgttggtggtcttctacatgtctaccctcaacagtaccgatatatgcgggtatggagtacaagaatgcgacgattagttttcgcacaagtccatcataatattataaagttacgataagcttgggaggcaaatgttatctctcaaaaaatccaaaataattgtgcatgaatttttattctagatatggaagtccaacaaagaggagcacattggccaaagaggagctcatgccaaagaggacctcattggccaaggaggagcacattggccaacgaggagcacattggccaaggaggagcacactagccaaagaggagctcattggccaaggaggagcacattggtcaaagaggaacattttgggcacactaagctcccagctccgtcaggtgctaaggcccaaagagctcctcaactgtcaaattatctcaaggacctgatgggcacgaaccgacccaattggctcccctcatatacccatgacaatccaggtccactaaatgcgagagacacgttcgcttaaagaaatttcgaaaatatagtaaaaaaatgataagtgaagggatatttatttttttaaataattattttagtattattattttgtatcttgaacctaacccaactatagttacgggaaggtgcacctatgaataggagattttaaatcctatatgaatatctatataagggggtgaaatcacttgtaaaaggaccctaaaattgatacttacgagatcatactcttgagctcccactctcaaattctaaaaacttacttgaggagtgaactcttagagaacataactctagagaannnnnnnnnnncattgagatcaataacacttcaagtgaactagcctattaccgctaaaagggggtgaaccactataaaatccttgtgttcgtctttggtgaatttacttttgcagaccaatttactttgattaactattacttgtgttcatcttgctcgctttgtgatcttcttagatccattgacgaaagatcgcatcaacacattatataatcgaaataagttacaaaaaaaaataattatttggtacataaattttgtttaatttaaagtttagttatttacttattaataaagtataaaagaaactaaaaatttattttttggtgatggtaaaagaaaaaaaatatattttctacatatccaccttaaaaaataagtcataacgatacagttcttaagtaaaaatgcttaatatgatctaaaaagtttttcaaaataataaaattgagtgagaaagagatagggaaagaaaattaataaaataatatgtatatattgttttgtgcaaagtttagtcaatagcattatcaacaaaaaaaaagataaaaatagaatgatatgtagctagcaaagataagaatagacaaataattattttcattactttcggtaaaagaatacgtattagtacatattaaaattgttgttgttattttcataattagttttaatataacgtatattactgaaaattcctctactttgggccttgtgtgagagttagggggccattagtagtgggtacaacatactgaacccagtcctcccccacatgaacagccccaattttgaaggtccattttccttatttaaataagggaaatttcatttaatatacataaaaaaactcatatttcaaaaaataccctcttaaatattttgtacaatactaatctattaacttcttatttttccaaaaatacccttattatttattt

SEQ ID NO: 34795 - DNA, 1346 bp, Cannabis sativa
  modified_base (492)..(492): a, c, t, g, unknown or other
agagaaaatactttaagaaatagtgtattcttggaagataataaccttctgtaaaatctccaacaatggcttcaggttagtgcttatgttcatctattatcatcatcttcttctttaatttagcaaaggttctataaatttatgatttaggattttctttataaaagcactattaggaatatgtttagatttgtgatatatatttcatgagtgttttataaatcttaataagatacaccaataatattggacaatagattttttttatgtataatgtgttagagattttattacaatgaaagataaatcaagatatatacaacttaattgtaaaaatcataccacgtccttaatctgtatgtgtgacccgaaccaattggtaggctttaacgaataaattgaagacataaataatataattaagattgaacctaaccatatcaggattaagatctatagacctaagaccaaccagtgatattgacttagaangatataacggtaagtttatgataacttatacaagttcaatatcggaccaatttaatgtatactccatacatccgatacttgcatactttgccaataccctggaaaggacataacacttatctaatgtgtaagtatacgttatcgctgattatcatgtcaatctaaatccagtatactgataaatcatgtgacttaaacttttgaacatataatcatgattatattccattgggttgacaacactataatcacgaataaatatatgttctggacttaatagaatttatacattaagcatgtaatcataaaataaattatgtgaaccgtgcaacatagaatgatttatgatcttttattaatagtaaatcttattatattaaaatggatattatttagggcataaaacccttaattcctatctgccaaaaattatgcttcaagcgtcgcgacactacaaggtaaaatagaatgatttatgatcttttgttatgtatcatttaaattttgtaatcgttctacgaattttattacacataatcttgctaaaatagatctctctagtgactatgttagagtttggtgatcagatttacctacctaaaaatagtactcataaagtcttaaacactcggaccggacctagacttggacctgacctcggactgggacctgactcgagacctggaccggacttggacctaggaccaaacccagactagggactgaacagggacccagactgaggacctagactcgggaccgaagacctagacccgagactgacactacaagaaatatcacttttaccagcatagttcgctattcgctggtaaaagtaacttttaccaacgcat

SEQ ID NO: 34796 - DNA, 1766 bp, Cannabis sativa
ttttatgagctaaatgaaaataaattgaaatctgtcaagggtgtaattgaactgaaattctggattatatgcataaatgaattttttcattattatgttatttaagcttcttgaaaattactcatgtttcagagattgactgatttaatgtttagttagtgttttactcgagaaggaatgagatgcctttgactggaatattagaagtggaattgttcgatgtgtggggcattgatttcatgggaccttttccgtcatcatacaataacgcttacatattgctagctgtggattatggatcaaatgggtagaagcagcagcaacacatttgaatgactgtaaaatagtgctgaattttcttcaaaaaaatattttcacccggtttggaactcctagagcagttatcaacgatgaaggaagccatttttgcaacaagcaatttgaagctttacttgcaaggtatgaagttcgtcatagaactacacttccttatcatcctcaaagtaatgggcaagcaaaaatttccaacagggagattaaattaattttggagaagacggttcaacgttcatgaaaagattgggctaagaagctggatgatgcactatgggcttacaagacagcgttcaaaacatcgataggaatgtcaccctatagattggtatatggaaaggcttgtcatcttccggttgaattagagcataaggcatattctgggccatgaaaatattgaatatggacttggcagccgcaggagaaaagaggctgttacagctaagatctataaggagaaaacaaaaaaatggcatgatagaaacttagtcagaaaagagtttcaactcggacaacaagttctattatacaattccaggttgaagctttttcttggaaaattgaaatcaaggtggtttggaccgttcacagtggttcaggtattcccatatgccggagtggaagttaaaggggagaaaccagagactttcaaggtcaatggtcaacgattgaagccttatttgggaggccacattgatgaagccaagaaagttatccaattggtgcctctgtgagggaggcgtcccagcattttaaactttttactgctaatttttagaaataattacaatagtttttattttagtttttagttcttagtaaactttaattttaaattttaaatttttttagaaaaagttatgtaaaaccgtggaaatcgtgaaaactagtcaatttaattttttttttagtgtctaggaataacactttaatgtctagccttgcaggtgacatctaagtgagcaacaccacataagtaggtagagaagggaggtgggctggggcatgaagaaacacgggccgcggcatggtacataacaagcaggaccctgaatgggacacgggccgcgacatgctaaatgctatgccgcgacacgccccctgaaacatagttccagcttcgtccccaggtttttatttcaattttttttcaactaaaaacaccacgaacagcccccttttaacacacgaacagcccccttttaacccacgaataaccccttttaaaccaccaatttcaccatttttctccactctaccaccaattttttccaccaatctccaccattatcacccacaaacataacccaaccaccaatttcatcaaaatccacctacattactccaaatcaatccaaatttttcagaaaaaaactaaaccccaatattcattgtgttcatcatctttaggggatttcttggtgcaacaaagc

SEQ ID NO: 34797 - DNA, 1418 bp, Cannabis sativa
ctttcatattttagggatttgtcttcaaataaggaattgactggaccactcccagaatcaattaggaatttgaagaaacttaaaaaattgtaatgactacatttgattatgtattttaaaataactcttaacaaaatataagtggtagcaactaataagtctctcacttttgtttcatttctacaagaatcttggtgggatgtagtttcactggacaaattccttacagcataggttctctacaggagttggaaattttgtaagcaattttctttagagtaattagcggtaaactgttgttatgttttaatttatatacacttaatcctcttatattttttgtggtaaaattcccttaagtttactttttttttgaaaatttaaagctttagttaaatatcactgttaaataccaaatgaatgaccactgtgtacacttatgtatatgtaaaagtaaaacttcaaggaaaatagaataataatccaatttatatttaacaatggtattcggctgacacttcaaatttgtaaagaaaagtaaacataaagaaattttgccacaaaaaaaaaagataatggagttaactgtaaaaaataaaaacataaaggaatttagctgcaaataaacattttcataaatatagtatataattttgtatgcttttaatatatatacataaaaggactatttaggaaacaaaaaagttttgatatatatggcattcaaacttagttgcaccaaatataacattaaaaaaaaaattcaaaatatgggataaatcatcgtagataagaagaaataccataaaaaaaacttaaaaactcgtatataaattttacttatatataatcaaaactagtttcttaatgaaaaatgttaatttttggaatacgatatctttggcttctctggtttatgcttcaaacaaaaagaaataagctttttattttgaaataaactttattaactggaagcaaaggttaaaaaggagagggcaagtcagctaagattcctgagttgccacacaggggattctctcttccaaatagctaaagctttaaactctaaagttgatctaggaagtaaatgggccacattgtgtgattccctaccagcaaaattaatcaaattacatctagagaaagacaacaagagcttaatatctgtgataatgggatcaaggtaagagcaaccaacaccaagactattaataatgcccactgcttgtttgcaagttgatacgatagtgaagtttttgaaccccatctcatgttcgagattaaggccgatcttgatcttgacaagctttgttgtcaaggggtttgagacaagagggacgaacctctaaagggaagccaattggtaatcattgtgatctcaggcaatagcacacaactcttgttggaaattattttac

SEQ ID NO: 34798 - DNA, 2669 bp, Cannabis sativa
  modified_base (2417)..(2426): a, c, t, g, unknown or other
aacaatcgggtaaatccaaacaactaatagcgaggcacccatctcgctataggaaggcgtgctcatggtaccttcattaatcagctccagacaccactcaatggggttcacagctccttcgagtcagctctctcagatagaatctgacatacaaatgatgttgactgccgaggtccaccttatcgccaagaactgcgatttttagatggagcattatgtcttcaagcacaggaacgatgaggcttacatcatcaacctcgaaaagacatgggaaaagttctagctcgctaccaaggttattgttaccgtgttcccagcgagacatcccagaacgttacggtttacaacatatctaatacacgtttaccttgatccgataaaaatagacctatcacagctgtgtgattttcaaatattaactaaatttattttacgtggtatgtaatcaaaccccacaattttaggagataattatagtaagatatcagtaaattatgtaattaactaccctactatgtaataataagtagaggcaagttacactgaaaaagggacgaaaaaatcattagagaaaaaaggcttgagagctgtatcagaaatctaataagattgactactggactatgtaaaattttaactgcaaaaccacgtaaaaacctttgtgttcatatctttcttttactggttttattttctgtgcaaatccatcactatttaggctcaaatatagttaacgaaaatcgacgttaacaagtaatataagagttaatttcaaaagctctcacatagtttagaagccattgtttgtaatatacttttacgttatatagatcattattcttttatttttctttgtcccaaaattagtattattaattttttatgtgggggattgatgaacttaatcttgcgcagttagttgtatttttttaagtgaatgtaaaatatatttttgtattttttaatctttgtcaagtttaaaatactaataaaaaattatgtaattagtttttcatatcagttgtcaaatatgtgagttatttaatatttatattatttattgacacatatttttatgtttttcaatctttgtgaaatatttaaaattaaattaaaaactcttattgtttttaacaaagaaaagaatattatttgttgtaaatttttttattttaaattattgattttgttcaatacataatattattacgcatataaattaattaaaaaatataattatcgtgcaatcaacgtaaacgaggcttacgccatctgtcatgtcctcttataagtgtttcaagaagtttcccccatgccgcatgaaatgcaaagtgactgttcgaacagattctccttctcccggagatgctttgttgtatttctatctcccggagaggagagacacgctttatgtgcctctccgggggctcactccttgaactgtacttgcctgtctatatatgacttagctaatttcatgggtgacatgtctttgagatccacgtgtcacacgcagccgcagccatgtattttgggaaaaatcttaggcaacatttaccccccaagtctcatttagtaactggtaaatgaggcttgtatgcggcctccggtctcttaataaatgtagtggtacgtgccctaggcgcgtgggtcgcatttatgactatcatcattgatttttatttccttttacaggtaacgattcgcttcccgtctagtgatagaccttcagattaatgctggtgtcagagaggtactcaaacattttaggcgtcctttctcctcattacgtctgttcaccctatccgctagatcacagattgcgaatcgatacaaattcccaccgtacgatggcgtctaatcacaactaacttgcaccccttccggcctataaaagccagcaccttttttttgctggattattttcaccacttcgccattttcgacccaactagcatatttgaaaaattccagaagtcccttacttcctgctgctgttcctcttccgttgccagtccatttttaccacggagcgacatcaacttctcgcttgtcaccttcgtgtaagtctatgtgtacaccttttctattttattattttttctacatgttagggcaaaaaatagaacaacgaccttctcattttattcgcatttgatttctgtggtacggtggtcacggcgagaaccgttgtacgccatagttttttgcatgattactatcgtttttcctttggggctagaaaatgatttccttgcttagatgctgtcgaacgtttgaagtgattttcatacttctatccttttcttccctcttttttttttatttttgtttttcggatatttgcacctgatgtttgcctaggagaatctttggatttcctaccttgggcaggcatctggagggggcctctttcnnnnnnnnnngggacccccattcccctcttttatcttagggtttggtttgggggctaactcctggatttttcttttcagatgagtgaggttcttcacgatcttcccaaccatggtttttttggctttgactaagaaatcttggaatttcaccaagtccagaccatgtctgtccccaccgcaaccggagcaaaatcttcagataagttgcccaagaaaatggccaccttagaagaagtgatgaagggcccggtg

SEQ ID NO: 34799 - DNA, 2608 bp, Cannabis sativa
ctttctttggcagtatgtgagcatctagtattcgtgatatgaaagccatgatgagtgtattaattgataaatttttatttaataaaaaataaaatagccgagttaggatttaaggaaataagtgcataagtgtggtattggtgcctaactcgctggggttgttgattacagagttatttgtaaaatggaccctccgcaatcatctagaacacatggtgagcatgtagagtctggtgttgaccaaaccaatccaccgacaccgcctgtgcctccgcagaatctaaggaatgatttgggggttgataatgctaatctgcctgctgattggttgcaaatgtttctagaaatacgaagtatcatacttcgtcaagaagatgaattgcgacgattgaggcaaccgacatcggtagctcctatacaacaagtgttaccaccagctcttgtgccagtggtgggtaacttgagatttatactaccgcatagagattctgtattagagcgctttgtgaagctgcaacctttaacgtttctaggaggtaccgatataattaaggatgaataatggatgagcactatcacccgcatcctagattttatgggggtgacaggaacaaaaagagtaaattgtgctgcatttatgttacaagatcatacctgtgtctagtgggacattgtgggtagacttgagacgttagtactatgacttgggatgagtttaagagtctatttgaggaaaaattttataacattgatgtaaggacttcacatatggaagtctttgtgaagttgactcaagggattatgactgtggccgagtataccatggaattcaatcggctatctatgtttgttggtgatctggtaccaacagactttacccggaaacaaaagcatgtgaggggactgaatgccacaataagttgggacttgaaaattacacttgctaatgacactttatataagaaagtggtcaaattagccttgatagctgaagaggtagagcaacatgtgatgaaagagcagaccgtaaagtatgttgccacgacatcgaatcctcttgtggatggtaatgtcagtaaggggaccgatggtagtaaccctaatcacaaacggaaggctaaagcttccagaacatctgggagtaataggaagttttgggggagtagaggtggtcgtcagggtcgtaggtcctcattcagatcatatcaagagtgtccaaaatgcaagaaacaccatcagggtgagtgccgggccaagaattgctttcagtgtggcatggtgggccactttatcaaagattttccacgagctaagaaagaagagtcaaggaagaataccaaccagaacctgggacgtctatttactatgactcaggctgacattgatgctagtttgtcagtggtgataggtcagttatccactaacagttgttcttattctgtgttatttgatttgggagcgactcactcttatgtatggagtagagtaattgaaagttttcataaaccatgtgatatgtatgcttcgggttttggtaccctgttaccctcgggagacctaattgtatccactcggtggattcggtccttgtctttttggattgacgattatgagttaaccgccaatctaattgagttacaactgtctaattttgacataatcttgggaatggatttcctatctaagtatggggcaacgatcgactgtaagcgaaagatggtgttgtttgagcccgacagtgccaacccagcagtgtttgtgggtaaagtttaggggacacgcatacctagaataaaactttcaagagctaaagatttgatgtgtagaggctgtctgggattcctagtcactgcagtggataccagccaacctgtgtcatctggacctgagaattggtgtgcgaattccttgacgtatttcttaaagacctattgggattaccatcttcccaagaaatttaatttgtgatagagttagttccgagagaggaaccagtatcaaagtcaccgtaccgaatggctccagcaaaatataaagaattaaagatccaactccaggagttagttaacttgggattcataagaccaagttattctccttggggtgctccagtgttgttcgtgaaaattaaagatgggtcgttgcggatgtgtatcaattactgggaattaaacaagctcactattaagaacaagtatcctctaccccgaattgacgacctatttgatcaactaaagggtaagacgatcttctcaaagattgaccttcactcaggttaccatcaactgataattcgagaagaatatttcctgaagactgcgtttcgttctcggtatggatattatgaatttctagtgatgtctttcggactcaccaatgccccatcatgttagaaggtattcaaggattacctggacaaatgcgtgatagtgtttattgatgtgatattctggtttatattctgagtcaaaagaagaacatgaactacatctcaaatcagtattacaacggttacgagatcacaagctgtacgctaagttcaagaagtgtgagttatggttaccacgtgtctctttcctagggaacatagtggataaatatgggatca

SEQ ID NO: 34800 - DNA, 1090 bp, Cannabis sativa
tagcctttagatcacactaacaaataatagtccttagttctttattgagcatatatataatattcttgttgttaattaattaaggaataattatataaagtattattatttttttttttgtaaaatttatatttttatggtgtttaataaaatcaatacgaaaacaacaaaaaaattacataaaaataacaggaaaatagcattcaaacaacatcaaagaaaaaaaatcaacaacaaattaataataatacaacataaaaaacatccagggccgaccctgaagtatagttaataataaaataaataataatactcataatatcaaatatgtgctgcaactcagtggtaattttattaatttaataactaaggtttagagttcaaaacacactcacttttttactgaccctaatttttatttttgccacagccccaaattagcatagagttgaccttgaatacattaaaagattatattttgtgtaaataaaatcataaaaattttaaaaatatttaaaattctatacaaccgtatttttgtaatttttttattatttttatgaatttatgaaataatcccattaattaattgtgttaaaccatattattattattattaaaactaagctacatcatataacagctaacacctcacctaatattgatccctagaaaaatgacccctcttataaaaaatgggaaaagataaggtaatttaatactatagcaaaaataagatagacatcaatacctacctttattttttatttaatatataaataattaaatatatataaaaggggaatcccaagcattattattctctctttttttctactctttttctctttgttggccctttagcaactactagacttcaaaaaggtgatagatttagataataagggcatcatttcaacttcatagaaccaacaccattaaagtgccaacatatacataaatataaatattaagtttacataatatatgtacactttcatataacactactaacaataaaaaattagtttagtattattagcttaaggataacaatcattgagttaattaaaaaggcacatagttttga

SEQ ID NO: 34801 - DNA, 1393 bp, Cannabis sativa
  modified_base (26)..(27): a, c, t, g, unknown or other
ttatgtagttttcttgttgattttannttgttttcgtgttattttttagaaaaccgtataaaaacattatttgaatgtaaaaatataaatatttgacaaaaaatagtgtttttttttttagaaatttttataaaaaaatattaaattttgagcaaaaatttacccgtaacgcgaattttatttacaaaaatactatctttttctaaaataactgtaaaataacaaaacaaaacaattaaaacaatagtagaacaactaaaaaaaatagtaaaacaacagtaaaacttaatactgtacacaatataaaacttacacagtattttttaaaaaaattctacctcacaataaaaaaataaaaaagttttgagtatgtagtgtaaattttttttttttacatattttcaatactatataaattatttaaattttttcaaaacaaaccataactacaattaacacaaccaaataaattttttaattataatctgaagagaaaagcgatctgtaaaattttccaatatgtagtaacgaatatatatatatataaatatatatttatatatatgatcactagctgctttcacttgaagggtatccaatgccgtggcgggtattagggaaaagcataaaaacaccaccagaaatgacaccaatcaccggcggcaaaacctgaagaagtattttctgctccgactcaaactcaggatagaaacacttgacggtgttggaatccaacaaagacaaccctgcgaaaacggtcaacgaaaagaaagcgtggacgaaatccccaaacctcagcttgtacttagacaagtccgcagcgggggcagagtcggtactgggccagattcctgagacagtgacaacgccgtaatggatgttaccgtcggaatcgacgtaactatcggtgaaacaagcaaagcaacaagagaaggcgcaaagaacgatgaggacggcgtcaaaggacttgttaacggcggagcaagagccgttgttggtgagaactgggttgaggaattggaataggaacactgttccggttgggaggagttttatcaggtttcccactccgctcaacgttttgttcttcactttcgttgtcaacgacgtcgttttggcaccccccattattattattggtaattaacacgtttaatatagaagtgttgttttttgttatattggtataatgaagtttgtggatatatatatagagaaagatagaaagagatagaagggtttagcttgtacgtaaaataatggtgatcgatataataagatgatatgagcaatatatattgttggggtttgcttttgctttttgatttggctaaagatgttgggatggatgggcggccttagtttataatccaagcttttgcaagtgtcttat

SEQ ID NO: 34802 - DNA, 1921 bp, Cannabis sativa
ctttccttgtttggcaaagttgttggtgattgcaaggatttattaagtactttgcgtaatgtttctttttattttgtaaaacgatcagcaaatgtagcggctcattcctttgcaagggcctctatatctcaccatgatcgcattttcaatttgaacactgttccggttgagctgttaccgagcttggtaatagaattattcgtttaataaatgatgactttcattttcaaaaaaaaaaatactgtcttaaaattttaaaattacaaagatggtgtatttttgtaaaacaaaataaaaacaacaactaaaaaataactaggctaaaaaaattaatatagaataccttaacaataatataaaaataactataaaataatcaaaagacaactacaaagcaataaaaaaaataacaagacatcgacttcgttgcactatgcaaaataataccaactcctcaacatgtatttatattacgaaattttttattttttacttagttttgacaatttgatttatcatattgtactactatattatttatttatgaaatttgttgttacaacttcatactttcaactctatttttttttttttgagttaatgacaattaaaatggctatttaatttttagaagttaaataaatacttacattaataataaaaatattaaaattttatgattttaaaatagagtatataatataataggtaatatataattaaaacaacacaaaaattaaatagataacaatataattttaatatgtcaatatactagtgcacattgcatcaattaaaaaaattaaaaaacttatcattatatttaaaaagtatatatatatataaaaaataaactaaatatatgtatctacatctacaaagcaacacacatacaaaaaaaaaaaattatcatgaataaactaaaaatatacaccataaaaaatacacatgaataaaaaaataactaaaaaataactctgaaacaaaaaaaaaaaaaaatctaaaaaccacttaaaaacaactaaaatacaacacaaaaataacaaaataaatacacatatatataacaaatttttctttgaaataaactaaaaatatacaccataacaaatgcacataaactgaaaaataattgtacaataaaaagacacataacaacaatagagcacctaacaacaacataaaaacaaaaacaaaaaaaaaaaaaaaatagctacaaaacaatagaaaaatgataagacatcaacctcgttgcaacatgcaaatcattcataaattaactccgaataaactacaaaatattttaaaaaaatagtacttttattaatcatgtaagagagagtgttaaaaagttttgagaaaatgtgttgttgacctcatttttagccaatgacagtgaatctaaattaaagcgataagaataattaaataacagaaagcaaagagtaataagtaaagaaaataccaaacatatagatgttcgaccctttatagttggtaatagcttactcccttttttgttgtattgacttgtgaaaagagtgagcaagaatgctttgatctctctcgaaagttcttaaaatgatctctgagcaatttactcttagatcgagttttcactcttgagttttctctttgaattcttttgtttccttgaatagcgaggttaaaccactatttctaggggtaataacataaaaaatgatttcctttagtctacaagaaataaaatagaaaactaatttatttttataattacaataaagagtgaaaaatctaagctgattgtatttattatatataaagataaaaaaaatagtcagaaaaaaaataagagagagatagagaagaaaaaaaaaagatgaaaagaagagaaagaaaaaagagagagagaaaaaaaaaaaagaaactaagaagttta

SEQ ID NO: 34803 - DNA, 2083 bp, Cannabis sativa
acaatcatcatcagagaaaagctcagctcagggttcagtaagcctttacttgtttagtattgtcagtaattgattaagcatgttatgaagcatagtagtttataattatttattttagtgcgttgccttaaaatccataaagaggggtattaagtttttgtgatcgctgtctaacctgcctgacttatgggttcgttggctaagtcctattaaatggacgcccagcgaaatacaaggagtcagggtaatagggtcgagaccgaaggcgatcagggaaatcaaattccccagaatccctgtgggtgcggtagaggccgtggaaggttttagggtggtcgacatgaaaacccacctgaagctcctctagtttaggagcagagatttaaggaaatgcaagatcgtagtcgccaacaagacgaagaaattctgaggttgaggcagcaggatcctcctgcagtgcctccaccacaggttctggttgctttaattcctgcggtgccagcaaaacaacttgttgctggcaaccgtatggaaccactgtacgagaggttttgcaagcaggcacctcctatttttctgggaggtccgtatgtaatgaaggctaagtagtggctcacggtgataaagagaattctgaatttcatggggtcattggaaatgatagggtgacctgtgctacttttcagttctaggaagacaagcttgtgtggtgggaattagtgtccctcacccgagatgtcactgttatgacctgagaagagttctgagatttgttccatgacaagtagtacaatgaggcagtccgcagtactaagtggaaagaatttaccgagctggtgcagagtgagggtatgtcagtaacagagtacgcaacaaaatttgatcgtctggccaagttggcttcgggtattatgcctacggacttcagcaagaaagagaaatatctagcaggtctagatgcaaaaattagacacgaattggtgattactacgaatgaagtgacatcatatgcagaaatggttgataaggctttgcaagccgaaggtgcgataaaatttcttctagagccccgagtgactccaagttttggtgggacccctactcttcctactcatgtatatggtggggatagtggtgattccactactaattagaaaagaaaggctaccccaacatctgttggttcaggatagagcaagcggttctgtggggaccaaggaagaggtggacaacagggttattattaccctgagtgcccacattgtaaggaacatcattcgggagagtgcatccagaagacatgatttcagtgtagcatggttgggcatttcaagaaggattgccctcaagcaaagaaagaagaacaaaaaccagaggcaaaactcgtacctgctcgggtgtttgctatcagtcaagctgatgctgcagccagtccttccgtggtgacaggtcagcttcttgttaataactcctattttactctattatttttctggggctacacattcgtatgtggcaacacgggtaattaatcaattgggtaggccttgtgactttattgaaaaagggtttggaaccctactgcctagcggggaattggttatctccaaaagaaaaattaggtctatcccagttagggtcgaagatagggagttgagtgctgaccttgtagagctagaattagtagaatttgatatcagacttgggatggatttcttgtccaagtattcagccaacatttattataagcagataatggtaactttttcagccggagggcgaagatccatttgtctatgttggatctgttcaggggtctcagatcatgattattttagtcttaagggctagagttttactacacagtggatgtgtaggatttttagcggttgtgattgactccaacagacctgaaacatttgggcctgaagtagtcagggttattaaagaatttctcaaagtatttcgtgaggagttttcaagattaccgccacaatgagaaatatattttgtgattgatttggcacctgaagtagaacctatttcaaaagcaccatataggatggctccagcggaactcaag

SEQ ID NO: 34804 - DNA, 2209 bp, Cannabis sativa
tacaagaacaaaagatgaactatgtgaaatataagcataaaaacaaacaacaaagtcctcaaatgtcttcagaataataattggagttagcgggttcaaagctataccataagaactagctgtccaaagtaagtaagtcttcgtcaatctgattgtcacctcccccaaaagtcgtgtaggttcatccctacaaaaaggcatagggaggcaaacaaccagagaacttaaaaagacttagaaaaaagacgggttacttggccaaaaccttagggtaaccagacaacattaaaatacaaagttgatgattggaaaagtatcaaataaacaatcatgaatcggacagagctcctacaaagggctaagtaccagacaggggtatacaacaaatccaactcatggatagagtttctagggaggttctaagttctagacaaagttcctaggcaagatctaagtcctggacagagttcctatgtaatgaccacattattagatcatgggaattaacatataattaaggatttaaatattaatttatattatgtacttcttagtagacattagggtttattgtcaaaaatattgggaaaatattttctcaattacggagataggtttgaattctagatgcattgtatatgttatatatgaaattttatattttttatgttttgtgcctggtaatagtggaatgcgatgatttggccaaagaattacttagttatgagtgagtatcatagaattagcgaggctacataattagacttttagaatgtcgagatttatttagggctatgttttggaccattttacccttatctttgaggttactttgtattgaagtaaaagggtaaaaatgtcatttggtttatatttttagtgaatggattttcttgataaatcctttgtttttgtctttttattaagtggaatggttgtattatacttatgcttttcttaactgattaagattaaaacataaaataaaaaaaaataaaaaaaaatatcaacctcttcactccctctctctttctagtgtcggccaagattgaacccaagataaaacaaagatttcctcatcatctttaaaccaaaaaccagaatcattaacaaggtttgtgctaggttggtggagaggaagatcaaaggtaagcctagtaacctttcttccttgaattttatagttgaaaggttaggttttcatgcaatttgtgagattttcagttctcctcgttttgggattttagagaaggttttcttgggttgtttttgagttatatatgtggttatatactgatttgaatggttatggtagagattgaactaggtttgggcttttgagttcaagtttagctctttaatggtgattttgcctccatggggttaaggatgcttttatctattaaaataggttttttagccttttttgaagttctggacagtttgggaaggttaggattcaagttcggataattttgatgtatggggaaaaatctactatgaaaatagtaggccatttctatgaaaacggcctaccctttttctaggttgaaaacccagaaagacggcctgtccttttttggggtactttttctaaaatccaatttttttagctattttctagatatgtagggtttagtcgtgctatttatagataggaatacttttagtttcaagtttagagtccccaaaagtgatttagcgtatcacttactagttttacataaattatgacttagggccttaaattatcgagttggagtttccagttagggttacctacacacttgcatttagaatcaaggtaagattagtataataattgcatatatgtatacatgtttagtgttcatgttagttgtcgttagaataacatatcactgtatcaatgacgtgtacatagagttgcagtgagatgccaacaaatatatgctaggcaaatcaatagccaatagattagcatattagggtatcagtgaagaatacatagagttgcaccgagatgccaacaaatatatgctaggcttttagatagtatgatcaattaactactaccatagtacgactagagtactgagcataggctggattcacaattagtcatacttattcgagaacgttcctagcccagttatcagattgtgagtaggtttatgggtgcctaattacggtctggatatatgtttatgtttatgattatgcttttctt

SEQ ID NO: 34805 - DNA, 1179 bp, Cannabis sativa
  modified_base (40)..(69): a, c, t, g, unknown or other
atgtgtttacttataatcgttttagaaattcatatttagnnnnnnnnnnnnnnnnnnnnnnnnnnnnnntaagatcatggtaaaataattccaacaccagcgcctaggttgacatttgggactgggcccagcccccaagctaacatattgttaacctgggttgtttccaatcaagatcaccaaaaagtgttacaggcattttttttattagaaataatgaagattcaagcaaacttagggataaaaccataaacttgagcccctggaaatagggcccagcgcgcaagttgataatcaacctgggacattgccttcaattacttaaatgccaaatctgattcgaccaatgaattcagaatgatcaaaaatggggtagtataccttgtcctcaagtttaagaacctcgaaagtatcaaaacaagatcctgagagcttaaaaataggatacctaacacccaagttgataaatagcctggtgtgctgggttctgcttatttgattctaattctgttttgaccgtatgtctagctttctccaataactaagatccatgaagttagagaagtcaaattcacaactttgtatttcttatttccaacatgggaaactcacttggaaatgaagagtttcaaaactctattttctgcaaaacagcaacatctctgagaattggtgaccagcttcgccagaacattgaaacaaacgtccaggatgtttttactcttacccaacgtccaggttgatgtcatatgtcaacctgggtgttgggtcatgaactaaaacggtcataactcaatcaatattgattcgattagcgcaattaaaacttgcatttcaaagataattagattctctataaagttatgtctcacacttcaatcgaaattcttaagatatcagcaccaaaatttactcccaagtagttacaaaaataagctctagtttacccgcaacgggacccaccgggcttcgaaaaatggccatcaccatcgagagctaattttcactgttagatcatcatttatggtcaaaaatgtctaatttgtattgttcccctatttttttggggccccttcacctataaaaggagagctcccgggtgattgattaatttcttactcaagtttttattttgcctaatttgtttcaaatttatttttgaaaagaatacaaaatata

SEQ ID NO: 34806 - DNA, 1905 bp, Cannabis sativa
aattactatgggatcaatcaggtatgcatatacttaattatcatatattgttatcatgttctatattatatataaaaagatattgggtttattgttaatgttctaatagttaccacatcaaatattataaatataaaataatttataatttactcgcttgaattttaattgagaaatttacatacaatttaatttcagcaaaatttttacacttttctgtactatatatactttattttttttttatatttttataaaaactacataaaaataacaagaaaataatatccaaacaaaatcaaaataacaaaaaattaacaacaaaacagtagcaaaagaataaaagtacaacataaaaacatcaaaatactatattctcggtaaataaaatctttaaaattatcaaaatatttaaaattccatacaatcctattttttattatttttttgttttattttttatgtttttaaaataattccaataataaattagagaaattagataagttaaatatagataataatataaattatcataaaacaattaatagaaatataatataatttgttatataactaacttagcttagaccttaattataaaaatttaattttaaattgaaaattatgatgaaattttaacaaaatggtaactttaaaatggaaaaaataatttttaatattaataaattagaaaccataaaatgaaaaaataattgtcaattttaacaaattgaaaactctaaaattataaaataaattattaaattaagaaaatggtaaatttaaaatgaaaaagaattaatatagttgagatataagtaatgaatatttttacttagtaattaaagaaaataattatgggaaaaataattaagttttaatataaattttaactttaagactattcataattttgaaattgacaataatagtttgtaggtagtaacataaaatagtataagacattgtaaaatagcatgaaatgaaattcttatcttgactcgatctcttttgttataaactaaaaataggatagaataattgtgtttatgttatcacttagtgataattttttttacacgcgcataatttttcttgtacccattcggagatgctgagttagtaaggactcttaaatacgattctctaaattatttaggactttttttgtccatatggatagtttgggcttgttatatacctatggtgtgatctattgctcattattaatttgattgtttctttactataaatttcgatacgttgtctcctcacacgttcttgtaagttggcagacttactaatattttgcttacttatgagaactgtgggggatgctaccaaaatttttacaaaaaagaagtaatgttaagagaataaattatactatatgtatattacaaatctgaatgggataggttctttacccttttagtaagggagtgagaaggtggatttggacacttgcacatttttgactttgttttgaacttcctcttttatattatgtagaaatatggtgagagacaaaagatggatgactttaaatagacagtctgtagagttctgtagggttgtggatgagtttattggagttgctcgaatgtaaataaattctgctggagttactcgatgcccttgcataagatgtgtgaatgtacatatgtttatgcatggcatccaaccatcgtacacgatctggtattttcatggagagtcgttcacacaaccagctatagaaatagtagacaataatgaagaagaaatggtggatgtgatggctgatattttaagagaagatcttggttttgatgatacaagtactacactacttccttcaacgagtccccactaaatagtagtagtaagtatgacaatttgttcaaggatatggaaacttaa

SEQ ID NO: 34807 - DNA, 1832 bp, Cannabis sativa
ggcaaaatcaggggcaacactcatcaatgggtaataccaattaagaagtgttctatatatatactaggttaaaattacgcgcaaatacacgtaattcttagtttattacgtgcaaattggatgaagactaaagagcgacaaaagagaggtttcaatttttctttcaacaaaagagggcttttggtttgattgttattagttatttatttactttttgttaagttaacgtgaaggtaacgtcaaggtgacccgttattgccttacctctttattatttgttcagaagtcttatctcgggtgctacaacatgaagaaatgcttggtaactttcaaggccttcgaatcacaaggaatgctctatccatcacacaccttttctttgcggatgacagcctcattctttgcaaagctaataactcctttagtatttcactaaaacgttctctagacttctattgcaaagcttttggacagctcatcaatcaagcaaaatcaagtctatctttctctccaaacaccaatagagatgacaaatcaagattccatcagatattccaaatgccaattcaacctctccatgaaaaatacttgagcttaccatcgtattctggaaaggacaagaagatattgttccaaaacatcacttacagaatctggaagctacttaactcttggcaagagaagctatttttggatggtgggaaagaaattctcctgaaagcagtagtgcaatcaattcctacctatgctatgagttgttcccaactaccaaaaaaactaattgatcaaattaaaaaaatgatgaatagattttggtggggatcgaatgctacaggaacgggtatccattggaaaaattggaaatctttatgtcatgcaaaatgtgaaggaggcttgggttttaatgactttgttcattttaaccaatccttattggtgaaacaagcatgaaggattttttccaatccaaactcatcacttagtactctgtttaagcaccggtatttctctaatacgggtttcatggaatctgaggttggaactcatccctccatgacatggagaggtatagtttggggaaaagaatttcttaaaaatggtttaagatggaaggttggaactggggaaaatatttttgttgcaacagattgctggcttcttggaatgactaccttcaaacaacttcaatttctggattcaaacctttcaatgcgtgtctccagcttcatttctctagatcgaacatggaatatctctttactacccaggtttttcattccttttgatatccaatgaatattggacactcctctaagttacactcctcatcatgaccaacaaatttgacattacactttggatggaatatacactgtcaaatctggatatcaattatcacttcagcttaacaaacaacccagaacaccatatactccaatatactcaattcaagtaatagaattcaccaattaactcagattcaaaaacaccataaaagctctaacttgagttcgcaaactctaacttcacccaaaccacaccaaaacccattaattcagcttaaaatatccatcataaacctatcctaacttcatagcatgaaaacaaacaaccctaatacttaagcaacctaaaacccaaaattcaaacactatacttagtataagcttaggaaaattagaaaaagagaggctaggaagtgaatagcttgaatcaaagcactcgattccttcaagaaatccttaaaactccaaatcctagttgccttcttgaataatatatatatagagagagagagttatagagagagaagatgtaaagcccgcttagtt

SEQ ID NO: 34808 - DNA, 1815 bp, Cannabis sativa
attattattattattattttagacgatatatattttttttgctaatcgtcaaaagattcaaacactatgcagaaaaaatttcataaaaaaaaaaaaaattatgaaaagagaatcattatatagtaacataggacataatatatatttccactaattattacttataaaattatggtacatattataactaaagaaacgaagtagaagtagtttttgacatttttattttcgaaaggcaatacttagctattgtagacatatataatcttaagattttactaagtctatattgcactctaaaaattatggatatttattttaataataattattttatatgacaatataaattataattatttaatatatttttagaaacattaaaataacttacatactaaaaataagattcaaacaatgtaaaataatagaccgtttgaactctattttctgtacggtaaattgttttaaattttttaaaattttacaaaatattttaaataattacaatatacaccgtcatataaaaatatttgaattataactattcagatattaaaaataccagcttatacatatcataatctagatttgaaccactttttctctatctaacacccaacttacacgaatggaagaagaatcattcatttgggccttactcttgaccatctcttcaatccttttgactctatgggccaacccacaaagatagtcttgggcctgtcttccttcactagaaagcccaataagcttttctacattccatttggccaccaaatgttctaatatttctctatactcagtcacactataaaccccaacacgtgaggcaatgttagtgaaatgggtatatagattagggtcaattccatcatacattaggtgagcaggcatactaatctttctcttcatagtgtctgcaaatgccaaaaccatgtcgtttggatcgagctcgaagagcttcgaagctattttggtgtaagcagtctcgtgtcgtttctcatcactagctactactccacatatttgggcgagctttgtgtcaccatatttgaatgcgagtttgcctgtgtttcggtgtgatataaatgttgctctttcttgaaacgacgtgtagattgcgaataggtatgaatcatttccgataccaacatccttacaaaaaaaaataataaataaacaaaattgtgagttaatcattaacattaagtttttgtaattaaaaaatagacatagaattaaaaatttaagtacaatgatgggtttttggtaatttaaagtattttcttgtcaatgtgaaagttaaaatgagtaatgtgatttttcaaaaatgtatttgtaaaaaaacaggataattatacataaggtactattttttataaaaagaaaaatatatttttacgtttaaggagttttttttatatttttacgattttttatagaagcaataagaaaattacataaaagtaacatgaaataacatctaaataacaccaaaacaacaacaaaaaataacatacagattacaaaaaatcaacaataaattaataaaaaaaccgtattttctgtaaataaaataaaaaaaaatgtaaaaatatttaaaattccgtgaatataataagagttttggtaattagattaatattatgtatgtaattaaaatttatcaaaaataaaataaatcgactaaattttttttcaagatatcgtaataaataataagtataaaataacccttctaagatgtatattatagaatcacctaagaatttttattttttttaatgaccttctaaacttgttgcttaaagt

SEQ ID NO: 34809 - DNA, 1591 bp, Cannabis sativa
gtgttttttgaaggtagtattgtgcccgaagccgccacgtgatcccaagccttatcctcgtctgggatggtaacctgctgccaagctcaatacttgggaaacttataatcgaaagtatagtccttgtcagaaagaaggcccaccgatctcagattggccttcttcagaagaaagtcgcatgagctaaggccatagcgaagagtcatcaggcgcctatgccgactgaccatctcgagggtaggggtaggcctcgtcaagaggggtaaaaaacaaataaaatattagtcagaaaactgaaagacaaggattaatgtaactaagaaagatgaaaacaatcactgacaaagtctacgaaaggtggttgtgccgattggggaaagaccagatgtccacaagaagctatctttgaaagacactttgttgggcaagtccacaatgattttaggctcgctagaatgagtaccaagataatagaagccccctgcgacattcttcctcgatgaaacggccttaactgagtagagatactcaatttctacttgggtgtggcatccttagttcaaaattttatacaagaccttcagactagcgagaatcctgtaagaaataggattcagctcgaatggggtaacctcaacgtggtttacgtagtcctttatgtagtctcgaagtggaagtatggcccctgcattgatatgcttaaggctctaggcgataccagtcgagccacttgtactagtcttagcactggtccccggggtactacttgaaaaatgtgcagggggaaacaactgaactcaccctctcgtactaacctaacttggcatgattgcccaagttcaattccacaagtcttcagtatatcacctgtttagcctaagatagatcgcaccttcgattctatcaactcagcttcaaaggtgattctggggtcctgggagtctttgatgtacgtggcttaggaggcattatttcaaagtccaagtcacccaattcaaaagcaatcgtgacttcgggcaaaaacaaaggctttgccaaaggaataaaggacatgccgggaggttttggccatgttgcttctcgcaagaattggtgttttccttcagagatttcttgcaagaaacgcctgtaacaactagcaatatctttctagggggtgggttttgtacagtcgggtttatacgggaggctgattctgtaggaaactcaaattctaaatcttttggacgataaattcctgaaccagagtgggacattgctgcaagaaaaaagcagtactcccaatccctgtagagaattttatcaaacccgaaggtgatgagttggagattctgaaacaacctacatatttcctgaacccttctatggagctaaatatagttcaaccttaaaaaataccaaaaaaatgagatggcaacgaatcaaacaaattaagtagcaatttaacacaatgtagcaagcatgtaaaggaagaaaccaactgactatttgaagttagggcttggggcaatgaatgattactctgtttgcaaatcttcgaatgtagtaaggatcgcttcaagaagatgaagtcgaaggaaactcgtagaaa

SEQ ID NO: 34810 - DNA, 2235 bp, Cannabis sativa
ttttctttttgaagtatgtttatttttttttttaatttatctttatatagttttatatgtttatttgtagtttttaaaattgattttcttaggtattttatgcctgctcaattttgtagttggttgtactaaataattcattttcgtgtttaaataatatgtttttttttttattattattttaagaaactagtttcattgttcatttttttactatcagataaacgtaactggtttctattagtcagattccaacgtctaactccggtgacgacttcggcatcaaactccagtgacagtgacaacttcgacaaattttttggtgatttttttggcaacaatgccaattttgacaaatttttcaatatcggcagcaactccgacgacttttttagcaccggtagcaaactccgatgactttttcggcactgatagtaaattctaacgatttttctgacactagtggcaactttggtaatcactgtagttttatttatttttttttttttaaaaaaatatgaaataaattttaatattttttatggtaatataaatgacatatcccatatatgttaattttttttttattttaaataccaaattttatactataaaatttaattatcatatttatgcaaaactgtatttcttattaccatatttatgtaaatatctcctcaaaaaatatatgatttttttaattttatttattttttataattgtaaataatttgtaaaaattaaaataattacaattgtatggactaataaatatatgctatatgtacataaatgtacacaataacaatctaacttgtcatcttagttggcatttaacactaaaatttaactgatttattggatttgcaaataaagttaagttaaggggattttacaaaaaaaactgaagttaagtgtattttaattgaaatttaaaagggtttggccgtaatttttttttaataaaatatatttaaaataatgaataatattttataaatgtagagtatgaataatatattttaaaaaaattaaaataaaaaaaaaattaaaatatttgttatagcttgttattaatatggttatttaaatttttagctgcgctgcaaagaaacaaacaaagaaaaatggttatctgccacgtatatcagtaggttgcattagaaattagaaatgaggatggtgataatggtttaagtagagacaagacaagagaaggggtattagagtaatttgtgtagttttgtgaatacaatacaattgttccttcccaccgtcctagcggaactaccgtgcaagtaaatgatattggaagttggaaccacatacacactatgtctttatcaatatcattctatcattaataatggtccattcaaacctttttcttactattttagtagtttttcaatttatatgtctcgtattttataatgcatattagagagcattcaaattagacgcttgtaggatctaacacttagggctttgtaaataagttgtaatattttataataattattaatttatattacataatatttgatatttaattaaaataatattaaatactattttttgagatttttttttgaaagaagcctgcatatataaaaaagattagatcttgcggtcgttacaaaacaagttcgcaggtatggaagttacaagtaagcagccatactgttggtgggtgaatgcccattttaccatattatgggcaatgaaattacaagttctattaatacaagataaaaagcaaccgtctaaaaaggaaaggtactatcacaaaaagaaacaaagttgaaaagcatccaacatgaatccttacccagagagagtgtcgataaccaccttagagtcgctctttacaataataaaaatgtggcattttgcttgggccacttctaacgttaaacagcaagttgccgcttctccagccagagcatcagcaaactctaaaagtttcgttctaatccaaaccaccactgtcggggagggagagtgaaagatggaagcacaataatctgcataatatgtacgaatagagtccatgcaatgagatacattatccaacctattattgtataccttatcgttgcgggttgctaaagtagtcgaggcatagaggaacacctcatcagtattaatgccttggctttttacatcccagatgaattttacccaatcccacatgtgaatatcaatgttgacaatgggaaagattttccacag

SEQ ID NO: 34811 - DNA, 1954 bp, Cannabis sativa
  modified_base (1271)..(1273): a, c, t, g, unknown or other
aatcttgaccaacgacctggggctcggaaccaacccgtagtcggtgtctggatcttggaatcataccaagacccgaacttggaaccatttccagaccaggacctaaatcctaactcggacccgagatcaaaatcggaacaagaaccagaatcaggaccctggaataggaattggacctggacccaaaactggatctagacgcagaaccgaacacagacccagacccatatagggattcataccagaacccaggcccaaacccggacccagacttgcgccaagacttgtgacttaggacccgtgactcgagacctggaacagaacctagactcgtacaagaactcagacccagacccagacctagaccaagacccggaccaagacacagactgaaacccagactcagatcgaaacccagacctagacccggacccaaacctggactagtactataactcgtactcgaacccaggactgggacccggactaagatcaggactgggacccaaacccggactaggaccgagacctgaacctggaataggactataactcagactgggacggagactgggacctaggacccgatactcagacctgggacctgagaaccaaactgtgagctagacccagaccaggccaagacccgagacaaggaccattactgaaaccagaccgggacctacacgcggactgggaccctaaccaagactgggacctacaactttgacttgaatcggggaccaagacccatgacttggacctaagacccgaaccagacccaagacatgagctagaactggaccaggatctagattttgacccgagacaggacccaagacccgaggcttggacccgacccatagtcggtgtctaaatgaaggaattcaacctcgacctggacctagactcggaccaaaaccagaacccataccagaactcgaactagactcgacatgtggttggtgtttggattggggaccaagactcaaacctgaaccaaaacacggacctataccaaaaccaggactcggactaagacccacacccaaccttaaattgtaccttctgaccaaaaattggaaccagaactggaagtggaccattaaacgctaaaccctaaaccttaaaccctaaatcctaaactctttacagttacccctaagacctaagccttagatcctaaaccctaaatccctaaacactaaacccaaaaccctaaaccctaacctggacacgggcctagaccaatacccataccgagattggannncaagacccagacccagacccggatccaaacccaaacctagacctaaactcaggacctaaacccggacccaaacctagaccagacctggtctgggatctagaccttgagtgggacccggatcgtgtccccgacccagaccagaatagggacttggactcagatcgagacccggacccagactcaaacttgaacccatactgggacctagactcggacccaaactttggagccaaactcgaaccttaaccttgactttgaccgggacctaggattcggacctagatgggggacctgggccccaaacccgaacctggacccaaatctggaccaaggatcaagacctagatgaaggcacttggacatgaaactaggccctaaaactgggttggagacccaaaactttaccctagactcgagacgcgggacctgaccttggacccaaaactgaggacctgactacagggacacaaccctgacccccgaacccagacccaactttctacccgaattcggttgctaatcccgtactggcacccaagaggtttgtgtattgatttcacagacgtcaagaaggcgtgccccaaagactattttccacttccaaaaatcgatcagcttgtgacgcaacagcagagcacgaaatattgagcttcatttacgcctattcagggtacaaccaaa

SEQ ID NO: 34812 - DNA, 1091 bp, Cannabis sativa
agtcccccaccaaaatacttcctagggacttcaaagccatggtcaaaacccaggccaactctaaccctatccacataacccaaagacaaacgggtttcaatcaaaaaaataacatcaggactatgattttttacaagaagggagagacgatggaatgcacgtgtactccccaaaccacgtgcattccaacacagaaaactcatttttctgggcggctgtgcgttccagatcagtagaaggagacgatgaatcctcctccctctcaccagtacgagctctcttcagctgagtcctaacagagccaccagcaacagtctgttgagaaatgaaagacggacgcttaacaccagaagcagaggcaagccctttcccacgaaccagttgatcaggcaggttaggagcaagagagacccccatagtagccatagccccactagagatggtaccagtatcccccacagccaagatactagagacactagaaaccactctagaactaatagcactagtagcaaccaccaaagagtcagtggaataagatgtaaaagccgaagagcgcacaggattgttcaagaaaaggctttgaccagcaagaaaaatatgagagatattaggatttataggagtaggaatcataacgtctgacgaagtgtgaaaattcgaaagtggaggcccagaacccacaccaggagctaaaaaggaagggaaagttatagtacctccaagaaaatttcgagtaggttgattaagatcaacaggggcataatccattatggtcattgcaggagggtgggcatacttaaaaggcatggacttatccacaattttctcttttcctcttaacagaatattataaggacaaggaggatcagattgggtttcatcacacttttgaagatagaagggacaatatcttttggtgtgatcaagtttgccacagaaaaaacagaaatcaggaagcctttcatagttaaaatctatccacttaatgaactccctacccatacgaatgaacctaatgttcatacctctacgaatgggaagatttacatccagcaaaatcctcattcttaagtaagggcatgtaccct

SEQ ID NO: 34813 - DNA, 1285 bp, Cannabis sativa
tatatatatataaaactctatatttgtatcaatctaaatcaagtaatggtagacaccataaatcatgatactctctatacatgactaattgcccacaattatttctttccaaagagttcttttcttttgcatttatttatcacttattgttcttcacttgttttgactgtgacctataaaagacgagaactaaagtctatagcttcatcaatttatcttaaacacactttttctacatgaatattggattaactctatgtttattcttatatatatatataaaaactagcacttttattttttaaaattacaaaaataaaattagatttttgtttttttttttttgagaattttttgtttttgtttgtgtttcataaattttattttgttttatcattatttttttatttagtgagggaatgagagaaattaagatgcgagaaagtgggccgaattcaaggttcggagctgggactggctggggtccgagttgaaggcctaccgtattaaccaaacgccttgtttgacattagagaatgaatcattcatatcttctcctatttcttatttaggaggaacgcgttttttgttaaattttattcattactttaataataatataaacctaagataaaatgaataaataaaattgatcagtttagcaaaggacataacgctcgcttaggacatgcataagttactaatgacttagttaagtaatttaataaggttagtgttatagctaataagtgtaacatgactttaaatttgtctataaagagcgaagagagaagataccagcactacgtcttatttatttatgtagtttttttttattattttaacgagaaaaactgaagaagattagtgctaacataaaatttataggtaaatccaattttatttttttgtttctttttgttggaacaaaagttcatcgaaattacaatgcaaaaaaattatattaaatacgtgtggcaacgtatgcaagtgacacgattataatatatattttattaaaatatttattgttaaagcatttaaattgttacaattttaacacttagagagttatttttttagttaaattaaaatactagtatctacattttaaagaatttttttgtcattaattttcgttaaaaaaatgtagtatatgttattgttgcatagtattgttaataacaataatgtatcttgttctcttcatcaaaaaaataaaacaaataaataataaatcttgttctctaaaaaaacaataacatattttggaaaagataaaggt

SEQ ID NO: 34814 - DNA, 1221 bp, Cannabis sativa
gggcacaaaatcggctgcctaaaattatataccatacaacacaaaatatatattatacaatagaaatatatatgataacaatacaaattaatatatatatatatatatttatataacatgctagtaagagtatatctcacaccaacaaaagtatactaaaaaaaaaattaaatattatattaaaaaaataatatattataaaacaaaaaatacatataccattcataaaaaaaaatatactaaaaataataaaaaatataatattaaaagtatatgtataccatactaactaaattatatagtacaattaaaatatatagcatggcaataaaattatataccactattgtatataataaaacaaaactaaatattatctaataaatgatatatcatatgattaaaatatataaaaataataattaaatatatataatatatttatatacctacattgaaatgtatgtattatgccaacaaaatatatatcaccattatacataacaaaataaaaaaaaaatatcatctaaaaataataatatatcatacaacaaaaaaaatatactgtacaacaatatatatacactaataatctacaataatccataaaaactaaaaaaagtcgagataattttaaaataaaaataattttaacaaaacaaacataaatatactataatatttaagtaatatgtttttgaatctttaaaacacatatataaatataaaattaaaaaaatgtaaatttaactttaaaaaatgtgagaactataaaaatttatgtcataaaagataacttgtaataaatagtataaaaaattattgggattatttcacaaatacacaaaaacaataagaaaattacaaaaatacagttttatgaaatttcaaatatttttacgattttattaattttgttcacagaaaatacagtcttttattgttatttgtatgttattttattgttattgttttgatgttatttagatgttatttttatgttgcttttatgtagttttcttgttgtttttattgtggttttatgataaaatctttaaatgtaaaaatgtaattgtattataaaaaatgatgccttatataattatcccaaaattatttctatacaaattttaaaattttaaaattagattatttatagagattatttcacaaatacacaaagataacaaaaaaattacaaaaatacggtttcaaggaatt

SEQ ID NO: 34815 - DNA, 3180 bp, Cannabis sativa
  modified_base (3133)..(3137): a, c, t, g, unknown or other
tgcgtagcatggaaattacatgcattgtgaatcgaccatgcctatttccaactggtcctccttaaacaaaagtgaggtcagattaaacatgacaaaacaaagtgaatgaactaaaaactttatttttgatcagaaaataaccaaatacataaatgtcttaaacaaacataaagcaaaaaaaaaaaatacaaactctcactaaatcatgatatcttcaagcaatactacacccacatgagtagtgtgtccatgaaagaccttaggtggtaatctttttgtgagtggatccgctatcatggagtttgtcccaatgtgctctatgaatattctccgctctacactctttctttcacaactaggaactttatgtcaatatgctttgacttggatgagctcttattgttattggaatacaatactgttattttattgtcacaaaatttcttgagttgtctttctccattctccaaaatatgcagcctagtgacaaagtttctcagtcatattccctaatttgatgaccataacttgctacaaattctgttgccatagtggaagaagctataagtgtttgtttaacacttttccaggatatagctcctccagctaacagaaaaatatagcctgatgtacaccttctgctatcttggcatccagcgaaatcagaataagaataccctacgacctccaaatgatttgacttcctgtatgtgagcatgtaatcttttgttctctaaagatacctcacaaccctcttggctgctatccaatggtccatactaggattgcttaaatatctgtccatcatcctaaaaatgtatgtaatatctagacgtgtacacacctgaagatacattagactcccaatagctgatgcatagggaatcttttgtacttcctgaattttaaggttacttttaggacattgactaagacagaatttatctcctttagcaataggggtatcacctgatctacaatcttgcatgccaatagctcttttatgataatctaggaataccccaagaatgatctcgatgtatttaaaatcctaaaacaaaagaggcgtcactaagatctttcatattaaattgcttagatagaaatctcttagtttcgtgcaataagtctatatcattagtggcaagcaatatgtcattgacattgttatccaggtttttgcacattgacgtggcgataggatcagatgacacatgtcccatagttttgatacatgggtggaggaaggtacccctagtagcctgcacatgattcgtaagtatttacaattgtttgttacttgagcaatgttgtagagaagacatccgaccaggtagaagtgtgtttgtgtcgagaaactttagaataaccttgttgtgtccagaaatgaaggtgatccctacaatcgtgggattgagtcagagaaatatcacaaccgtttctagtttcctatttcttatattgcaattatgtaatcaatgtaatttcctattttgatgaattgtaagcaaaagggaaaccatccctattactcaaagattagttgtaagaactttcaagaggaagaacactttgttccttctcttaagtcaatacaatacaaggggaataggctattaccagactcacagggccaaacctctttaaaatatggtattcactttaccttattgtctttgttctcttttaattatattattcaattgcttattatttgcctcactgttgttggctaaaagcgaggtcaacattttggtgttatcattgagagcaaaaacacaagttctttgtcttaacctttgacaggtaaacaggatggttgtacaaacccgtagaggaggccttgatgatcagggcgacccgatggtgacagatcccaatgtgcaaactcttggaaacaagaaatgaccaccagggacaaaccctgaacaagttaatacagaaccacctactataggccatggagtgactttccctttggctgggatcacaccaagcgtgcaagagactgaaaacaccagtttggcagccgatcaatccactcccattactgagatcccatctaccactaagactcagaggcgagttagagatgacactaaaatcaagaacctccgagtagcccttaggctcatgcaaggtcataccaatgctttgcaccatgatcaagaggatctccatgcagccataaaccttgcatttgacgaacaaaaatgtcaatttatagaatggagggaccgggatatggaaactctgagggctcaacaggcaaccattgatgatcgcaccaggcaggccactgtactaataagaagggcctaccaagtcaccaatcaacaaccgggcaccgcgtccagtattcccctcagtgggtcataagggtatgcagttgggcatattgtacaaactcacagtggttagccatccaatccaaggccataggtccagcctatgggccaaacggtagatggccagatcgtgccagaccgtcctttgggaggagttatacacaccaacttcacccctactgaaatttttggccagcctaccacccaaacaagtcagacaccaaggccacctcgcacctcggtgtttgatagattaggtactgcacatgacctcaggactgacctaaatcgaagaagggacctagatgaacaatatgtcccaccaactgtccaaccaggtatccgtatctaggatccagttcaaggagatcccaatgtgatacaggccggtcaataaaccgaacaagttcatccatctgtgcaagcacaactagatcaacttaaaaacatggtacaaggcctgaccagccaaaaactcactgatcttgaactcgaccgagcacgcaaatcaccattctcccctgaaattgaagtccttaagctacccccaaagttcaaaatgctaacctggaaatgtatacaggaaaagaagatcatttatcacatttaaagtatttttaaatgtagatggacttgcaaggggtaagaggtgatgtccggtgcagaatctttcctaccacactcgcagaggccacccaaaaatgttactttaaattacctccaagaaggtttaattaatggaatgccttttcatcagagttacatgtgttgggttttatgccctnnnnnaaactccatttcaatgtaatctctattattcaatatcaataaa

SEQ ID NO: 34816 - DNA, 1482 bp, Cannabis sativa
gattggaaatctaaaactcctgtccacttttgatgtaagcaacaatcaactaacaggagagttgccggttaatatttctaatcttaataatttggaggccttctatgctttcaacaataatttcactggttccattcctttagagattggaaacttaaagaaacttaaaaaattatatctttcttcgaaccatctcacaggtccgattccaacttctctgtggaacttaaaaaacctcatctttgtggtcctttccagaaacaatttgcttggaaccatcgcgccagagattggaaatctagaattcctcacacattttgctgtcgacactaacaaactatctggagaattgccggttaatatttccatgcttcgtaacttggaggtgttcaatgtttttacaaataatttcaccgggaaagtccctagagatttcgggaagaacagtcctaatttgaaattcgttgcgtttggaaacaataacttcttcggaaagttgccacaaggtttgtgtagcgggttcaatctagagtatttgggtgcaaacaacaataagtttacaggagaattgcccaagtgcctgagaaactgcacaaaattaaaaagagtaaggcttgatgagaatcgattcacagacaacattaccaatgcttttggagttcacccaaatcttaattccattttcttaaacaacaaccaattcattggccatatatcaagtacatggggacaatgtcagaatctcaccagattgcagatgggtcaaaataaaatctctggtaagatccctccagaactcgggagtttgaaaaagttgaaagttttgagcctagaatcgaacaaattgaatgggccaattccaactcaattaggaaatcttaaacttttgtaccagcttaatctcagcaataatcatctaataggggtaatccctccaagtctatcatacttgaccagcctattggatcttgatctttcgagaaacaatttagctggtgaaataccagatttattaggtaattgtaaaggattattgagcttaaacctcagtcacaatatgctatctagtgatataccaccagagcttggaaatttggtgtctatacgttatttattggatcttagcaataatttacttgttggagagatacccacaagcctgtccaagcttacaatgttggaaattctaaacatctctcataaccacctctcaggaagtattccccaatcattttccaacctaataagcatacgttacattgatttttcttacaacaacttgacgggtctaatcccgaatggaaaaatattccaaaatgcttcaataagtttttatgatggaaatctcggattgtgtggaaaagctataggacttaatccctgtagaaggcaaagaaacaaaattagcaatggtcttatattgatcattggtcttgtttgtggcctagtactgtttgttactgtcattgttatcactctcat

SEQ ID NO: 34817 - DNA, 1511 bp, Cannabis sativa
aaatttgagaataacaatatgaactacaatgatgatagcaacattatatgattgaaataaaaaaaataatgcattatgaaaaaaatctacatatataaagaagaagtatgaagcggtgaggtagcggatctgcaaagtaaaataaactttacacatatatagttatgaatacataaataaataattgaataattatttaatttaattattatgtgtttttaaaaaataattaatttaaaatagatatttttatagaaaatttattaaaataataataaaatattaatttgtaaatttatgctttaataaaatattaaaaattgagagaattaaagagaaaaaaaataactttggagagattttagactctcacgtccagtgacggatccaggatttttactttgtgggggcttatttatctttaaaaaatatttatacttatattataatcactcttactagattatttaattttgtgggggcttttttattattttagtttataattaacaaattaaaaaaaaatacatttaattttttaaaagacaatatttttgttagtgggggttatagctcccacattgttaagagtaagtccgtccctgctgctccgcctcgtactttttatttatatctataacatctataaaagaatggatgttcactaaaaacaaaaaataagagacttgtttttgtctttttatgtatgttgtttgtggtacgagtaatatggagcataccacatgactaagttacctcctctttaatatttttgtggtgtcaaatgctaattgggtgaatttacaagctacatatataattaaattattttttatttttgaagaaaatttttaaattctcctttagttataatacaagtgttagaaattcttaaaactttgtaattttattttataaatttagcatggactcattattattatttttatcactttcaaaaaaaaattgtagtaaccattttaatatatatacaccttggaactatctttattatttcatttgtcaatgttattattatttactctttttgtctaatattgttttactattccatttgtttttttgttttttttttaaatattttttcaatttaatacgtatacctaaatatatacatggataaatattattgtcaccttttattttattttatttcattttaatatatatatctaacttaatttattaccattttttaaaaaataaatattatcttcagtccataaaaaaatatacatatagcttaatatttttattctaaatgtcacttttttaattgccattaaaatagtaaaagtacttgcataccaaatttcctcttattggagtgatttttaatcacaaactcaatacattaattaaaagttaatatggttttaatctcaagttaatgttcttagcaaacacattcatattcaattttttccacagatctttttacaatttatatttttcaagaagcatactcaaattaatcaaaaaaaaaaaaa

SEQ ID NO: 34818 - DNA, 1350 bp, Cannabis sativa
atgtaatttaagtatataatgagttgttattattatatagtgtaagacataagatcttatataaagagaaagagcacaataaaataagaagtaactaattaattaaccaattaagatatacattggaaggattggatgaatttcaactcttgccaaattaattaaacaaaaattattaattgattattatcttcttatggaatctctaactaattccaattgagtttggtagggttggaaaaatgtaatcaattaagtaattaattattcatattttcacgtagttagtagttacgtaatactattctttcttgttgacaattaattatacagaaaataatattttaaaataattgccacaaaaaaaaaaaattgagtttcatattaagctattaattagtatgtacgtgtcattttatagcataattatcaattgttgtttaagttttaagttatttaatattactccaatatttaagaacatgtcttaattaaaataaagaataattaaaaaagacaaaggtcgaagctagctagcaacttcatactaattatgacactttacctcactaatcaattatcgtttgttatttttttttcattaaaatataaaattataaaataattaaaacaacttgtttatacataaatattggccaagtacttattgtgagtatctaattatgttaattaattaagctaattaaattatacaattatctaattaattagagggactgaataaaggtaagcagctgagatacattatccagattaggagtactctcaactatatatttgtataatatataaatatttatttatacaattaattatacctaacacttaagtataatgcatagaaatataaatatatatatatattcactccctatatagaaattaatttataatatatatatgccgtattagtataataaaattttgtaaattttctaatattccttattatttataaagatattatttattagtgtttggagagatacacattaaggccatgtctttataaaaaaatacatatatatatatcatgtatggcaaaaacaaactttttcttattagttaatcattttacaacaaaaattagtttatctctgtccaagtggaagatagagataaataaataaaaggtcaagttatataataatggaaatttatgtagtacactcttaaagatgtttctagtagattttttatttttaagagttttttagtttatatcttttttcatagtcgtatatgctcattgtaactatttaagactgataatttttagaaaattttgaatagtgtacaatgtcaaaaataaaaattaaaaaattactt

SEQ ID NO: 34819 - DNA, 1370 bp, Cannabis sativa
tgtgagtagatctaagatcctggcaaaataatttctaacactgatatccatgttccagacactattggaattctgatgagcaatgcagatgtggtcaatcttgccaccacggtaggcacctcgaatctagtcactacaactggccagagtgacacgaacatctcagtggatctaaacagcaggcccttccctctgagggaagaccctccagtggcgcctcccactaaaggaaggacccttggggaacaactcctaggaacaacaactagatctcgtctccgatactatgctaaagtgacaggaccaataattggtgagcttgctattggtgagccccatgtggacttgggagaagatctcgagttagccagactaagagaggtcgtctatcaagccagcctaattgaagaaccatgtgctactaattgtaatgtattcgctcagtagagacgtaaattcctaagatggatggatgaccaagagtacatccttcgatctcaccaggcggagctggattgccgcaacagagaagccagtggcttgataaggtggttcaatcagagaaccagtggaagaggtcaggatctcgtcagagatccactccaaggaagactagttgatagatcagggagggtctatcagcaagctgaccaaacaggttctccgagaaccaagatagaccttcctttacccggggaggacaggtagccaacacatcctctcctcatgcgccacgtgtccacatgcaaccaatcagatagtgacatgtggcaactccgaattaagttattttaattgcaaaaactaccttctgcaatttctaataagtttaattgcacattagtatttttatcttcttacaaataaaagcttaggattttagaattcagttcagttttagacagaataatccagacaaaacacttaaagcgctcagagttagtttacctcttttcttagttaattttcttatgggttctaagttcccttattattaaggcggacaatgaaagctagtgtatttaattaagtatttatttttattttgattctctgtataatatattcctgatttttgcttcttaaaataatttctttcatctttaatatcacgtattttttatagttagaaattattaatgctttgttctatattttattaaaaataatattctttaattttctgtatctacattaaattatttcacattcaatgcttagaagttgtaattttaaagcgaaagaaactctatattttagaaaataattgtaaagaccgcttagctttaatttcgaaattagcagataattagggctttgttatgaaagttaattattaatagtgaattaattatttatgatgatttatt

SEQ ID NO: 34820 - DNA, 2800 bp, Cannabis sativa
gatatgccttttatggatctaaaattaaagtcaggacattagttttatacaaattaaactggatttccggttgaattttagtttcatagtaatttttctaaaaatttttttccatgaattcgaaacagctcctgttttgattgattctagttgtctttacagtgaagtcaccgaaattaatggtagttctttttctggttgaattttcgtttcgattgtgttgggttgttgagtggttgcccagaatgcatagatctggggttgatgttgtgtctgagtggtatttgtgtaatttttttttatttagactgtatatatatttatttagccagctaaaagtatttttgtaatattattactttttttggttaaaacttaaaaaaagtctttttaaataaaaaaatactattaaatgtataaataaggtgtaaaagaaattattaattatattattaagtgataatggagtaaataaaaaattgtagtataaaattaaaatcatgttatagtttaatataattttaatatgtactaaatttgaatcactttatttgtacactatactattacaattcacttttattataatagactaaaatatactaggtactactttagtactccattaaaaatttaaagatgctcttaaataccataccaatttaataagtaggaagagttaccattacctcctcatgcatccaccgtgttatatgcacagtgcaccctaactatcactttatggtcattatcctagaaattatatataaactatcactttatatagtccttaaatgatcacatggcacccatggaaaattattttagtgatatgggtataaacacaattattagctattaaaggtataaattaagtttccattagctattaaagaaaggtacatcaacacaaatattacaaaataaagaaactcagagctgtataacaactaccagcaaggccaaccttattaattaaacctttagaagacaaaaaagaaagaaacaaaaattgtacacatgtcgtgaataacccaaagttcaagccagtattattaattccattttctctgtctcatcatcaatcatgccataactgaagttgaactctttatttccaaagggtacaaaagcaaatagaatcatcattcatggtcatccagtgtgtgctactcattattatttatttatttatttgattttgcagattaaagaatgaaaagttaagaaactaaatagacacatattattggttcttcttttttttattattattgatagtcatattccaaatgcgcatttatttcaaaaaaataaataaataaactaataccattgaaaattcccaaattgcattaaaatatgaaataaaaaattgtcattttccattcctcgtatggatagtagacgcgtgtagaatgtgtatataaatataggaaatggaatagatcaaagtcacacccattctctccaaaaacaactccaatttcttcttctttaattttgttccgatcatggttctctctagggctgtttctcagtctgatgtctccgtccactctaccttcgcttctcgctatgttcgaacctctcttccaaggtatttattttaaatttttttatatataaaaatatatatatttggggatcatcgtaattaatatttgtgattttttttttaaaaaaaaaaaaaataggttcacaatgcctgataactcgatcccgaaggaggcagcgtaccagatcataaacgacgagcttatgttggatggaaatcctaggctgaatttggcttcgtttgtgacgacgtggatggagcctgagtgtgataagcttattatgtcttccattaacaagaactacgttgacatggacgagtaccccgtcaccactgagctccaggtcttctcttctttatttattaattaattacttatacagtaaattgattaaattaaattaatattctcatgatttatttggattacattaaattacaatgaaaacttttataaacaaaaagaaaattacaaaaagtgtaggtaaattaatggtactctttcaacttcccctatataaaaagaaaaaaacaaaacaaaaaaaaaaaagtacttaaacttgatttgttatatttcacaaaaaaaaaaaaaaaaaaaatctgaaattgtatagatctgtataatacgctgaaattatgtgccaaattttattttattttatttttttaaataaaattgtgtataccatatggattgggtcaaaagattgaaacctttggaattatttactaataattaagggaaatttacatggtatattaactgttattagtgttctactgttgttttgagttgttctgctttgtgttttataaaaatacagtatttttgaaaaaaattctgtgtgacagtatttttataaaagttaactcaaaatctagtaattttgtaatttccctaatgtaataagaatataaaattctggataccaattcaatagtagaatagaatacatgttagttgttggtttaaattgtaaatgagtaatataaaatgcatttagcatttctccacttgagttttataattaaaatgaattaaaaacatgtgtgtcacttatataataatacaatttaaaagaacaaccggtggctttttacatcttgaattgactgaaaaaaatattaaatatattccatctttaagaaagtaaatgttaattatgtggatcatggtatgtaccataatgtccaacaaagaatctcctttcaatgatccaaattagggatgttcatataaac

SEQ ID NO: 34821 - DNA, 2474 bp, Cannabis sativa
  modified_base (753)..(754): a, c, t, g, unknown or other
atatttacaagttatctgatccacgtatccctgttcgattggtccacgtatattgtgtgaaatcaggggcaacaacaagaatataaaataagaaattttaaaatttaaaattcttaaacaattatataataacttaataataattaatattaaaattatatgaatgtatgacacaaaaaaaaagtgcataaaattttcataaatattaatcgttaattaaaagggtacatgaaacagtgggtagggtactagttttaagatcataatataaatatatatattgaccaacaaacactcatttaataagaaaaaggggtgggattaaagtatttccaagggtactttaaatttagtgttacggtattattatatttagtatcaaaaaatattttcactttaattacaataccaaaaattatacaaaaaaatatattctttattataatattaattttttaataaaataaaaaattaatattatattatttaataaaaatcgccatatttattatatttaactaatagtttaaataaatttactaactagatcaaagataataatactgtaaaatcaataaaactcgataaattaaaatatcatacttcaataagacaattgttataaattataaggagcttttacaaatacactcctctaataaaagtcacgcgacagaaattttaaattttatttttggtgtcttaaatttttctaagtttctttaaattttgcaaaatgtcttaaataactannatgtacacgaccataaaaaaaatactaaaaaagtctatcgaataccgaaacaggtaagaatatatcagtgtgctactttgaaagagttgcattatttttggattgttaaatttgtctgaatttctcaaaattttgtaaaaatatcttaaataactataatctgcacaactacataagaatagactataaaaaatttgtcgggtaccaaaacaaataggaatgtattcgtactattttaaaaaatatacactgttaaattttctaaagataaattcttaatttcacaattaaatataaaaaaaaaatatcgtaattatatgtcgtgtacagtaaaaaaaactttataatggtgattatagtttctttaaagtattaatcacaacatatatatatgtatacacatataggttaattaggatttttgctctctgaactttgacatgtacaaaatcatgttccctgaacttttaaggtcgttaaaaatgccccttgaactattgagattgttagatttaagcacttttttccaattttaacaaaaaaagtctaacatgaatgaaaattcagaggacatgatttagtacatgtcaaagttcgagggtcacgatttagtagatatcaaagtttagggagcatggtatagtacataaataatcactgaagtagtaaaattgaatgaaatttgacaaaagtctttaaattcaataatctcaatagttaagtttttaacgaccttcaaaatttaaagacatgatttggtacatgtcaaaatttaaaggtaaaattcgtaattagctatacatatatgccggctggttggaagtgctcttaaattagcatatatatgattatttagaagagaaagttggaatatgcatatattttggcggtggcaacttcttcgaaataaacgccttcattgccaagttgccaaactgaaatatatttaagccatttgtctatttaattcttagccacatgacatgaatcgaattaccaaattaatagagctactagctatttaattataaataataaatcaactccattattgttattttaccaatttgcatattgttgaaacataattaaaacgatttagtaagcgactacactcattcttttgcaactacatatatcatataaatacatatatttatatataaaaagtagatacagtgtaccatttgtactaatgaaagatattatatatgtcagatatgtttggtctaaattaaaattatatactgaaatattattatataatatagtagcagaaaacaatattagctagctggagttttgtcttcaaaatatagaacttggaagatcatgcctcagatacgtcaaaaaaagtggccgaagatcctctctctatatatatatatctatatttatatatagatgcttaaagacaccttaattgctaagcataagaactattagtgttattcactattattaactcccatttattttgattcaacaaaataaaatataagaaacagctaatcacatataactcaatacatcgatatgatacctaagaataattattataaaaaaataattatatttagtcacaatatttggttataatataaatttttttataattaaatgtaatttttaatcacaactaagtgagttaggaaagccacaatgtaattagatttgtgtgtaattggaggtaattacacaatttgacatatttgtctga

SEQ ID NO: 34822 - DNA, 3854 bp, Cannabis sativa
aaattgaaaatgtaacatttatgagatgaaatgagggatgagtatatcatgacatggattataataatatgagttttttttcggctaaacacttttaattatcattccacttctacttaattctttaagctcaattttgatgataaaattttctaaactactgaactgaataatttttaaataataatattaagtgtaccaatatgaacatatcatgtatacaagagtgtatacataaatagtccatagtgacaataaaaaatcgatgatactttaaatttgctaccagttcaatatagaaggttttatctctaaaatttaaacttgaaaagttaaatacaagtgaaatgacaattataagggtttagcagccaaaaactctaaggtggcgtttggtttgatgtaatgaaatggaatatgaaaatgaaataatttttatttatttcttcgtttggttgcattttaaagtattggaatgacattctaatggaatgctctttctactattttggtggaatgactatttcatttttaaaaagaaagaaagactatttcaaggtaacaagaaaaaaaatttaataattttttttatcaatttttttatgtaattcaaattttattccattccattcctattctcattcccattccaattcttatattttcattcctcccaaccaaacgccacctaataatattatagctatacaagttagcatgattttggcctttcgtttaattattttcttttcataactaccaacttgtaacttaaataacgtgagtcaagaattgatcaacaacaatggaacaataacttaatttttgtatcttagtggaatgtaatttcataaagaataaaagagaacaaaacagaacaagatccgctatatacattactttttttgtgtagtgaataagatcaataatcacaatagagattgagattacaaaaatgttattttccaacaacaagtagttgtagctatagctagtttgaccaaccaaaaaaaaaaacatctaaattggtcttcctataataatgccaagctcttcatcttttattggtcttctaatactaatgtcttcatcagaaatatcaacaatggcaccacaatgaaagttaacatccaagaaatagagcatgaaaaccaaaacaaagctataaacaaacatgggaagaggaccgaatatccataagaatagagcgaacgagatgtagaaagctcgtaaccctagcgaaaagaaatagcttccggtgttcacactccttcctacaaaatcaactatgagcttctcgtgttcatcgtcttgtgatatcttcttgtatggcacattcactagaacacttgcataactatagtaactgcaaaaaaaacacaaacaatgaataattaaggattgagttgtgttggtactggacaccactgatgtctttttgcgatactagatctatatgaatactttcgatatataatatatatgaaattaataccttatggattgcaagttgaacaagaaggccactaataaggaagccattatggaaaagtatttgatagataagcttgcttcacttttgtctccaaaaataaacaactcaattttgtttttcccaccgctggtcatcaacacagcgattagagaactcaacataattgccatcgaggccataagggtcgacgacattatgttgtttctcaaactctgaacagcaagaacaccattattgtgcaaattctgcaaacaaaacaaaatgtcatttagattcaactatatacatatgcatccaaatattaaacacagaatgacgacgtttaattttaactaacctccaacatagcacgagcccaagaacggcggtgaatagcattgataccgatgatggtcttggtggggtagtttataactcggtagagaagccaaacatggtaagccaccaaagcaaagagtcctaatggaactaacatataatcaataacccttttctccatttttctttagtagccaataagtttggaatggggttttaaaacttatagtaaacttgagttaaagactaagaaagggagaaaatgaagagtggttttgaagagagactgtatatgatcaatgagtatatataaggaaaagtgtaaagatattcttcttcatacgtacggtggtctttctttagccaccaccgtctttgatggcgttatctttggcaatcaaagctggcatcttcttcaaagtcaaacctataagaatctcataagtctgccacatatcattaaataataatatatataaacaatatatttatatatgtgtgtgtgagtgtactatatagtattatatgaaagctgtgtctctttctctctgtctgttgaaaaacttgagaacgtacggtgcacgatgccatatatagctgcagacctgatcagaaggagaacttatcaagttgaagtaaatataagtatatatataatgtatgcgtatgtgtatacgtactagctcttttttggtacatatatataaatatatatatatataaatataaatgataataagataagcagagcagaagatgtgactcatcccacatggggtttttatttggcttttagcatctaaatataaattttattttacacaaacattgtttttgttataatatattagtttaattgatgtatgtagtcataaattattatatataataaaattaaaaataaaaattattgactgtaacttactctatagaggttaagttcactttatatttgaattgtttaagggtacatcaacagggctgcacatcaagtgaatttatcagctaattaagggttttaggttcatgaaaataggtaccgaacccgccttattaaattcaagattttacgggtttggatgtacgaatcgggttcggtttttagccattaccagtaataaaaaaaatcaagggagaatcatcatcaagctgaacataaattgtaataatatttatgtatgatacataattcagagcaagaataatatgaagcagcataaaagaacttagtcctattatagatgatgaaatgaaatcatttattcacaaaaagaaaatcttctaacaaattctcaataaatttctctattattttagaatgatatcaataggaagagacatatatcaagagggcttactataatcttttgagtaatgttataaatgaatttaaggtgacacggtacgattttggcatggtattaaattgcatcaatataagatataatgcatcaactagtatgggaggtaaccccattgcaatattcataattttgttgttaagtcataaagaaatcaaaatcttattatagttgaaatatcacctttccaaatgtgttcccttcttgtattttgatcaagtttcccttacatttccccacctgtggtatcattaaattgcttaacataatagtactggactggagatatgaggaggactaaaccaatctttgctttcctcagtccatttgatgaaaaggtttggggtatttgctgccttaggctggcaaaaagtgcctaaaagatgagagaaaccccactctggattgcaaagcagtttcctagtttcactgcttttggtggaaataagaatagaagcttcaaatcaagcagtcattcccaaccagaaaaccactcaaacctcaaatctaatagttgatttatccccaacaatttggtccccacaataaggcagagacttttacataagaagattaaaaaccctttcgggagtgatcattattctgcgatggaaaacaccgcaatagacaaatatgaattatcgatatgctgaactcgcaagtccagcaactcggagggc

SEQ ID NO: 34823 - DNA, 1695 bp, Cannabis sativa
  modified_base (27)..(29): a, c, t, g, unknown or other
tgaagactataactgctaaaaaagcannngactttgttatcaaaaacatagtctgttgatacaacttccctcacaaaatagtctcagacaatgggaagcagtttgactgcgcagaattcaccaacttctacaaccagcacggagtcgttaaaaggttctccgcagtgtcaaggccacaaacaaacagacaagcagaagcggtcaacaaaatcctaaaggtcaccctaaagaaaaagctgctagcatgcaaaaacaattgcctgaagaattgccgagagtattatgggcgtaccggacaaccccaagaaccacgaccgaccactcgccattttcgatggcgtacggttgtgaggcaatggtcccggtggaaacgttattcccatcccatagaagaacaacttacgatccaacaacaaacaaggctttattacaagaaccgctggatcagattgaggaactccgagatgagtctcaaatacgaatggcgacttatcaaaagaaggtggctaagtactttaactctaaggttaaaagtagaaaattcactattggtgatatggtcttaagaagagttttcccagccactcaggagcccggagtgggggtattgggacaaaattgggaaggaccatatgaaattgaggatgagatcggctccgggacctataagctgaaaagaatggatggaaccatggtgcctagtgcctggaacgctgatcatctccagaagtattaccaatagttaaaaaatgtaaacttaggctttgttaagagaatttgtaccgatatgcaacctcttaatttataaataaaactgagtgccttcaaaaaaatgttttcatgccactcaggggggtagtaaggcataccacacagacaaatgtaaaacaggccaaaagtaaaattttagcaaaaacaagtaagatatgtatctacgcaaaatatatatatttaaatgtaaatataaaagatgtcctgacccaaaagcaggtcctaaaaaaatattaagggcctggggacgggccttaaaaattgtctccccttaaaagataataattaaattgtctggaaaaagggaaaagaggctgtaaatgtaaagataaaaagaaagaaatcataatggtgaaattggctggcttaatcgacacaggatggaagacgagggcccctacgctcctcaagcaaggtgtcaagtctcttcttcttctcctggaagcgaacgaggacttcctcaagcttgggataaaagtccaacttgatgttctggccatttgactgccaggccatgtaattgccatcatcgaagtgcgtgacacagtggttacagacgacaggggtcaggagctcatctcttttggccttcttcaaggcttgatccttaaagtccctcaactctttcacctccacggtcaggttggccgtcgacatcaagtccgcctggtgtagctcctccatggattttaacttggccacaacttcgacctgagccttcaactcctcctggtgccttgcctccgcctgagcctccctctgctgggcctcctctcgtaatgccctcctctcagctgacaggtcccgcagactcttcacgacctcgtccatgcccccaaattcgaacatgacgtacccgtgatcgatcaggttctttgagaggtggccggtctctgcagtgatctgaaaaaaaaaaagcaagag

SEQ ID NO: 34824 - DNA, 1740 bp, Cannabis sativa
  modified_base (1307)..(1307): a, c, t, g, unknown or other
acaaatgagtggatgcctgaggagggggaaagagccaagtttaactcaaacgctcttcatgctttattcaatgaagtctccaccaatcaattgaagatcatctcaaattgggagatcgctaaagaggcatggaaaaagttaaagattaaaaatgaaggaataatcgaggctgtaaagaaagacagattaagagctctagctaaagctttcgaaaatctattcatgaaagaggatgaatccgtggccgagtttcatgctaaattatgcgatatctcgaatgagtcctactctcggaaaggtatactctaataaaaagttggtgagaaaggttcttgggcaactgcctacaaaattcatggcaaaagtagcttccattgaggaaagtcaggacattaaagctcttgatctagatgagctaattagttccttacaaaactatgggatgaccttgcaaaggtggagtaagggcaagaaacataaagatttagcaaaagacaagaatgaaaatagggttgcctttgttcataaggaggaagtcagtaaagattcaagtttgtctgaatattttgcagatggaaactttgctcttttcgctaagaattctgcttggtttctcaacaaaagttttaagaagaataattttggaatcaaagaaacttctgttggaaatattttacaaggatatagatttactaacatgtatgtttgattataagactataatctaacatcctaaatatgaatttcctaaaataatgaaataaacacatataaatttatagaaaatcttacattggtggcagcagaatataatgactctttctgtttagatctctaacccttgatcctttctgtcgcaaagtatgatcaagatctgaacctaatttctcctttaggtgacaaaatttttcacaatcttccacattatatttgagtattgacttaaaatgtgtggaaaagtactctctcactataggccacaaatcaagagagaagaagctaaggaattttaaaaattagaaagagctctcttattttatctgacaaagtgaaaactaggttatcatgttatcaagttctgaaaataagagcttataattttctatttatatgatagtgttaggttagaatttaaatatggaatcaaaaaagataaaatggctttattttaaaccctatggctgaaatccctattgggcccattgggtttcaattttactactttattaaaacttatctttcttcactcaaatactatatttaaattctatctctataaattttaattttatctatttaataattanaattaattatcaaataaaattacaattaacttatttattaattagacctttcaaagtctcttaatcaataaacaaactctaaaatctcttgtcttctcaaataagtcattgcttagtgaaaattcacaaataagacatagtctaatttagaattctaattaattaattaaaatcaattaactgattctataagacaatattatctcaactagtgcggggaccatgggcctatataatcaagctcctaattagtagttttataatttaccaagtaaattttctatcttattagttcctcctaactccactacagattcaaaattgtactcctgagtatgtagaacactttataccaagtatagatatgctatgaattatccattgtttcaatccaaataatcaatgatcctctattgatgatctacatcgagta

SEQ ID NO: 34825 - DNA, 3079 bp, Cannabis sativa
aaaaattccttattcatatggaggtggtataatcttgtaaggtcgtacaagagaattaagattatacaatatgaataaaataagtcggtagtgtattaaagtaaatagatctttaatatggaactactataagtatgattgactatacactatactctagtatgcgtgatttttattttgattacatatgtggacaaacacgtagtaaatgtgctgtgtataatttgattatacatgactgaactaatatgtaaaaacatctatcactaatatgccatttaccatatgaaagaattattcatatcataataatgatcattggtagatctatttgaatcctgagtattcatgaactcctagttgtgttcattaggttgtttgattcattcgttaaagtttctcaaaaaagataattcttataatttttgttttaggaatctaataacatgagtaaatggaaacatgatatacaataatagaattcaaaatttcctaacagctcaaatattagtttccttatagtgttaattctaagagtgataacagttggatccaaatatgtaatgagttatagattaactattcacattaaattaatattacataaggaattcaagagataattagaagggtaaaataatatttttgaccaactctaattataagctaataattagaggacaatctacttgtaatgattatatcaatggactactagtaaaaattctataaatataattctatattatttcaatttcatatttatagtagagtaataattgaattaatacaccaaattattttattgatgagactcgtaatcaagtattaatttattagaattttaaaatataggttcatggtcccatctctatacaatattgtacatgagaagatataatttgtaagatgaattgagaaagaattaatctctaagagaaataattcttgaggaaaaaaatagtaattttgcataaattattattttgtataattatgtttattatgaattgaataattaaaatagaatttctctatttagttttaattaataaaactataatgaactaggttatatataatattatttaacagaaaagtgtattattttagtagaaaataataattatttaatctaagttatataagagattaatgagaatttataattaatattaattataaataataaatttatttaaaaaaatttgaaaaattaattttggttctataggcctacaggtgtggggctataggccacgtgtaagtgacaacatataagtgccaataaattttattttaatatttttattaataaaataaagattattatataagatatttaaaattaataataatataaaacaataaaaaattaactgaatttagttattcaattactaacatgattatatttgagtttaaattttaaattaaatataatatatttttatttttaaaaattaaatatcaaattaaaaattaatatacatattatacaaaatatagcatttgtggagtacttttcactttctctcgagtacttttccctttctgtaactacttttactttatgctatctttccacttatgaactatactacatataaaagaagggtctaaagtagtcaagcctttttctatcacacaatcaatatatatatttatatatttgttcttttctcaatttaatttctctacgtactttaaaacaacaaattaattaattaaccgagaagagattaataatcaaatattgtttgatttttcttcaataattaattgattgataatttggtttggtttggttttggtttgatgactacaactacttgggaaggggtttcccttcaataaatgatgtaaatagctgaagagctgctcttggcttgaaaagtgggacttcatggccagctcctctcactgttgcaaatgtcaacccttcatatacttctgtccaccctcccacctttaaatttattaaaccaaatattaattaataatgtatacaaaaatatacaacattaatctctcatgctcatataaattaattaattatatatattatgttatagctagctttgatctattaaaattattttgagttttggtttcatttggacttacacgtggaggagtggggcttgcattgcttattaataatgaccactataggttaacatatatataaatatataattacatataacaccctaaaatttgatttggtattacctatatatatattctgaatatatatagctacgtagcgccgtatataaattaataataagcaaataaagacaaacaagcgaacgtggaattaagttatagttgtttatatatacaaaataaaaaaggaagaagaagattttataatgttttatatataatatggggaaagctgagtagggtataggttggcgtttggccattaatgttgactgaaactaccccattttgatatgatattgatcaattattaattatattgattaatcacacgtctaaagctagcttattattatgcttattcattcaagaacatgcaagcaagcactaactgatgatcattttctttcatcatgttctgattatatagtagttaaataatgccaaagaatcaataatcgaatagataattaaattatatatatcatatatatatatatagttagtgtactgacctgcttcttgacataccaagggtaccatggaattttggtagataatttgagtcgtgctagggagaatcttgtggctgtaactggcaccactgaatccacgtccccactgcccaattattaattaattaacaaaaacaatattgtttgtttttaattaaactcgatttgaagtacattaataatagtactgttcatataagtaattattaatattgatttggtataattaatgtatgtaatttacctgaaaacccaaactctcaaaccagcagctatcatttctttgtaaataggaagaacagatacttcggtatcgttccaattcctattcaaaacctcactaatatatatacacaacaaacttaattagtattagcaacaaactatgaaaa

SEQ ID NO: 34826 - DNA, 2455 bp, Cannabis sativa
  modified_base (151)..(166): a, c, t, g, unknown or other
ttgtttaaacatcatattattaaatcaaagtttttaaatttaaaaaattaacaaaaaaaaaaaaatctaacgtgctttgcacgtagttgccttctagtataataaaaaaaaaattatatacgtatagctcaaatattattattattattannnnnnnnnnnnnnnntattattattattattaattttctgtctttttttattattttttaaataactaaaagatcatctctcaaaaaaaaaaaaaacaaaacaaaaaggtaatgacccttaatcgtataaaaaagaattaaatacgacaaatttaaatctatataaaattttttatatatatatatattttcaattgttatacatatatttttcttttaaatccaatgtaatttattcagtcagaatatgtatttagaaaactaatggtataataaatttattaattaaaattattatttattatgtttaaaataattaaaaaagttaacactttataatattaatttattttcttgtgtcattaagaaaaaaaaaattagtgctcatattatgagcaaaaatacatgtaaaaagggagattatatttgtacctcaaaaattataaccacaccccatcattaaattgaccccaattaaatattgttttttataaccccaccacaccctatttagcaaaagagtataattttgtacacctcaaaacttctcattttaaattattttattacatataaattaatgtatcaactgtataaatgtatacatatccattcaacatcataaaataaagtccaaatacaaacaaaatctcataaaatactgtttgaaagagtatatatatatataatatatttacttttgtatttattccttcattgataaagtctcaaaattttattttattgatggatgattttaaggtttcaaacttcttaatcaatagtttatttttattgaaagaataacaaatcgttttttaagaaattgtgggtggggtgtacttattaagaaataaaataataaatataagaaaaaaaaattaaagatatttattttggtcattttacaataagttgaatatttatcttctgatgtcatagtttcggactttcattatattttatctgatatttgtaatcttgtgacccattttttaagagtacagatttctcatgttcctaaatctgttaatactcatgctcataaattagctaagtatactttttcagtggacacaaattgtatttagttggaggaaatcctcctcctctttgaaatgttgtatcttaatattaatcatttaatataaaacagtttgttttcaaaagaaaaaaaatgtaattaaatatttggggtgtagttataattttagagggtgtaaatataacttcccatataaaaaaatattaaaatttgaaattcaatataattttataatttaataatcactaaataaaatagaactgcacaagcataatttgtttcttaattttaatataatattgtttatattggttgtataacttaattttttaattatgtatatatatcttttacaacttgtatgtattctcttttcttatatattttttttaataatgtgtcaaataatttaaatttttgtttacaaagcgtaatttatgataatatttggtattttatttgacactaaaatttgtagtacttaacaaaaattttacaaaaaatagctacaaagcaaaaaaaaaaaatacaaaaattttaactatgtaacaaaacataattgtatggtcaaaaataaaacttagcatttaaatatgaccagaatttaaactgagtattactgtggcaaattagtcttcttttaatgtttacccccatgtctaaaataaaatctcaaatctggccccttccgataaatatccacatttcaacattgaaaagaagcaacatgatttgtgggtggaatctcaaagagaaacaaattatgatgtcatgaagaactgagtctaagactaaacgtattataaagactttgaaccaaaaacaaagaaaaggacgaaatgtaaggcagttttcaactctgttattactattgtattacttaactaggaattcctcctttgcccatcactcatttgtagtcaaactcataatttgtttgtttcaacccgacctaatcggatagtatacctatacatttttttttaattgacatttattatgtaattgcaagctatttatatttatatatatttttctagaaaattcctgttcaaaacatgactcataattttggatatttggattgcaaaatgaagtggcgggcatcattgtattagtaaatgtaatcatatcaacaaagtctttcaagaaaatttgagtttgataaaaacaacgacagtttgattgtagatgaccataatcagacgagctgaccatccagaaaggcaaggtccatgttcaattgattaaacgattta

SEQ ID NO: 34827 - DNA, 1983 bp, Cannabis sativa
gcataaaacccaacaagttgtatgtggatgagatagtttgtctccatggggctcgaagtcaattatttcagacagagatacaaagtttacttccaagttttgggagagtctccagaaggccatgtgtacgaagctaaatttcagtacaactttccaccctcagacagatagctagttagagaggacaattcagatactgaaagacatattacaagcatgtgtgatggaccttgaagattcgtggagtaaatacttgccattgatagagtactcctagttatgaaaatactatagagatgactctctatgagatgttgtatggtagaaagtgttgatctccgattcattgggatgaagctagagaaaaaaagtattcggtccggatttagttcagaggaccagtgatgctatagaatatagcaaggctcagatgcttgtttatcaaagcaatgagtgcccatgagtttgtaggaaatttaattctttttttcaaatgttttaattattagtatgagaaaaggacaatgcatgagttgtgttaataattagtggattccatttcagttttgttggtctttcctatgtaaattaataaatatatttgggtattactgctaaaaggttcatacattattgtctgcttttaagtttgtttttggttatttgataaaagatgttcctttttttttattaattctttgcgaaatatgaaactgtctgcatagaccagctgccagtaaaactcttagtcttaggtggagcgagcccttttacaccctttcttttcttttacccctggtgtaatgactcttatggagagtctatagctataaatttgagcctttagactctacctcgtatcacaaaattacattaccttgttgaaatagggaattagggaaataaatttcatttgatatttaatgtttgtgcaagtattatctaataattcaagtagctggaattcagttatgaactagggataacaagtgattgcgttctttcagatttcagtccaactatattccttcgtttggcaagtgacaataaccttcagaagaatctagctcccattttagcctttcttgtaaagaattccaactcccattttagtcttaatttctgttataatattctatgttgttcttttcctggctcacatttcagaacactagaggaagttatctttttttatgataatttttattttagtttttattttttctaagaatgtgattttcaaatgtgggcaggaacaagggatattggttctaaccaatgctatcacagcttgctcagaagcaatagagatccagaaggggaaacttgttgtcaaggaggcacccagagcagtgagtgtcaatcttctttttatttcttgttgtgataatggtcaacttgttcgtaattataatgaatttagcattgtgtttaatgatatattattattcactctctagtaaagaggatgattgttttagattaatctcgtgtttggtagttgagatttcctatgaatctaaatgtttgatttcgagcttctttttgtattttgtgccttttgatgaaaattttgttttttttttttaaaaaaaaagatgaagaagaagttatatgttatttctaatcaaaaataatttttatattttccaaaaatttatattttgtgctctgtattttatttttaataatgtgctacacgatattgttttgtttacgtttacataaaattgcagaatactaattaaaaaaaggggtctttcctttttttctttcttttggcagaataagagcactagatcaccaaagttttttaattgaactaaaattattgcttaattaattgtttatgcggtgagtgatgagatgagcttatagggggttcttttttgcggtgtcgtgtttgtggtgtgtaccaactagctagttcaggaatggaatccaacctcaacaggtgttttaatgttgatttggtgatttgat

SEQ ID NO: 34828 - DNA, 2477 bp, Cannabis sativa
ggtacggttagaagagggaacccagggatcaaaccagatcgatgtcatagcaacattccaaatcttcttacagattcctttttctagaacctcacgagcatcaaggacggctttccacatggccgagtcttctccatttctctcaagaataagaaagtttcttccttttatgtattttgcgttcaccactttgctccagacacttgaagtattggtgagagctttccaggcctatttggtcatgaaggctttgtttatagtaccaacacttctgaatcataagcctcctttcatcttggattgacatattgtgttccaagccaaaagatgaaggtgagttgtcttttggcttaaataataataagaattaataaaaataataaaggtgagttgtgtgtttctttccgtttatagtataaggtaatagtattataatttactaataagtattagttaggagtgttgaattcgaattttatttctctcctctttttcatcccaaatttactatgagctagcctaattagtggctttactcctcagttatggctaactgccatataatgtataaaaaaatttgatatttgcaaaatagatggaagagtatttttgttagtttgcagattaagttttaacttttaacaattaagaaagtataatgaatcattaaagttgtgtcaacgatttcatgttcttaattaattaaatcaaagtgggaccgaaaattaggttaaaagtcaatttattagggacgtcagtctttccctttgattattcttatacaaataggataaaaagaggggtatggtatggatatacctttttttataattagtgaaaggatgacttgtgtaattaataaaatgttaaatctattattgcaagttgcaagcacatcattataattaaataaaataaaaaaataaaaagtaaaaaggctaagaacttacacaaacattctaattataatgatggaataatggccatatcgcccactgggttccagagaaatcttacttttgagttttgagaacggtttcgtgtttccaagtactagctgtagccagtagccacacgtttcaattttgctgcttcgatcgcattacttttctgttataaaacatgagtattgttattactctcttaagaaccctacaccaataacaatgtcactagcgccctgactgagtgattaggaaatttttatattatttattaaattaaaatatatgagatttaatattaaattagctcaatatagtatattatatattatggtacttgatacctaaagggcagatgtaattgataggatgtggggtggcccgccggctcccctcaatttgtaaaaatttgcatataatatatgtaatgtgtagtttccaattaaagaaaaaactaatctcacctaaagaaactgtcaaattattaacatataaataaacattcctaaaacatatataataaattgatcgtgttctgtgattattatctttttgtgttatatattagtgtaaaaataataatgtttctacttctccaacagttaagcttactattgattttatcaagaatcacactacagtccgagattttccatcttgttggtctcaaaaggactccaaggtatttaagagggaatttaccttcagtcatattgactttcttgagaatattaacttttcattcttccttaactccttcaaagttatgggacttcaagatgtttgcagacaaacccgttgtatcacaacatctttggaaagcatgaagcatacaattcactgatatcattgcccttgcaaaagataaggaggtcatatactaaacataagttcatcagtcagagattcttacacatcgggtgaaatctgaaccccttgttgttggaacttcgagctaagagtcttgtgaggtattccatgattagtacaaagagcaaaggtgacatgggctctccctgtcgaagacccttttcccctttaaaagaaccttggatacgaccattcattaaaaggttataatttgtacttgtcagatagaccatgatccaatggatgaatctagccacgaagcaaaggcttttgagcagactttaccacaaactggacttttggtgtcagttttaaacttgcacttatacctttagtgtcggttcgtagaactgatacctattcgacaatcacaaaaagtcagattttaagtgtctgttataaactgagacaaatgagttttggtgtcattttaaaaccgacacttaaagtatacataaatgtttttttctttagtgtcggtttaaaactaagactaaatgagtatttttgaattaaaaaaaaatcattaaaaataagatttagtaattccaaaattactaactttatcaaactcattaacataaaaattttagcattataacaactgtaaaatgaacaattttcatttctaaaaacctattaaaacacataaaaaatgtacaa

SEQ ID NO: 34829 - DNA, 1566 bp, Cannabis sativa
caactgtaacatctgtatcggaggtgattctatgtgtgtggtggcgattgcgagggatcatacggagtctatcttgtgggtggcttctaagatgtttcagtttgctgattattggggaagctgcggcctgtttattagctatggagacggcggtctcaaggcaacatccttttgttatggtggagagcgattctgagagtgtaatcaagaacctaaaagctggtgaatctttgtgggggcttgagaactatacaagacaatgtaatcttctctctactttgatgacttgctgtaattttttttttattactagaaattgtaattttgtggcccataatgtggctaaatgggcttttgccagaaacattaacggtatggtagagatatttactattccgactgctatcctttgtaacgaccatgaggtctaactctttttatttatttataaacgcctttattaaaaaaaaaaacaacaacagtaaaacaactaaacaacaacacggaacaacagtaaaaacttaacacagtatacagtatttttgaaaaaaaattccatctcacagtgaaaaagtaaaaaaattaaaaatttcaagatgtagtgcaaaaaccccttaataaattatatacatagattaaaaaacaaaacaaaaagaaaataaaagcccaccaatttgatttacgaattttagtgcactaattaaataaaacctttatgataaaaataaataaataaaacctaaaaggaaaaaaaagttaaagtgaaattagaaagtatcaaacttaagctctgttagagttttgttgggtttgtgccttctcattttgacattgattattttggtcctcttccagcaagggattatgctctcgtgattcatgaagggctttagtatactcttggagtacggtaacaatagaggatctataggagatcaaatttgaatgtgataaacgatgaaggctgggaagtggacgattcaagtgtagtgtctggcggcaacctatgccttttaggtcgcctctgtgcagcaagaattctataagtcgttcttgaaaatgattccttgacgtatatagaaattgactgagaaagattgggattttaaatttaagggcaaaacaaattcctctctatttcttatcttgaactttaagaacccattgcatttggataggattgtattaaagatgttgtgggttcttcaacatggattttttattcttgaacgaatggataaaatccctctgaattgggattgcatgtttgttggctattctaaagtgactagaggtagactacactatggtcatcaagacaataaagtgcttattttcacaaatactattttttagaggcattgattatatagatataatctcaaaactaaagtagccacaacgtggggataccattcagtttcactccaaaagtgttccatcatcttctacgccgagcaaaggatgatccaactgcctctgttgaaccaacgtaagttgtgacaattgaagaggacaatatcactaatatttctaaatataaagtcgcaatatcttgttgtagtt

SEQ ID NO: 34830 - DNA, 2179 bp, Cannabis sativa
tatgagagaattaagatcacatgaaagaataaaatagtcaaaaactaattaaagtttttgaattctttaattggggttgtaagtgcagtttattgagtatcatgacagtacaaataatctagatttagattattgatgtggtaagacatcttggtgaagacattttatataatatggttatataagataaggaccgatgtgaatcacaatctttatacaaaagccatttaataataaagattagtattcgtatcataacagatgatcgttcatagatcaatctaaatcatgagtgttgatgaactcttgttcatgttaattaaattttctaatttttgttaaggtcctttcattgtatgaggctagtgattcttgttaaataaatttattgggtttataccatttcagagttactaattggagcctttgtttcgttaaatgataaaatggaccttgtattttctaaaatagtacaaataggaccttaagctcaattttcaacagtcttttttaatatactaactcaaaaaaaaaaaaaaattcctagctcgaatagatggaaaaaaaaacgtaaccaattttgtcataatacatttatattgagttattctaaagttttattttgacaaaaaattaattcaaggtactatttagtattattttgaaaaatatatggttcaatttgtcatttataaaacaaaggattcgatcagtaacttttataaaatacagtgtttaaaatggtatttacctaaatttatttacatggatgtctgggaacatgaattaacaagaaggagtccaatctttcttaacagagtgtatattagttcccttaagggttaattctggtactgaatgattttgagctcaaatctataataagatatagataaattattaactagtgaatcaatggtacttaaagaataagtagtaaagtagaaaggtaaaatggtaatcctttctgttgacgtagaaaattggccatcactcactcgctagattggcgagaggaaatagaagttaagtaaagtaagtaagagacacacacaagattaatagtagttcactcctcgtgtcgcggcggtaatggagctacgtctactttgagttattattgctcatgagaatacaagaaaattgactaaggcaagagctctatttctagagagaaaaactagagaaagatgctctcaccttgggctcttttctgaatgtgaaaatgaactagtagagctctccttttatcgggaatggggtcctattaaaacaataataaatattacaaaatatatgaaaaaaataattttaggctaattttggcgattgatgatgatctaatggtgaaaatgactttggatgatgatctttaactttcagagctcaaatctcgtctattggatcgttctcgggtaatttgtggaaaaaatcacacttgtcttgggggcaaattcgaacatgaaatcttcagaattccgatatgtgtgaaagaaatgacttgaaagaaatttgaaagatttttaaaacgcaagtggattcttttaatcggatcaatattaaggaaattatggtcgttactaaaggttgttcaagacctagcgcccaaattgacatattgatgttaatctggatgttgtgtgattgtaaagaacgtcccaaacatgtattttttgatgcctaaatgataatttgatatcacttagtcaatttcttaattgtaagtgattggtgcaatgagaagataaatctcgtagatcctgtacaatgcatcgcgttcctagccaactatcggatcgaagccattgccttaaatgcagagtggttggccgaaagtccctcttgaggggctacaaaatttagggtttatttatcgtgaaatgtgagggttcattctttcacacaatttgaagaactactttataccttttatactaaacatgtttgttaattttaacggaaaacacaagaattgtgttaaataattaaattttatatataaaaataaagatataatataatttgttatattaatatttatttataaaggccaaggctactcctcatactaaatgatattagttttcattaaagacctacgtaaaattaaaattgtattgacatgagaaagaagaaactaacataaaaacaaggcagttcttctatttctaaagaaact

SEQ ID NO: 34831 - DNA, 2112 bp, Cannabis sativa
aggtatgaagagtgacattgtgaagtatgtgtcaaatgttcaacttgtcagcaagtcaaggcagagcgtcagaaaccagtggaaatatttcaacctctaaagatacttaagtgaaaataggaagaagtaaccatagacttcatggttggattaccaagaatagtagggttctatgattctatctgggtaattagggatagatatacaaagttagtacagtttctttatcagggcggattacgtatatggtggattagtgtgctaatttatatatcaaggaaatagttcaactctatggtgctccaaaattaattgtctcatattaagatttaaagtttacatccaaattctgagagagtttgcaacgagcaatgagtgccaagttatattttagtatagttttttttccctcgggctgatggtcagtctgggagaattacttagatatctgaggatatactacgggcgtgtgtattagattttgagggttcctgaaataagcatctccctctaattgagtcttatataatgacaattattagagtattgttgatgtggcaccatacaaaatgctttatggaaggaaatatcgtttacccatttattggaatgaagtcagtgaacggaggaaccttggacctgatgcggtttaaggaacgagtgaggccatagaaaagattcgagttcataggtttgctttaaagagtggacagaagagctatgctgatccaaagcgtagagatgttaaattccaagttgggaatttcatctttctttaggtgtttccaatgaagggaactcagaaattggaaaaaaaggaaagtttaagtcccagatttatcggtctgtttgagtttctgaaaaggggaggttaggtagcttatcagctagccatactccctgccttacctgcagttcacaacttgtatttcaatgtatcagaaatatgaggcagatacgattcatataccgagttacgaaattatgaaacttcaaatagacttgtcatatgaagaataatcgattcaggttttgaaataagaaaataaaaagtactgtgaaacaaagactatatcgttagctaaagcgttatggatgaacaacaagattaaacgcgacttgtgaattaaagtcgcggttgcgggaacggtatcctaagttgtttagacaaattttgaggacgaaatttttataaggaggaaatagttgtaatatcctataaaattattatgataattaatcgggcatattttattaaatatgtgattatattcatattggagtaagagtatgatcttacttaagctaattgtattataattagtgaaaatttaataagtggttaataagacataatttattaattatggagattttatcggataatgtagaaatagtaaacattatttatgtgataaaatatttttaggtttggcgaccgtggaaactcgacggagtggtcgaagatgtcatgacgatataagatgaactatttggaatcagaattataccagagtagttcagaattttaagttgtcagtttgacagattaattagaatgaccaaaatactcatagggtggattttaggctttaaggttttataaggggcaatttagtcttttcctgggattttgtctttatgtgacttatttgggctgaaaaggggtaaatataatttagattatatgcctaagtattaatctttttggaagaaacctagaaaactaaagacaattgcataacaccattactctccttcttctcctccttcgaaacctagaaaaccagctgctgcaagggatttttctttgagttttagctgagttaatcaaggatgtatatcttctaagctttaaggtaatttcccccttcttttcctttgattttctagagttgtaggttaggttttgattagagattctagtgaattttgggctgtgaagttagtctaggaccaaagcttgttataggtttaattttagtgctgtgtaggttctagttggatgaacttcctggttgattggtttggaagtaagaactttagtttatgagctcaattttgtttctaacatggtgaattgggtgttgtagtgaatttctatgaattgat

SEQ ID NO: 34832 - DNA, 1211 bp, Cannabis sativa
  modified_base (420)..(426): a, c, t, g, unknown or other
  modified_base (750)..(766): a, c, t, g, unknown or other
tcagtgtagaaaagtattagtttagggaaaaaattatcccctaatacatgcatagaaattcaaatttccctatatgtatatattcataattatatacataatatttatgctgaaacgaagaaaaggaaaaaaacatactgtgcacacacaatggcatgttgtatgtggttacgagtataatgtgtcaaactcttatcgatgtacgatacgacagtataatatgcccaataaatggacaaagactatatatatatcatttaatattttccttatataattgaaataggaaactaaaatgctaatatcacgaacaatatcttaaattttaattttttaaattaaatttaaatttgagatattactgaagaaataaataatttttattcctcaaattttagaataaataattaaaatattagnnnnnnnatctttttatttataaaagataataaaaagatcccaaaactttttataaaaaaaaaaaaatagtaaaattctaaaaccataaaaaatggtacaaaattctaaaccagctcaccaaaataattttaagtgatgaaatatttcaaaattccaagaaggtcattcacctcacaaaaaagaggttgtttacctcacaaaaatttcaaaatggtaattttaccaaaaaatttcaaaagcgcactaaaatttaaagccataataaattaaatggcatttaaaataaaaaagtggtcattcacctcataatcaataataataataataatnnnnnnnnnnnnnnnnntaataataataataataaagattggaactacgttttacttgattcctataaaaggatacgtaggcaacttagtcgctagcctaagactaagtgcagtcgctgataccgcaaaattgtataaaacataaatcttaaaattccataaaaggtcatacacctagaaatttttccaaattttcatatagcaaaggatccctgaaaagtggttatctactggaatccttatattaaaattctaaaataacgtattctaaactacaagtggcttgatctttcacaaagaagatatgtaggcagctcggttagccaaaattactgagttcagctgcaattccgaatttcccaatttttttcaaaatttacctcaaagtttaatatcatcgtaattggaatcaaagggtgtttcctttaaattaaataaaaggattgtaattaagagattatt

SEQ ID NO: 34833 - DNA, 1386 bp, Cannabis sativa
aaaagttttaatttaccgaaattagtttaaatttccaattcacccccctcttggaaacatatcttgggctaacattatattggatatcaaagaatatatgtttggcttaaatactgattgatgctatcacatcggtacgactagagtaccgagtataggctaatattatggtcaatagtactatcgtgtgaacgttctagactcagtacgcgtaggacgtgggatagggttataattgggtgtatgggcgcctagttataatccagtttatgttataatatgattatgcttttcatactgagtgtcaactcacagttattatcatgtataggtaagggcaaagttaaggctgaacagcagtgaggttgagcaggtgaagattgtatatatcgaggaggttagacctggagtgtttgatcttcgggacagcaggttccattttgattagtcgctaggcgaaaagttttgtaattaatatattgtatttaggttgtaacttttgaaataagggatcccgacttttgtaaagtatattttattttaagtaaatggtaattaagtaaagttttaattaattacgatttttgacaaacacgttgattagcaatgaattgcacaattaatataaaatcacgataacaggcctaaactagtagggtgttacgaatcgtgtccaagttgacgtcatatgtcaacctgggcattggatgttaacctgggcactaggccaataacatctttcagtaaaacgactataactcactcaatattgatacaattgacgtgattcaaattgtgttttgaaggtatttcaatgctatatcaagtcatgtctaacacttcagtcgcaattctaaaattatcaaatccaaatttcaccccaagggagttacgaatttaagttataacttacccaaagtaggtctcgcaacgcgacttaagctctgaaaattaacaaccaaactccagagtcaatttcactattagatcatcatcaatgtgttagggtttataccctaaaaaacttgtaaagatattttgataattaataaaagttaaacatttttatgtaagcataaatgttaaattattaatattttaatattgaataatttatatatatataaatatcaaaaaaaaattattcatacatgaggttgtgacttgtagttgtacggagaattaagatcacttagccatgaataaagcagtcagcaacatattaaaatttaagaatctttaatcaatggttactagtgtggttcattgatacccgttattcggtgcaagtaatctcgattcggattacttatatagtatgacatctaagtgaaggtgatgtatataatagagattatagaagacaaggaccaatatgaataaact

SEQ ID NO: 34834 - DNA, 2839 bp, Cannabis sativa
atacctatcgaataatttctaaattacatcatttccacattctaactctatgatatgagagccaaagaaaactctaataagcatgctttcaatctaagcagtgagggccataaagaattactttgattgatcaggatagtaacgaccaattagtgatcaaaattagtcatgacatcttaatggaagatgttaaagaattccacattaataatgtgtaagaacttaataatatatatatatatatataagagtataattagctactctagccattgttaattaattttgagttcgaacctcataccagctaaaaagaaggatcgacagaaaatattaaggagaaaacagaggagaggcagagagacaatcgaaagagtaatggaatcgaaagagtaatggaatcccaagattttagggaaatcaagataatactgacagctcacaattgtggaaagatctagaatgacagcacaccaaagagggctgtgatcaggtgtggtgaattccattcacacattttaacatgctccctcaaacttgacgtggttgatcgataacgccaagtttgttcttcaggtagttgaattgttggatggtggtggccttagtgaagatattagcggtttgttcggaagtgggaatgtgtcttacttcgattataccttgcttaacctgatcacggatgtagtggatatcaacttcaatatgtttagttcggctgtggaagattgggttggatgtgagctgcttggcacctgcgttatcgcaccagatgacagcaggaagtttgtgttttatgccaagctgtttgaatagagagtggagccaagcaacttcggtagctgtttgagagagggctcgatattctgcttcagtggaggatttagctactgccttttgtttttttgaacaccaggttatgaggtttccccccaagtacacacagtagccagttgtagattttctgtcattgacagatccagcccaatcagcatcgctgaagcattcgacagttagctctttagatggtttgaacatgattccttggccgattgttccttttagatatcttaggaggcgtttgcacacgttccaatggtgttgagtaggattgtgcatgaattgacttaatttgttgacggtgaatgctatgtcgggcctgctgagagttaagtattgaagacctcccagtacacttcgaaagaacgtaggctgatcgtagagtttgctgtcattgagacttagtttgtctccaacagacaagggcgttggacttgaagccgagtgcagcatgtgtgttttggcaagaagatcagtggtatatttgccttgagagaggtgaatgccatacgccccccgagtgatttcgaagccaaggaagtagttgacggatccaagggtcttaagagagaacacctgctgcaattgattgatgattgtgcggactttgtgattgttatttcctgttaagaggatatcatcgacatagacaatgaggtaaagttcagcaccagcattatgataaaagaaaagtgatggatcggatacagagttacaaaatccaagagaaaatagcacttgtttaagacaatcaaaccatgcccgaggtgccttccgaaggccatacaaggccttttgaagtttgcagacatgattaggatgtgtcttgcttacatagccaaatggttgttccatgtagacatcttcagtgaggacaccattaagaaaggcattatcaatgtccacttgttgtacatcccaattattggtggcagcgagagaaaggatgacacagattgtggaacttttgaccaccgggctgaaggtttcgaagaaatcaacaccaggttgttgttggaaacctttagcaacaaggcgcgccttaaacctttgaactgtgccatctcgatttagtttgacacgaaagagccatcggttgtcaaccacactcatacctggttgtcgcggaacgagaatccatgtgttgtttttctttaaggcaaagtactcattatccatggcagacttccagcgaggattggctatggcagtccttacacaatcgggttcaagctcggtaatgagagccaaaggagatggtgagaaggcagtgaatacctgaggcttatggataccggccttagcccttgtaatcatgggatgcgaagggctgatgtgggcgagagggagctgtggtgggtgagtttgatggctgaagtggttgtttggatagagtaatgggtgatgggggaagatgtggctgtttggacatagggataggtgatataggaaggtgcacatggagtggtatagtggtgtaggagtgactggattttgacggggaaggccttggtgggctgggtgtagtgtattgaggagttgtggatgaatttgagtgctggttttcttgttgggcagcagaggaaacgtcattatcacttgtcacaataccattagcacgatctgaagtcacagtggagagctagggtagccattgagggtagacactaggatgtaagggtggatcattgtgtgcactaggataggtgaaaccactagcaaatgggaaatcggtttcatcaaatgaaacactactcgcaatgtagactcgaccggagttatgaagacacaagtatcctttgtggcttgggctataacctatgaacacacacttggcggatctaaattgaagtttgttagtgttgtaaggtcgaagatatggataacaagcgcatccaaacacctttaagaacttgtagttgggtgtgagattgaaaagtttttggatgggacacttgtgtttgaggacgggcgtggcaaggtgattgattaggaaggt

SEQ ID NO: 34835 - DNA, 6045 bp, Cannabis sativa
ttctccactttcaaaagagattgagattcaaatatttctgaggaccaacaaaacttccaaagggccacaactgggacccagcgcccgggttagcacctagcactgggcccagcgcccaggttgatatgttggcaacctcggctgtttctaatcaatttcaccaaaaagtgttacgtgcatttcttccgtcattagaaataatgaagattcaagtaaaatcaggaagaaaaccacaaacccaagcccttagaaatagggcccagcacccgagttgacaatcaacttggtgcgctgcttttgattgatcaaatgtcaaatctaatttgtcaaatgaatccaaaatggtcaaaatcattgtaggagacctcatcctgaagttcaaagagcttggaagtatcaaaacaagatcccaggagctcgagaatggatacgtaaagcccaagttgacaaatggcctggtgcgttgggttctgcttatccaattctgattccatttcaatcatctgtctagtttttcacaataactaagatccatgaattcaaaaaattcaaattcacaactttatatttctcatttccaacaatggaaactcactcaaaaatgaagagtttcgagtttctcatttcgcaagacagcaacatctccgagaattggagaccagctttgccaaaacacagaaacaaactaagtgatgtcaaaatatcacttaggcatcttaaaatacatccatgggcgctgaaaagtaaacctgggtaatagatgtcaacctgggcgttgggtaatgaactacctttagtaaaataatcataacacactcaatattggtctgattaacgcgattcaaattgtattttaaagctaatttaatgatcaatcaagtcatgtctcataattcaatgtcaattatgaagctattagcaccaaaattcactcctgacaaagttacaaaaataagctttgggttacctgtagcaggacccgctgtgctctgaaaaatgaccatcaccatgaaaagctaattttcactttaatatcattatatactatcaaaaacaactgatttgtgccttcttcactgataaaaggagagttctcttagcttatttttactttcaaaaaactacccagaaggttagagtttctctctctaaaaattggagcttctaatacttagcctatttctgtaccaccatcttctgagaaataaaaactcaaagtagaagtagctccattagtgtcgcgatatagggagtgaaatactataaatttgtgtctctcttataactacttaactactttttattctcatcaatctaacgagcgggtgtgacacagaattatagtccagatttattaatcaacatgcacgatagtatgatagtggtatgatagttattttgtcatgacataaattttaagcaacaacttaaacctattgtaccctattgagcactattgtattcatcaactattgcaccactatcataccctatcgaacatatattcctaacctgcagattatactattatcgtacccacaatcataccctatcgttgagcattcacaaaaaatattagcaaactttatcatgctataaattttatcatgccatataaattttatcatggcataaattttagcaacaacttaaagactatcgtaccatatcctacctatatcaactatcgtgccctatgcatatttcaccaaaacttgatttttaccaaaagaaatcagcaaaaacacaaaaaactacatctcaaacatctaaactacattataaatcatcaaaatgtgtaataacaataatatttaaaaaaaaaaccacttaaccattaatttttttcatcgtgacataaatgtgacaaaaattgtgtttctactacagcttcctaaaatgtacctccgatggtgaggacgaagacgaggtcgatggtgggagttgggtttctctcagtgggaaaaggaaaagaaaagagaaaggaatagaaagaaattgagttagagaaaagggagaatgttggggtatcaatccatgtcccatatcgaaagaataagaaagagttgcctttgatataagtgttccacctattctagtaagagatattttgggaaggtgcccaaaaataaaactatgagggtttaggcccaaagtcgacaatatcatactaatttgggagttaagatgaggtggcaacccaacaagataaaagaacgggctccaaaaagtagtatcagagccaaaagttcaagatcgttgggatagtgggatgcatttgcgatgtgtgggagaagcccttaatgtgatgacctcataattgaagatctatatggcgcctccatcaaaagtctattagatattgaggtagtcaggtggcgtgtctcgttgatgcttacggctgtacaagatggagatcagtgttaggacttgtcataaaagtcttcctgacaaagttgatggtcagacgacaagttctgtcggtgatagctccaacataaagtgctttcgctagaggggaggccacgagtatgtagtccttgatttaaagggagaattattggggtatgaacccaagtcccacatcaaaagaataggcaagagttgtcttgaatataagtgttccacctatgccatgggtaagaggccttttgggaaggttcctaaaaaccaaccgtgggggcttaggctttgttgattgtggatttacccaagtaacgccgagtctgactaggatcagatcgttacttatgactgtcacgtgaggaataataataaatgtaagagacacacagatttatagaggtttggccccttttgtttaggtaataacctactccccttttagttgtattccctcttgataataccaagcatattacaagttaagaccttgtaatttctagctaggctctcttcaatattacaatgtgtttggcatgttagaagtatgagaagagagaggacttattgctatagtgcttatgagcatgattgaaacttagaacctgagtctgagcatgtgtatcttgtcctttatatagtagtaggacctacaggctgcacatagagatatccctagaaaataaagaacatatatttgaaatacaaagtaaaactaatccctaaagaatagggttgttatttgttgatggacagtccctacctttgtgggcagtttgaactgttctgaagtcgtgggaatgctgaaggcgagttggaaagcttgtgaggaaaatacgttctggtgtatttttgcacccttggctagccaaccctgttgaaggttgcccagagcgtggaacctgtccaccctggccggccagctataggttcggccaggaccttgctagcttgtgcacaatcctgtcaggataaacttgcttgtgtccactgtgcaaccatgggatcttgcaggttggaaggctgcacgacattaatctggcaggttggaaggtcacacagcactaacgtggcaggttggaaggctacacatcactaacctggtaggttggaaggttgcacgacactaacctaataggttggaagactgaacggtactaacctagcaggttggaaggcttcacgtacaaaccttgtaggttagaaggttgcacgacactaacctaacaggttaaaaagttgtacgacactaacctggcaggttagtgctgacctttcttcaatgtattgtcagctttttgccacgtggaggagacatgttagttggataaaatttgagataacatgctcaaagcggacaatattatactaatgtgggagataagatgaggaggcggctcaacaaaatagaagaatagagcccaacaaaaacttttcaaatggcaagtatatttttgaaattaaggagaaactgagtactaatttcctttgtcgttcaatttggtttattttaagttattggtcaattataaccatgaaaaattattttaaatatatattatatattgatactttacacattgattgatctaacatagcactatctatttgcaatattcttgttggttcatttatgtgatgatggttgactgatcttattggaaagcagtttgaactttcatgcaaaatgtaaatttctcttttcgcaagagaaataaaatattgatatagtagatgcatggggtatttacttattagagttttatagtaacagttccactaaaaaggaattccatgccgtaaagctaaaatggccatattagtgatacttggtgtgtctattatttcaattgataatgacgagtgaaaagataataaataataaatatgtataattataatgcatagaatctgactgactcatttattattcactaataagcataatgactaaagtgtatccggctcacaagagacacatcatcttcatatataattttttcaatttttcaatttagtttttcgaaaaaaagaaagaaagaagggcatgtagctgattttattagacatcggattgcatttatgcaacattgtcaaaaataaaattatacaggcatttttatttttattttattttattttgtatgagtaggtaagtaggcatttaagtactagccatatattaatacttgaaaccgctttgttttaatacacattgtgggattagttatgtcgtgtagtttatacgttgccaaaagaaagtaaataaaacgtgttataaacattgactatcttcttgatcagatatatatatatatataaatatatatatatatatagtagtcaccaaaacataaatatgtggtttaatattccctttctaattatatatgggagaaattgcggtattagtacataaatttgacaagttgttgctctcatattaggaatgacaaaacgtgtcatcgtgtcgtgttcttgtcatattttaatgattcgcttttatatttcgtgtcaggtgtgttgactcgtcttttgacttgtgtttaatattctcaatcgttttttggcttgtgttcttgtcatattttaacgagttttaatgtggtctaaaggtacgattttggcctaatcactagaatcgactccgtcatcgttcgacatcacttcaaatccaattgtagtatcacttcaattccaattgtagtatcacttttcccactattgccatcttcaagaggcattgtccaacaatcatcagcaaagcaaccatcaatatacactcattggcaagtcattattagacctatgcgacgaaggttgtcatcagtaaacaaagtcattccatctcttctcgtatattcatatcagtcaacatagtatttgctctacgcttcatgtctattaaaagagcatgtcattttaaagggccgaccttttcaaaggtgacatgtcttgaagggatgacaaaagtatagaagtactctttatggtaaagtctgcgattacttttattgatgttgtcaatatacacactgtactgatgaaagtggtagaatccattcttttttcgagtgagacttctttttagatcacacaagaagtttatctcatgaggagttggaatgggtcagtcccgtagacggtagaagatgaaggaagttgattgaataaggtaaccatttagatttatttgatatgggcagacctcgaagtaatcaacaatcgacacaaatcatgggtgtagaggcaagaatgcacctgcattcatatgaaatcttgaccaagcactacaacaaggatttcgagagccactaggacatccaatcttgggttttctgacggcagtcttaggaagagaatattcatctcaaactaattgaacttggtgctgagtaatggaagtaaagacaagaggtctcaatttgaatgcccgatctcttaggtcttcacttctaatagcagcagtgagcaactcaatggccataacttttccgccgcggaccttatctagatctttagactttggcactgcaagcttagtgcggatggattaggccatgtgttggtaatattcttcaggatttttaaaagttcatctcactcgaggcatatttgctttcaacacagactctcaatctc

SEQ ID NO: 34836 - DNA, 2579 bp, Cannabis sativa
agaaggtccaatatatgttcttttccataagagtaaatctaaagcacaaagttagtacctgcattttatttcgaccagttctgatttgagattcaggcgagcttgagcttaatggatgatcttctggagaatcttctcccttgatgttaccttctgcagcaaagttgttacctcgtgaaggaggaggccttctgctgctaccttttgttctccttccagtcaagccagtttggattggaactttgggtgtatttaccactaacgaagatagtgaccgctccttccttttcacaggcacaggagttggggttgtagcttcaggcgcattgatctttctcctaagaggaaagatcttcgctcgaatatcttgcaaattgtggtctggcctgcatgtcattaacatatgtccttcagcatgtggttgcatctcaaaacaaaatattcagtgtaacaatttaaacaatgtgaatcgcatgtataaaatccatagggttacatagaaattttcatgagattcaccctactatacatttaatagttctactaggcagcctaatttgcattgaccggtaagttaaacgaagggacataagctggctagatcacactgtagaattctaaatcataacagtttcagatgattggcagtgacaaagcttcattcttgagggaacatataccatttttttatttctcaggagggctttattataactttttccaaaattttagacaaataatatatattttagtttaatttacataaaaatatataaaagagagcaaaaaatttaggggtcttactgcccccagcttaatgaatgactgtttctgattaaaccgatgataacaggaaaaattcacaaccataaaaaatgaaaagataatatcagtatactcgtaaaagaggagtaaaacttgaaactcaaactgatgagaaaatgttaggtcacagataacatgtttacaagaatgtcctacaagatccctctaggaattattacctgaaaatgttcacaaaatacattcaaaataaacaaaaagatgtagtttttgaggatgtcgacatatacttctaataagttatgaaatgagagcaataaatgttggatcattattcaaataacatactattaaaataaaaaaaaatcaggctacactagaagcttttatccacaaataaagggaagttaaaaagaaataataataactaaagatatgactctgccaggggacttcttttaattgatggaatgtttatatttacaggctgtagagaaaaaagtagtgacctgagtttctccactggaagacagcccaaatcaattttgcatacagggcagtaatcgacctcgtcatctgagagcttgtcatatatgcacttcctgcaaactgattttaaattcattaattgcataagttagatagtggttgcaagtagagtctagtctttcaatcacttatctaagcaaattacagcctcttaacattttggtttcaccaaataaaagcctgtattgaataaaacagaaaactttacataatgtgttggaagatgttattaagacacaccagaagaaagatctcttattgtgccttcaatatttgctttccctaaatatatataacttaattaacaatattgtacgaggggaatactacttggtttaaaagcataatcaatcatttagcttagtttactgtggaatatttcaaaatgccagaaagaaaaatgacgatatgtctataattaattttttttttgggcctaactgaaaaagcttcagtcatgcaagttaaatggtcatatattcacctaagataacagtataacacattcagatcataaacatttatcatataagtaaatattcttacttatattctatattaagaagaacaagatcaatttccagaccaagcagatcagaaatactgaacagaaaacaatagaaacactactgaagaattggaattcgaaaataccaacactggtaagtacgagaacacctattaaaactcattcgcctcgtgaaaattttccatagtagagcaatcacataccgaaacagaaaacggggcaactcgaatatgcaaagaagaagaaaaattacacgtacggatttgaaattgacgaacaggtcgtgcaatgcaaatcaatatcacaatgattcgacgagaaattggaaacgaattacataatagccgaaaccccagatcaaaaaaataacaaaaacacacatacaaaacacgaaaacaagacagacccagatcacaaaaaaaatcatagaagaagtggagaggaaaacaaaaagaagaagaagaagaagaattgacgagaagataaaagagttgagagaaggaacatacacgtgtgaaggcagagagagatggtagtagcttctctcaagagcttattacaaagagggcacgtcatgcatgcctccagcttatccctcctcgctttaacaatctgacccgccatctctctctctttctctttctctatcccttcactttctctctaggctaagaaaattggtctgtattgaaacggcattcgactcaaatttataaga

SEQ ID NO: 34837 - DNA, 1790 bp, Cannabis sativa
taaactttaaattaatgtaatgccgtgatggcctgcaaatctttaataattaaatagtaataataaaattaaattaaggcacgtacttcatggacaatggaatttggctccgtaagttaagcagcgatgagtaggacacagccaaaggaaaagtcaaatattgcttattatggttgggaatttaaataattaaacaaaatatataaagtaaggggtcttaatttaggaattaaaaaaagaacaaatcaattaaagtcataagtaaacataaataggacatgaaccccagttttaggccacctctcggctcttcctttctcatttttatttgttgtttaatttaaatgttaaatcaatttattattctcaatcaacccactaaaaatgaaataaaatgagaattgtcgggtgttaagtgaaatccatttacttttttttatatatataaaatatttggtagtttaataacaatgtagggtatcttactatcttatgatttctttaaaattggatatcgagttgtagaatctattttctttattcaatcgtgtcaaactatatacaaccctctatgagggttagttattccattggattggaagtatatacgtacgtatatatttcaaaggcaacttgaaagttttccaaggaacttaaaattcacttttgaaaatatttatatgtttggtacttggtaggtcctccaaatttactctttttgagaaagtcttctgaaaataaaataaaataaaaagaaagtagtatacaataaaattagaatcatacacatagcatataatgcatacattttaaaaaaaaaaatgaattatttgaactattttcaacacaataaattgttcaaaattgccaaatttcttgctacttcaagcatgtcttattatacttgcacaataataattatactttcaccataataataataataataataataatacattgtaggttgtttgactttcaattatattttttcatataaaaaaatccaaaagaagaagactttaaactatatttttttagtacaataaattatttaaaattttcttttagcgaaaaatttacgtctgaaaaatctccaaaaagaaattacttacccaaactcaaaatatgactatttttctttcaatccattcaattcaactctcctagtaaagatggaccacaagaaaatgaaatacacaaatatgtagttcaatccaaaatagtcagctttatttagcttcaatactttatttggcatttctactgtaatttagtttcttataatataaaaatccatattttgaaaaaaaattaaatagatttttgtaagaattcgaagaaggtcgtgtttttatgtaaagaaaaaagagtattcctgcaaatattcatagaaataagggagtcatggatagcctttcatgcagttgggcctgtctgaattgggcttttggtacaataatttttacaaaaatactaaattttgggcaaatatttataattttactgccacataattttttacaaaaataccatctttttataaaacaatctaaattaaccgtaaaacaataaaatagaaaaattaaaaacaacagtagaacaactaaaaaataaccgtagaacaacaataaaaacttaacatagtacataatataaaacttacacagtgtttttgaaaaaaaaacagtatttttaaaaaaattctatcccacagtaaaaaaaaagttaaaaaatttcagtatgtagtgtaaaaatcgcaacgtctaaagaaaaaatattgtttctgg

SEQ ID NO: 34838 - DNA, 8167 bp, Cannabis sativa
  modified_base (5148)..(5148): a, c, t, g, unknown or other
  modified_base (6493)..(6500): a, c, t, g, unknown or other
attttgagtgaggaagtttatgttcagcaaccaaaaggatttgaagatccttagtttccagaccatgtatataaacttgaaaaggctttgtatggtctgaaataagatcctcatgcctgatatgaaaggttaactcaattttttaatttctcatgattatcaaagaggtagtgtaaataaaactcttttcattaaacatataaaatctgattttatcattgctcaaatttatgttgatgatatattttttggatctacatctaattatacaatgcaagtgtttgttgatcaaatgaaaaatgagtttgaaatgagcatggttggtgaacttactttcttttgggtcttcaagttagacagatggaaggaggtacatttgtatcacaaagtaagtatgccaagaaccttgtcaaaaagtttggccttgagtcggctaaacaggtaagttctccaatgagcaccactttgaaattaacaaaagatgagcatagagtgaaggttgacactactctttatcgtagtgtgattggtagtctattgtatttgactgctagtcatcctgatatcaattatagtgtgggagtttgtgctcaatatcaaagtaatcctatggaatctcatgtatctaatctcatgtatctgcagtaaaaaaggattattcgatatgttaatagtactctcaactttggaatctggtattctaaagacactaattctaatttggcttgttttagtgatgcagattgggcaggcaatgctgatgatcgcaagagtacgagtggaggttgtttctttcttagaaacaatctggtttcttggcaaagaaacaaaattctatttccttgtccactgctgaggctgagtacattgctgctggtagttgttgtactcaattgttatggttaaaataaatgttgattgactatggatttgaattgggtgttttaactattttttgtgataacactagtgccataaatatttcccaaaattcttgttcaacattctcgaacaaaacacattggtataagacatcactttattagggaacttgttgaaaataaaacttggcagttagaatatgttgatactgagaaacaattggctgatattttcataaaggccctagactcaagtcgcttttactccctcagaaaatccttgggagtttgcattatctaatctcctttgttcttatttttgtataatattgttgagttgttctttgcttacatctaatcttgtttcttcttagttgacaaatcatgtttatgcttttggatgataattagtttaggatcttgtacttatcatacatttgaggctgagttaaaagattcatgttacttcttatgtgtgatcaggattacataatgttcttatatagagttgagcgacttttgtttcagctcttgtcaggccccttgctggaatagagctacctatactgaggtgtgaaagtcatattttgagtaagctggaactttgtaattgagagttgtgaagaggatgcactaccatagaaaagggctaccttcagtgtaatgtgatagcatccagttgtgggatcaaattgaaaaaggcaaaaaataaaaatattgccaaggacaatgttcctattttcactgcacacacttatgtctgccaagtgaattcaagtgtgttagtctcctctactcaaatataaattatcctgattcacattatttgtaacatgtctattttctctcaacatctatgaagtgtagttggtttttgagatactaattagttatcctcttttgaaagtataatatgtatatttgtctcttgctatgagacttgattatttgcttgctctagaataacttatatttgtttacataatctctttgttattatttttattcagattataaaaaataaaaataaaaaagggagggacacgtttgtgacttgacttgtgggctaagaaaatttttgctttgtttgataagtatcaacatttgatctaaattgatttattttgataagttaccttttaaaatttgatttcatattcattgtattttgttattgaccttgaaatatttccttaatttgcctatttttggaaagtatcttggttattcttgtttccttttatttttttttttaaaaaaataatgttggaaaaagagtgggacgatttcattatgatcatgggctggtagttttttaaattttgagttggttttcttttttgttccactttcacatatttatttaaaccaactttctttgtcatttattttcaccatctaaccaattcctcttccttgttcgttcatttctctattttttttcaatctctctttcagatattcatggctaagataaagaatttagggcattcaaaaagggtggtggaacccgaacctaccccctaaaatgcttctcttgtggctccaatcttgctcctttctcctgcaactgctcctcttcaaggagattcatcgcttcctcagtgtgaatctcaaaatgtgaaggtcaagcctgccccctcactggcaccatctttcaaccctcaaagtactttgatggagattttcccaagtaccctaaagcttctgttggtgctactgctgctactggtgcaagttccagttctgctcctgcagatgtccaggaggtcaagcagtaagttcttcaggagaacaatctcttgctgccatgtattatacccaaaatttggctagcaaatgagaggaagacacatgtcaagcgaggaagaataagaactcagacacataatcataattacacttgcaatggaataactcgttaaaagcataattaacagagtatgtttacaactcggctgactgattagtcttatgcgagataaaaaatatacaaaatgttgccttgagcctcgatgagaaaccatgtaactttaggtgtacaagacgaggcactaacctcgttatgtggaggagatataatgacaatggagacacttagcgtataatgtatggtatacaaactaaatacaacagatgggtgaaccaaggcgagaggtagcgaggcatccacctcgctgtaggaaggcatgcacgcgaaaaagatcatctcgtcacccgaaactgcggttgtcagatttaaggtaaaagcattatccaccttggaaagacatatgacaagctccagcttgctatcaagattaactctactctattcccagcgaggcattccaatacgatatggcctaaaatatatttaatacacgttcattttgaccttgtaaaagcgagatattcacacctgtgtgaaatttaaataaaaaccgcatttacttaacgtgatatgtaatcagatcccatgatttcaggggatgatcgttgtaaagactacgatcaactttgtaaattaatttcttactatgtgattataaatagtggcaggttagatcaaaagagggacgaaaaaatcatcacctgaacaggctactagctccgagaaaacccagtattggggacttagaatcgaagggcctaggataaacaacgagcaatctcttcctaatcaggttgataaggatggcgcctacgatccaaccaggtacatacctatcgttgagttagaaaactgccatcttaggcgctgattggaggaagcaaaccggcgtaatgccaaactaaagcgtgaaatagccgcagtcagggcgacacaggagaatagttcccaaaatcaacctgaccttggagatagagatccacaaggaaaacctcgtaagtcgcaaaccaaggggcaggagacaacccaaagatattcccaaaactctcaggggaggcaacctgaggaaactaaggaaagtctggggaaacagcctgggacctgtagaacatcaatcagagattgtcaaccctctctccaagctcataaaaaaggagctcgcgcaaacccctatagggggaacgaggtgaatcaaaccttaagaagaagagcagaacgagaagaggcgagggctaccgcgaggcatacagtacctcataatcgatcaatgcaaggaggagagaacattcatcacagcgatgatcaaaaaggcataatgcagcatataggaagagcaagatccgagagctgtcacgacacctacgagaaagaacacttgaacttgaaaaaacctaatcttcgtcaacaacttggtccaaagcaaagggatttattccacttgcaaatagatgagttggagactaagttcaagaggcatcaagtcagggaatcaagaaagcaatcagggtatgattctgttggagaattcgagtcggaagctccaggatcaaagagaaaagacaattccaaaaggctgaccaaggactagaaatagaagaaacacaacaaatatgtatgctgactatactgagcttaatgaaactctagaaaatatctacctcgcacatgtacaggaagtcgtttttagtgagccaaaacctatgagacacgtgaaacgtaaaagggatccaacaaaacgatgtgaataccatggagatattggacataacacggaagagtgtcgtcagttgaaggatgagatagaaggtctcatggtgcgaggacactttcaacaatatgtaaaggggcaggataatgcccatgatcagcctgatctacccagtaactcaagcgaccagggatcataaccttcctctataggaggaggggatacctcagtgacctcgagagggaacgcgtcacaagaagacaaggggcagttaatccggtaaagctattacataaaagtattgcaaagaaagtaaataccagctcttcagggttgtcgtattaagctgctacggtgaaagttggtcgtcaaccagtagcaattaaagacaaacaactaccagaactagttcacctggaaccccaggatatgacagggattgaccctggatattgaaacgattgtgggaatatgttaaggattgaccctgaacatcaaaacccgttctatcaaaactagatgcttttggagattgataaaataaaaaattgaattggggaagttcttatgagattaatgattgtaaatcgcatcgctgatgtaatattttgaacttcagttgtgaataaaataatcatttctttcaacaagtaattacaaagttttactctttaaaattacttaangggcatttatgtatgattaaccagaattcatctggaaatacatggtataatgcaaacccaccatttcaaaaattaaaaaaaaaatgaaaattttctaaaaggtcctcgaccaaacctttttgacgaaagaggggtcgaactgttataactccctgaccaaacctttttgacgagagaggggtcgaatcgttataactccctgatcaaacctttctgacaagaaagggatcaaacaactataattttttatttaaaacctatatgacgggaaaggaaatcaaaagttataaatgagatataactcataactccggcataaagctgaatactaacggctcgcactaaaggaaagtattaaacaagacatcgcaacgtcttgaaaaagtacttaaacctaacacgtgggtagaagagctaactactcatgtaagcaataaagatatatacaaagtgacaaggtcattaaaaatatttttacgtttgcttgaaataaaatcacttttgatgatcgcgatgcagaatcaataactgctcgtaaattgagggtagggcagaagataagctgctcacgcgtaaagtaggttattaactacctaacgttagaatgaaatacgagcaatggaaacctctaataaactttatgcaaatgattgtttaaattatgaatgaaacacaatcaaacaagcacatgttgaagtttaaacttaaaagtatgaggcattaaaagcaaagttggccatccaactttgcaaatttgtctttacaaaaagtgccaccaggggcaaaccattgtctcggctgaaaggccattttcaaaaaaaaaaagagataaataaaaaccaattctacatggtgggagacttggataaatcttcttcttcttcctctgcctcggcctcttcctcctccttccttgacttctcacagaaggccagagtttcctcttccttctcctccaagaagcttgtgtccatgttgggattcgccatccaggctcaatatacagtacaaatgccaaccttgttgcttcgttctatggttttgacctccttttcagcgagcttcttctcaaattcatcagcttgggccttgatggtcttctcggcttcttcaagatctttctttgacttctcgacttcttgtctgaggcaggtgatttcctgttgggcattgtcccgttgcttaatcacaaccacacattgtgatagtaatttttggacctcgccctccaggtatttaagccgctccgagagtcgttgattggaagcaaaagagaggaaagaagcctggagaattacgaataaatgaatatgagaaaaaacagaaataataataataataatannnnnnnnaataataataataataatatggccaacttaccatgaagttgtagtctaagttcctcaaaagcgtcacttttggactcccaggattgattaaatcccaattagagggaaggagagccttaagtttgtgccagcaagcaatcttgttggcctgggtgaattcagatccagcctcccccgctgcagccgacaaggtctcaatggccttgctcgaggaggtagaagcatgacctatctcagtaggaggagtgttggtgttgggggtgacttgaggaggaacttgttctccggtctcggtatcagagacctcgaggtcaataggcttagacaatgacttctttttgtgggcagtggttttcctttgccttttgggaggtaccacctcggcatttgtggggacctgtgggttggttcccctcttcttccctttttgatccatgatatcttcaaaacctcccatgtctgcaaaacaaaataaagtgttactattattaaaaaagcagataaaaaaagagggggagtaaaattttccacctaagggatttaccaaagtcactagaaggcgagctatcactagaagagggggtagaaggaccgtaatatccactaaaatccctacagcctataatcttgaatatatcaaagggctcgatgggttctaaatcccagctctcgtctatatgacttgccctatctgtcatagtgccatactgcacatctataccataatatgactcgtgacagtaaatatggacgtggaatctagggtaccagctgtcaaacttatgagcgactcggtttacgagaagggaatcccaaatataaaaattaaggctggtgtctcaaaaggtgactaatgtgttacgttcagccctaagtactgtgggagaccaaccacattgattacctcaggacgctccttcaccgacttcccgagaggtagtgttttcaagatattgtgctcgagccacgcgatcccaggccttatcctcttctggaacgggaacctactgccaagaagaatacttgggaaacttataatcacaagtatactccttgtcagtaagaaggcccaccgatctcagcttggcctcattcaaaaggaagtcgcatgacctaataaggccatggggaagagtcatcaggcgcctgtgccgactggccatcttggggatagggatggatctcatcaagagagctataaaaaaaaaacaaaacattggtcagaaaactgaaagacaaggattaatgtaactgagcatgaggaaaacaatcacaaacgaattctacgaaaggtggttgtgccgattggggaaaagaccagatgtccagaagaagttatctttgaaagacactttgtttggtaagtccacaataattttaggctcgctagaatgagtaccaagataatagaaaccccctacggcattctttttcgctggaacggccttaaccgaatagagatactcgatttctactggtgtgggtcattaccagttcagaattttatacaagaccttcaaactagcaagaatcctataagagataggattcaactagaacggggcaaacccaaggggtttatgtaatccttgaagtagtctcaaagaggaagtatggtccatgtgttggatatattttaccaagatctagatttactagcaagtatg

SEQ ID NO: 34839 - DNA, 1772 bp, Cannabis sativa
tgcacctcttaaaagactatttcgattcgcttttatttattttactattcaggatatgatcacatatgttatagtattttaagaccacttataaatttttaaagaattatgaatagtttatagtgtaaaaataaagttaaaatagttactaaccatacttaaaaaataatcacgattgtaataaaatatttgaactttattttcaacattataaattattctaatttttttaaaaatttacatgtgattctaaaaaaatacaacgtacataatcatgaaataaaaaaaaatgaacaaaaaatgaacaaaatgaacaaaatgcaataaaatatgaaaaatggatcaaaatgacccttttaaagaatgtaaaatagaattaaccaataacatttgtaacatgtaatacatataaaaacatattttataatatacacactccgaaaaaggctggttcggtacacattttagcatctagaagaatttttagtcaattttattttcatgatcgtgcatgtttgcagttatttaagaccaccgattgattttttttcaaaaaaaaaaaaatacagtgccaaaagtaaaatataaatagtttgttatagttataattattttttattctatgtgtagtaaacatatgtttgaactatatttttgtcattgtaaactatttaagaatttttaaaaatttaccgataatattaactaagtacaatagacacaattataaaataaaaaaaaattgtaattataataaaaattacaaaataaaattataatctccataaaatttgaatatattatttaaatgatctagttttaattatatttagaaatatctattcatcataattatatatttacactaataaatcatacaaaaagataatgatattgataatagtacataataatcttattatgtcttataaatgtttccttatgttaatatttttttttagttattagctttttctttgattagaatatatgtgattaactacacataaattatacataatttttaacaaattaaggggttatggccacctcaccctatcaagtacatctgcagtactactttatcattatattacttgattcgattgtgtctatttgcgtatcgattttagaataatcatttatttttttggcaatacatacttaattttgctttttttattattttgtaaatttaagatgtcttttaaattttactattatataccaactttttaaaatactttttataatatttaaacaattaaaattacttagagaccaataaaaatatatgctacgtacgtacataaaatggcaaagtcattaagatttaatggtgaaatttaactgatgtcttaaatttgtatatagaagtaaagttagggggtattgtgaccaaaaaaaaatcatagagttaattgtatacaaattaaaatatataggcacttaaccgcaattacttataataattaatctaattaattaacaggtagggaatatcatttatactagatgcactaaaatagagaaactttaaaatatttaaagaattaaactaaacacactagcacacccaaaaatttctctactccatccttcaaaatacatcactaaaatctaattttttttttattttacatcaaaattttacagcacaccatacaacttcttcatttttttttctctaaatcctttaaatgtaatatttttatatacatgtatattaattataataattaaataattaaataaagagaaaatgagaaagg

SEQ ID NO: 34840 - DNA, 2612 bp, Cannabis sativa
gcaaatacatgatatttactgcgttcacaatcctgtcgatttttttttatacatatggcattacactaaaaaaaacataaaaaatgataaatcatcattttagataagatcacattttttgttaaaattattatctaattaaaatccaaattctaaggtaaattgttcaaaaaaaaaaaaaaagaagaaaaaattacattttcaaaacgagcatggtggcatcagttacactaaaaaaatggtgccttttagcatttttccttgaacccattgtatcacacccaggggaaataaataaattttttatgttatatgatgtttgaatgagaaaatatagaaataattttaaaacaacataatagtttttttttaaaaaaattaatcaaattataaataaatacgatggagataatcatattacaaaaatattttaaggtaactcgacacgattcttaattaatgaagccgtgtaagaatatacaggattaaacagttcaatctaataaagaaaataaaaagtaatgcatgcagtttacaatattattccctacagacctatgaacgttccgcttataaacaaagcggcgatgatacgccagttttggtatgatcattttggggtaaaaatacaatgtatttaaaaatacatcatgatgcacagtaagttctaaatgtagcctcaacaatgatcgtattggtatttggccaaatattctagtagctaaagaaaaaaaaatgtatacatgcaacaaatcattacccagcgagcacaactactaagattggtttttaaaaaatgtagtgttattgtcggcgtacattgctgtaaaaatatagcaaaataatcctttcgaagtcataacaaaattgcacttagatatcaaagggaggaactagctaaatgatcagagagctatgaacacaactgacctaaaatttccaaaatggaaatatctataataatgtgagccctaaaaattataatgacaataatcaagacaagtgaaccctagtttccaaatgaggaacattttagaaaaatatacggttgaattgtagagaggaaagagatcaaaccgcccaagaaaaataaatactaaacaatataataagaatcaaaacttcattgaaacttgagcaaatgacagtagtcttaccatccttgtccaaaatttagaactacattcaaataactactaatgaaataggtcttaaactctccaacaaacaatgtacttataaaacttgcccaacataaaagaaaaaaaaaaagctttgtaaagctataacaagtttgctcaaatctgatcaaaatgaccttctataagcaccttatgcggttgcagcggctgctcccttgctcctgggtgctgcttgagttcctattaaacaaaatcaaatacgtactgaatcagcacaaaagccaaacaagaaaaacccatcacaaaaatcacaacaatggagaataaaactaagaagtaaacatcattaccctctctgaaaccgctcttgaatctgcgaggaacgttacgaaggtacctcatccttccagtgccggtggtcttcctacggatcgccttgacactccagttgtctagaattaaatgaaacaaaattaaactaaagccctaaacaccaatacgaaactcttccaaggaaaaaaaaatggctttatgattatctaagtacaacctaaagtgattcgttatatacgattgattagcattcatacataacgattgtgaaaacaagatgtaacattaacacgatgaagaaagaaacttacaagtcctcttgcgggcagctgggtaagcacaagccgagcatcgactcttctggagatggaaactgcggcgaccacacctcacacagagagtgtgggtcttgttcctcctcttaccgaaacttccagttcccttaccctattgatctcatcgcaatacaaagtgataataataattcaatacgtaaacaagaatcaaaatcgaaatcaaccaaaattgcatgatatcagaacagtagagatagcaaatgagaagagagaaatgtaccattgtagcagagagaaatgaagaaaccctaggcggtgaagaggacgagtttggctaaatagaaggaagcggcgctgagaggagtttataagagccaagtgcgagggttttagaatgtctagggttggaaacaaattggggaaccatttgggccgactttctattgggcccaatttgttgggctgttatgtaaaatctttcattattctctttttctatatcacttttgtttaataccttaatttatttttaatatatgtatatatttttttttggaatactttacttttgcattcttaataagaaaaggaattctgtataatatcccctaatctttttatactgggaggagaatttggactttgacctacagttggacaaaaggtgttgatgaataatttattatcattctctccattttctagttctttgcgttgttgttgagaattgttagggaaacttacaaaaatactgtaataagggttaatttttacaaaaatactgtcacacgaattttttaaaaaaaatactgtatttttataaaacaccagtagaacacta

SEQ ID NO: 34841 - DNA, 1474 bp, Cannabis sativa
  modified_base (29)..(33): a, c, t, g, unknown or other
gtgtttattatcattttagaaagttcatnnnnnggatgttaaataacatacttgtgaatagatctaagttcctagtaaaataatttccaacatttagcacaccaattcacactctgttgagttaaaaaaaaaattgaaaacaattttaagctgactaaggcactattcacataaactaaattattctacaacaaagaaataataatcaaatgttcttatcttcatcaatataaagttcttctaatgagatttatccctaaatgctacaacggataacaatacatgcaaactatatggggctaaaaattctaagcaatatgacaggtccataattagccctacacaagacctaaccacaccattatggatcaaaaatgtgcaaagtaaaatacttacgtatggaaggtgagggtgttggaactaatctttggttttcatgcttcaacctctctggacagaagtacttccatatggataatgaaggtgtaatagcagttatacaatcactatgcttaagcctcccctaaaaagctttaagtcactctctaaactcgttgatatcagcttgaaagttcgacgatgaagtgggctttaaagaatctatttcgacgactaggggtgcgttgggcaataatcttaaacgtaatcggaggagatggttatagatctcgtcagcttttgaacattcacagaaaaattagggctttgggtaaagttttatctattggaaaagttggagctcaaaaatcaaaatggcaaaaagtggtaattgttcaacctcgattatatttatacataaattggggatccacgtgcttcagattcaacgatctagactatattccagtaaaaacacaaacacgatccaacaatcaaggaatgcaaagggatttcatttaatgccttatgtggaatcgaggcaaaataataatgatatttgtctcgagaaagttgctagtgtgattagttgtcatctcgcaaatccagagatatgtggcatttgccttccaagacatgtagaccacacggaccaagaagctaatgccaccatgtattccacacgcaaaaaacataggtttatcactattcatgacttgatatctcggaattccagaagcctaaaattatacatacatggttccatgtaccataacgaatctgaaagtgaagttgcacacctccgcaactctcaagcccaaaggcttgggcgtaaatgttatccatcttttcaaaaaggtgacacatgtacttctaagatttctcccacttcaagaaggcccaatcttgagcccaaatgagtgggtcgacccactaagggaatcggtatgtgatttcgtgttcagtaaaatattaaatttatccattataaggacgaatcatccaagtctgagaagggttctcgaccagaagaaggcttaaaattgcctatttgaatacactccagaggtattcccagaaggactatctaaaagac

SEQ ID NO: 34842 - DNA, 2346 bp, Cannabis sativa
tctaggttcttcccaatgtaaacacactttgtgggatttcctgggtcgagaataacttcttccaattcttcaattggttttaataagtttctttcatcttgaacccggggtcaaggtcctcgtccttctttttgctttcttctaccaagatcgccattaactaatgaccgacttttctatgttgtagctctatgcgaaagcaatcacgagctagcatctgatcacctcgcaccacccccactaaattcagggattagatcttgatcgaactgactgcccctagtccaatcattgtcgggcgacccaataatatattgtaagccgatggtaggttgacaactagaaagtcttgcataactctcgcgaataggggtgcctcgcccaaggttaatgcgagctcaattatgccttaataggcaatactgtcttcggtgaagccgcaatgatttaccattcaaggcttcaatttggcttttttgagccccatgttcctcagcgtttccttataaaggatgtctactgagctgttgttgtctattaataccctctttatcctttcattggcgagctgtatagtaatcactaatggatcgatgtgaggatatctcacgttcttctcatcttcgtttgagaatatgattggaggttccttagtttttaccttcttggaaggttctagggcaaatatcaaccgctcattctttatctctttcacatatctcttttgggcattgttgctttcccctattatatgcggccctcccgaaataagcaagatgtcctctccttcaacaggaggaggttgtaacccctgattgtttgggttgttgggtagactgggctggttgtgtctattgccctttctcttcacatactacttgaaatggccccgagcgatgagactctctacctcatctttcaactgacatcatttgtcgattgtgtgtcgaatatccttatgttatttgcaatacttgttaggatctcttttgtgcctttcatgcctcatgggctggggcttgccgaaggcaaccttctgctcatttgcgaggtaaatattttctcgagtttcattaagattggtataaatagtatacactggcacgtacttatcgtgcttcttttgtttcttttttttctttaacgattccttaaaatcgtcctttctttttgagccaaaggcgcctgagttatcaactctagtagagacaacacttgttgaaacattgctggtttcgcttcccaagcctattttcagcagattcatctattttcgagcctcctcttttggaacgaacacctgagcccttttgttgaactcagtgatgttctttattagacgaccctttaagtcgtcccacagttcaccccctacggttgagggatcagtagaaacccccgcttgaagggctgtaagttgtgtactatcatccagatttctaacccttgcagcagccatactaaaatgacttaagtatgccttatgtgtttttaccggttgttgctttatattggttagtgcggctgcctcaggtcgtctatcccttgcaggctggaactatttcttgaaatccatggacagatgttcccaggaagttatggaattgtgagtaaacttgttgaaccagctgcttgttgctccagctaacgaggtgggaaacaaaatacaatgtaaattgtttgtcacattactagctcgcattattgtgttgaagttgttcaaatgcaagaccggatcggtggttccatcatacgatgagacatgcgggtttttaaagggaaatttcatttaatatacttgaaaaaaatccctatttcaaaagaaaccatcttaattattttgtcaaaaccaaaaaaaataaaaaatgaaacaccatttttattaacatccccccaccaaccaccccatcaactaactcctcccctttctcatcttcattaatggttcttctccaattttttccaaaaaaataaaaaaaataaagccctcctcctttctctctagctccgctgcctacaacccttgaggacatccggccagccaactcgcaccagcccaaccaccgtgaaggacgccggccatccttcacgcctcgttccaaccaccgcaccgcccctcctcgacctgtctttcattatggattaatgggtaagtgtttttttaaaacatttgttaaataattgtaaaagtatagcgtattttggtagatctatggtgttgttcgtagaattttcgtcaaaatcgcgagatctaattttttagagtatttttggttttgtatttttctcgactggttatcgattacttctcgaaagcttcttgaagcagatgttccaaggtcaggg

SEQ ID NO: 34843 - DNA, 993 bp, Cannabis sativa
gatgagtaattatattttatattgttataggtaaaatatatatgtatataaaaattaacattaaaattttactcttttttttttggattgtatggatccaattcaatttaatatatactgtacctaaaatattagatggatctaattcaatccaaaaaatactaggtctaaaatattgaataaatctaaattaaaccaataaatatttatgaaatacatttaccggatagaaccgattcaatctaacatccaatgaatgttggatcgataggatgactgaaattaattggatcggattggatggtaaaatctaacatccaatatataattggattgaatctggatagacctaaaaatattgaatgtgatataatattgatacacaagtactcatacaccaatctaagccaaatatcacaaatatatacacacatacacaaaaattaacacaaatatctatctaatctcccaataaattctaacacttaattaaccataaccattacactaacaaaaaaaaatcacttacctttgccgagggagagggagggactgtcgatagagtcgggactcgggaagaggaactatcaaaaatcacccaaaaaaataaatataaagtaagaaataattttttattttttattttttttttctgaaagaaagtaaataacacaaaagtaataccttttaaaaaaataatttatagacagattacctctgtgacagcggagattggagatgatatgaaaaattagggttaggagaatggaggagactggcctgaatttgatctatataaaggactattaggggcgacacatttcgcccctaataaccttaaagttcgtccctaatgctcaaacatctgacatccctcaattcaaaatttttagggctggcttcaatttcccgccaacttatccagcaaactgccccatttctagcgatggttattggttgataacaattaacaataaccctaactaacttcat

SEQ ID NO: 34844 - DNA, 7604 bp, Cannabis sativa
  modified_base (6846)..(6853): a, c, t, g, unknown or other
cttatgtttatttttttttagctttttgagaatgtctttcaaaataatttttttgatagcacgatttaaattaattttgcttattacatttccatttattgattagtgatactttccattctctctattcaacatcatcattttttatatggatttattgattgttatattattattttttttttcaaaatacaaatgagatacagtaataataataacttatcaattattatattattaattttcaggatggtgacgattacaagtgtatacagtaatgacaacgactttggatatagtgataagtgaaatatggtaataacaacgattttaaaattgatgagctttaaataaatttaccaattgttatattttctatttcaagttatcgagaaggtcatttaaaagagttttctaactgcatggtactatctcataatttaaattaattttacttattacattctcatttatttatactatccattctctctatccaacatcattatttttttttctataaatttatcaattgctatatattttcgttctaagaatggtaacgattagaaatgagatacaatgataaaagctttgaatttagtgatgagtgagatacaatgacgacgataattttaaaattgaggagttttgaatagatttattaaatgttatattttttttcttcacgatggtgacgattacaattgaaatataatgatgacaactttaaatatagtgacgagtgaaatactttgatgacaacaattttaaaattgataagttttctataaatttctcaattattatatttttttgaatactaactttataataatatatattaattagttaattaattaattgattttcatatttttagttcaaaataattaaaaaaattaaaactctacaatattaattttttttctgttattaaaaaaagaaaaattactctatatattattttttaattttttttttcaaatttatagtttaggtttctaaagtgatttttttgttagtttaagttgatataaaaattttacttgcgatttaagttgccgttaatttcataaaaaaaaaaaaacctattttaaagtataaaaataaaataaccttacaaaaaattaataaaaaatttaaaatttaaaatttgataaaattttattaattatcattaaataaaatataacctcaaatacatttcctaatcatataatactgcgggaagagcgaatgcaattcctagtcctaacataaatataaaatagatagctatatatataacatttgagtgtagggtgtgtcacgcctctttatttaataaaataaaataaaattagtctgaaaagaaaagagtcacaaagttgtgaagaggcatattctctctctttttcaagctccgacttttcttttattaaaattttattattattatttaaaaactatctttttcctcaataaaaatccacactccacgcccataatccttctctcaacgcgagctttctctttctagaatctcgattttccgtcgtcgttttacagagccgccgacgtcgtttagtaccaacagaaccgaagatgcattctagtcacttgcttctcgaggagcctattaggatggcttcgatcctcgaaccatctaaagctgtaagttttttttttttggatctgagattgatttttatggtttttgttagtctatgaatcttttaaggaaaagtttattgattagggattttgattttttgatttttttggtgatcgtagacttttttccctgcaatgacgaaaattgtgggtacactcggtcctaaatctcgatcggttgaagttatttctggctgccttaaagctggaatgtctggtatgaagtttttaacctatttgatttctatgttcttttttttattttctctaattgaagagtgaaaactgcttttgtgaagctctttagtctgtttggctaaaggatttgaggttttttggtgggtggtggattatatttggctgtttgtataattacgtatttggatgtgttgcatgacagttgctcgatttgatttctcgtggggcgaccctgaataccaccaagagactctggagaacttaaaggcttctgtcaagcttaccaagaagctctgcgctgtatgtaatttctgggttttcgttgctagtgctcattaaaaatagatgctattgtatatgttagaattttatgtttaagaggaatatgaacataataaatatgatggggcctccctgagttttaaaaaatatatattcctgattcatgtgcttgacaatgacacggatgtattttggggtttatgtttctttttcaggttatgttggatactgtgggggctgagttgcaggtggtgaacaaaagcgaaaaagccatctctcttgaggcagatgctttggttgttctgacacctgatcaggaccaagaagcctcctcagcggtgttgcccatcaattttgatggactttcaaaggttttgctttattctttttgactatgtgtgtttcatatttaaaaaatgcatgaaaagaaaggaaaaaaaatccattcccttgtaattttggaatggtaaaatgatcttatagcactagtgatagattattagttcttttcctgatcgattaggttttactcattggtaccagtttaggttttactcattaggttttttacctgtggtccagtgagagatgaatttactggcttccctaactaacacatatgtgattctaagacttgcaactgatgaaaacttgaagcaaagcaatttttcacatgttattaagtaagatgaattttgtgataaaattctaatatttgtatggcttctgcagtcagtgaagaaaggagatacaatttttctaggtcagtatcttttcactggaagtgaaactacttctgtatggttggaggtaagatttaagcaaccaatgaaattaaattattttatactgtgctcttctactgagttccattgctctacttgatatgatgaatattctgtgtaacctgggaggaacagattagtcatgtgaaagataaggttttcttttgacttgtttaggttgaagaggtgaaggggtgtgatgttgtttgtatagtaaagaactctgcaactttggctggtgcattgtttaccttgcatgcttctcaagttcacatagatatgcctaccctctctgttaaagataaggaggtaaatattttttcgtgcacactttaaagattaatatgtttcttgtttttacttttgtctcttttactagctttctcttaatctctttcttaattttctcctgatttccttttcattggtttgaatgtaattacaggtcataagtacttggggactaaaaaacaagattgacttcctctctttgtcgtatacccgccatgcagaagacgttcgccaagtaagcaattgatctaatgaattatgctcttcaacaattagtatgcttgtttgaatgattttcttaacatactcgtgctttgtgctgtcatttaggcccgggaattcctttctaagttgggtgacctccaccagactcaaatttttgctaaaattgaaaacattgaggtggggtgacataatttatttcaaactcttcttcctcctgctctatgaatatttaattttcacttgagctaagcaagttgtctttttaattttaggggttaacccactttgatgagattctacaagaggctgatggaattatcctttctcgtggaaatttgggaattgatcttccaccagagaaggtcagttcattaaaacaattagtcactcacttaggttttttataacattttgtcaaggagttgcatgcatggtattctttgcttttctttgtaatttaagagatgcatataaaacccatcatgttttattcatattttgttttgtctcaactctcaatttttaaataagtagttggtataacttttctttggtgacaaagttttaaagtgctggtgaaacgagtttcaatgtgctcaatacgtgcaagtgaatgatgcttgttcttagcactggattcaaattaaatttaccttgatattggaagttttttctaatgaaattctattttgcaggtctttttgtttcaaaaggctgccctttacaagtgtaatatggctggaaagcctgcagtggttacacgtgttgttgacagtatgaccgacaatttgagacctactcgtgcagaagcaactgatgttgcaaatgctgttttggatggtttgtttctttcctccattccatctacagaatatacattttttacatcttctgatctttttacttggctgatgcaggaagtgatgctattcttctgggtgctgagactctacggggtttataccctgttgagaccatctctactgttggcaaaatctgtgccgaggtgaattatttttttttccgtttttaatttcattgagtaatttgctggcttccttgctgatagtgtgccagctctacccactcgtttgcatttattctcattttttttattcttatgtaagtttagtaacttctcaaggtttttatcgttttcccttgtttgattctatgtaggcggaaaaggttttcaaccaggacttgtacttcaagagaacaactaaatatgttggagaaccaatgacacatttggagtctattgcttcatctgcagtacgtaaccctcaatttatatatatctaatatcatatcgttcagtttagttgtgtttgttgaaccgttaaattcctccacatcgcaccgcagtcgcaacttctatatgctattttaattcaaaatacatgctctttattctttaggtacgggcagcaatcaaggtgaaagcttcagtaattatttgctttacatcgtcaggaagggctgcaaggtaattgagtattacatgctcttcattttcaataatgcaagctggattctgcctgcaatagttcatttttattcatttctatgttgcttttattgttgaatgatatctgtaacacttaaaagaaattacatgtatatgcagattgatagccaagtacaggccgacaatgccagttctctcagttgttgtcccccgtcttaagacaaatcagctgaagtggagctttagtggagcctttgaggttagctcttgaatccttttcttttcttaaagtcagctggtttagaaaagtaatgtattttcatatactgcttgtttcaatcaagtcaattactggtttaatggccagattcccttggaattttctgaagtaccggatgacaaaagtctcatatttcagtatttttagtcttggacaatttttttttggatctaaatcttggacaaatttttaattgcattagtatcatctatgaatttaccactaggtaggtatttaagtaaaagggggcaacaataaaaactaacttaccaccgtgcatcttttgttccggaagaagattttacttgtttgctttagccttttaattcatttgttctaaaatcaagcaagatatttatgtatccttgttaatatgcaggcaaggcagtctcttatagtcagaggtcttttccccatgcttgctgacccaagtcatcctgtaagtcttttatcattattattattataaacccagtctccttgtttaggtatctctatgttaccagtattgaatgatatgattttcttgctcatgatttctgttttccatgtttgatttcaggctgagtcaacaagtgcaacaaacgagtcagttttgaaggttgccctcgcacatggaaagacagccggagtcataaagtcacatgaccgagttgttgtttgccagaaagttggcgatgcctcagttgtcaagattattgagcttgaagattagaagagattcttgctccttttttgtttttttattgttcttccccacctaatttttggaacgcctgtgtggtatagtgtccccaggttttggcgaaacccagcgctcttgtttatttaacttgaatttataatctttcctgagggtatttataaatattgattcgacattaccggtcgacaatgtcgatgctgaccccttttttgggtttagttttccacagtaatttcatggtgatgataaacgctcatatgatttagtttttcaagtatgattagtttaaaagcaaaataatgaaaactatatcgattatgtcttgttctttgttgaaatttttattaccatttttatgtcatcttttatttcttgattattttaagtgtttcttttcatttttggaatatatacaaaagttgtttttgtaacatgttaatctgttccagcgctgtaaaatgaattacatagattacaattcttatttatatataatgttgtaaataggggtgtaaatgtttaattggaacttgtctaattaaaaattagaaaaagttcaaccagtgattttgttagtttggatgggttaacttgtttaaactaaattttcaacaattttttttttttatataattattattgttagtttttagtattcaaataattagatttaaaaagataaaaatatattatttaaatttaatgttaaaaaatgttatagtgtaaattaattttaagaaattttaatataaaataaatataaatgagtaaatataaaataattaaaaaaataataacaaaaagtaataagatgattgaagattttaaatttcaatttcaatattcaaatataataaaatttattaactataaagtgtaaattttaagttaaatattaaaatgtataaactttaaatacaaaatagtttaactaataaatataatttatgtnnnnnnnnatatacacttttattaaaaaatatataaatcggtttaatttggtttattcgggttaattgtacagtttagaataatttgtaaatcacccaatatattcattggcggtttggattttcattgtattatttctagttgtattttttgtcggtttaactctcagattgatagcttcgcgtattgctcatgctttcttgatcagcataacggcgatgcctactaccttctcgcgtttgcctgcctgatcgattgtatcctcgagacctaaagtgtcccaaactagagcttgcctcatcttgtaccaaccttctccttcgcaagaggttagatacacgtcctctatttaggtacgtgtatacagcttccctctcggatcgagaaggacgttgggggtgtctcagtggtagcctacttgtcctaggttgagtcccaagatttctcttgttattacgaggtatttcctattccctagcttggggctgccttgtgtcctcattcctgcgagaagcctctggtacatcatttcgtttattctcctgattcataaatccttgggatctttgaggaacttctcgacattgttcttggttattttgttattcatccactgggccatccctagtacccccaagttgatcctcctgggtgtttcgcagatttcctagatttgcttcctgtctcctggtttttgaaccttgagctctgcctcgtggtcttcttaccccagggaggttgattctgagtattagttcc

SEQ ID NO: 34845 - DNA, 1549 bp, Cannabis sativa
aagttagttgttattgtaataaaattaattagctgttttattttaatttaggtaaaattataaaactaatgcagaaaaaaatatgggaaaatacagatttttctccattaatggcagaaaaatctgttttttttctctttttttttttacattcttgacggtttaaaatcgtcgcctataccctgttataggcgactgttttaaactgtcggtaagtccacattagcgacggtttttaatcgtcgcgtattttgctcgttttacgacgatcgtataggcgacggttatagaaaccgacaggaatactttaaacgactgtttaaaaacgccaggaaaaactatttttgtagtagtgagattttgccaaattaatcttttgtcctagcatcctctcaaaactatgtagaatccctatcactttttgagtccctcctgtgttagcttggacaaaaagatagctatcattagcaaataacatatgagaaattaacagagcacccctagccacacgatacccctttattaattgattctgctcataccaacgaagtaatgtcaaaaagcctttagcacaaattaaaaatagataaggagacaaaaagtctccttacctaatccctcgagaaggaacaatagtccccatactatgactaccacgaacaacctgatacctcactgtggaaaaataacatgaaaccagttgcacctaatgttgcaaaaaaactaagtttttgaagcataaacctgagataattccactccatcctatcatacactttattcatatcaagttttaacaccataattccctccttcccaaaaatcgtacgcttcaaatagtgcataattttaaacgacaccatgatagtatcgaaaatcaatcgaccgagtataaaagtattttttgtgtcagagataacttgtggcagcacaacttcaaatcggttggccataaccttagaaacaatcttgtagaccacattacacaaagaaattgaccttagatctctcatctttacgggattcttattttttggaataagaacaatattggcgtcgttaataccaattagaaactcacccaaagagaaaacctgttgtaccaacttcaccacatctgcccccacaatatgtcaaatattttgataaaatcctagacttatcccgtcaggtaggggtgtacgttggtcagtttggtcggtttatggtacattttattcaacccaatgtaaagatcgggttataaaaatctaagtgcaacacgttcaattaagaaaacaataaaatagtgactcgcccaataaaattggtcgggttaacccgtccaaaccgaccactaatattttttttttaatttttgttatttttacattcaattgttatattttagttaattgtaataatgagacaaatatatatagattgaatttaaaatttaaattaaccacaataaaataatatattagttttaactttatattttttaaatagtcatataaattatatatataaatatatataataaaaaattataaatatatataaaaaa

SEQ ID NO: 34846 - DNA, 2695 bp, Cannabis sativa
ttgacaaattacctttctgaacatgggagaattgtcctttgagctgcaagagacgcgcacaagattggctagcaaacttctattcaagggccctccaaactgcagacgaagtgtgatgattggccacagaagcaagaacagcttcagacatggaggaccttagccaagagagaaggagcttatctctctttttccattgaagatagagaggattggtgtcacccgtaaccaaattctgtgtgggagggacgccgacaaacaagatgtcatcgagttcatggccaataaccgtaggaacaacttgagatttccacaacagaaaatttttccgatcaagtttgatggtgagagataaagacaacgaactggaaaatggattccagattgggggagtggaagcaggggtttgaactgtgtttcttggatttgcaccggcggagaccgcaggactggaaggattggaagactccataggaggagactgataccatgtagaagcttaacaatcttcaatgaaggtaaataccagatggtatgaccatgaaagacaaacagagagaacagagagaaaatagaatgaagacaggaaaagcttcacgtcttttagtgagcttaaggttttatttatatgtgtaattatacaagaatcagttacaatcaagaatcaagagtcagttaaaacagttacaagtgctaaaacaaaaactaacaggtaaaactaactcatttgtcattatcacttgctcaaaccatcatatattgtctctacaaccaacatgaaaagattatacatgattgttggttgtcccgtcacattttttaccctcaaacacttaccaaaaatcatatttttttagtaccaccaaaatttgactacatgccaaaaaattattgcaagacgtaataattactttgtgttttaagtagcaagtcggagcttcaccccagtgcttttattgaaactacgattcttatgttgtgttatacgtattccactttggatgtttgcccaaaactctttatatatatatatattttaaaatattaaaaagagataatgcccaaattagaaataattaaactcattttataatgagtctataaataggtagtgtccccaagaaataatagggttcttgtattatctccgtccccatcacaaaaaatacataataaacaaatattgtattcttaaaagatcataaccttatgtgaaatctccatcaatggtttcacgttagtgcttccgctcatcttatattcatctttctctcctttaatttagcaaaagttctataatgagtctataaatagggagtgctccccaagaaacactaagattcatgtattctctccttccccaccacagaaaatacataagcaaaatattgtattcttagaagatcatgaccttatgtgaaatctccatcaatggcttcatgttagtgcttcctctcatgttgtattcattttttttttctttaatttagcaaaggttctataatgagtctatagataggcagtggtctccaacaaatactagagttcttgtattctctcattccccatcataaaaaattcataaaaaattattaagatcgttactgtgaaatctccatcaatagttttaggttagtgtttccgctcatcttgtattcatctttttcttctttaattatgtaaaggttctataaatataaaatttagggtttttaatattaaagtacttttagaaatatgattacaatgattatatgtattttttgagtgtataaattctaacaaatgatactagagataggtttgctaaattgaatgaagatttaataatttgtttatgaattttggagcttttaaaaattaaagttttttgacatattggccaaagaagaaagaattggccatcgagtaaggtcgtatccggactcggattttctgaattgtgtgcacacttgcaaacttgaagatgtaaaggctagtgggaatgcaaccagggacagatagaatattctccaagattgatataataatggccaatcaagcttggattagcagatatgagtttgctgaagtagtttttttgaacgagggattatttgatcattcccatgccattgtatcattgcatcctgcagtggtagggggaaataagcctttcaaatattttcggatgtggaaatcctaccccaaatatgatgatcaacttaaagaagtgtggaactcgacttgtatggacaataagatgtttcaggtggtctctaaaatgacacaattcaaggctagacttcggctactgaacaaagaggggtactgtaatttattgcagcaggttgaaaagtcaaaagctggtttggaggctgtccagaaccaaattaaacttcaacctctggatcatttactcagaaatttgagaaagactagtgaaggttcaaaaggattacaattccttcttgtcgcaaaaggccaagattgattggattcatcatggggatgcgaatactgccttctttcatgcttgcatcaagcagagattaaggcataatcgtattctctccattgaaaattaggagggtaccagaattactgactcgaagttaatatccgaggcttttctggatttttataaaaacttactgggttctacactgggcacaagttgcatgttgagcaaaattttcttgctacaggttccatg

SEQ ID NO: 34847 - DNA, 2144 bp, Cannabis sativa
  modified_base (880)..(900): a, c, t, g, unknown or other
attgcgtagcctaaacttgttgaaaaggttgcatccctttgtattctgcaatatcataaaaaacatcataagcgttcattttaattttatttgaaattaaaaacatacattagacattgacgtttctacctcattttcttcttcttcgttggagtttggacataagtccaagtgttgaatatgagaaatcttatcccaatcttcacctgtattccttttgcatctcttcaataacatgaaaaatgaaattgctataatttttttaaatgaaacttattaatcaaaataacaatgataatataactttgtgaatcaaaagactatttgttgctatgctaaaacactttttttaataaagaaaactatgttataaatatcataatttaatagcaattcctctaattaataatgtgttgagtaattccatggtctgatgttttgagctgtattctaattaccttacattttataatattcaaagtttatcttattattatagctgttgtctattttatttttttttattttaaattaatctataccatgcagtctaccaaattaaattaacatataattagtattattttacagtaattaagaaggtataatcaagttttgttttacactgttatctataaaacaaaacaaactcataataaatcatgtttaacaacatttagttagagatcgactaaaaaaaggcaaataacaacaaataagtggagtaagaatatttttcagaaatacaaaggtagcatacctgaacgtaaagcatgttttctgatttgtgaaacaattctaacccaacattctcaacagcgatcacataggcataggtgtgctaggccagtgtgggctcaaaataaaaaaataaaaaaannnnnnnnnnnnnnnnnnnnngtaaaatttaagtgtattataagtaacaaatatgacttcggaagataactcacttttagcctttatgaaactgcaaattaaatattaatttaagttagacaataaaccactcttactatccgaaattttccatttttaacatctagcattgctttcaatgtgtcaagtagagagtatgcaaccaattaaaagtagtaaaaatctttccattataataaaattgctagatgaacaaggtgaagtcttccactatcgcacatgaatcttcaatattcattaatcactcttactgtagtagtatatactcaaactaacactctgaaaagattaaagcctagtaatttgatgaagaaaaagaaaaaaaaaaataagactttaacttaagttgcaggttgcagctgttattggtttttaaaaaaagattaactaggtaatagaaatcgctctaacatactgaaagtttccattttaacaaagaacactcatttagataccaattgcaaagtactaaacaacatcctattttaacaaaccccaattccagtcattggacaagaatatagagcaagccactgaatattcaacatttaaaactaatcttactataaagaccaaaaaggataaacactttaacaaagataaattaaattatgaagaattaatgatgatgtgttataataaatttactctcattaaggtggtaaattagttggttatgttaactatatatatatatatgcttatatatacatatatatgaagtagaataaaagacaaggttaataaagaagctttattttactactttctgaatactaaaaaaaacgtacaaagacttgccctttatatagagctattaaccaatagttaatcctagaaataggatcacaacaaaccactaactacacatttcacattacaaaccactactacactaacacattagaataggacaattcctataaattaggacaactattactctagccagcctatgcataacatattaattcctatatttatattttctaacattccctctcttaaactacgtgtttacaaacacttagtttattcccctctcttaagcttgatcatccaaggcacacataccaagcatcttccttagtttttgaaatgtaggcaatttgagagactttgtgaatatatcagcaacttgctcttcacttctgcaataaatgagatcaataatgccttctacagcacgttcccttaaataatgg

SEQ ID NO: 34848 - DNA, 1317 bp, Cannabis sativa
  modified_base (1262)..(1267): a, c, t, g, unknown or other
aatccaatccgcgcaagtgtagatatccgcattttacggattggaacgtgcggattggattggatcggatacttagtgaacacccctaccatgcatgtttgctatcggcatgtagataatttgtaacttttttttttgttttttttttctgttaaaaaaatatataatagtatagtagttatggaggaagccagcatatcaatgaactagaatgcaaaaaaaaaaaaatatatattagggggctaaaaatagatttattaaaaaaaaaaaggtgaaaatagaaaagatatatctattatttttagaaaaaaagaagaaggagaagaaattaggccacagtgtagccccataggttatataaataggatagttacataaaatattgttttttttttaaaaaaaaaaaattttatttttatcttttaatttttttttacatttatacaatttttttataaaaacaacacaaaagtaagaagaaaattatataaacgtaataacaagaaaataacatccaaacaacaacaaaatataacatacaaatatataacaaaaaatcaacaacaaattaacaagaatataacataaaatgaccgtatttttagtaaataaaaaaaacataaaaatgtttaaaattctgtacaactgtatttttgttatttttttttgtttgtttttctttttttttgtatttgtgaaatatttttgcattacgattttttttacttagttatgacaagttgatttatcttttggtattactacattatttttctaattataaaatttattgttacaatttcatacttttaactttttttttctctttgtctttttgtgttagtggtacttaaaatgataatttattttttaaaattaagtaaataattatattaataatagaatgatttaaaaatggaatatataatataatgaataatatataattaatatatcaatatctacaggttttgttaattataaaaaataaaaactcttattatgtattttaaatgtgaaaaaaataaactaaatatatgtatctaaactgtaaataaatacacatgcataaaaaagaatatcaccaaaaatttaaaaatatataccattttcttaccttcactttctacacttttttttccatagtgccatacattttaagctaattagtaatttttcctctcgaatttttatatgtactaaatcgtgcttccgaaacttttttgtctgttaaaaattcccccgaactattgagattgttnnnnnnaaggacttttgtctaattttaataaaaaatttctaacatggatgaaagtt

SEQ ID NO: 34849 - DNA, 2053 bp, Cannabis sativa
  modified_base (1841)..(1844): a, c, t, g, unknown or other
catccacgtacacctttcatgtttcgtcctaatctggtgtttaaacatcttgtttaccaatcttatagcaatacagacccatatccgttctgaaacttgtatgttcttcatctggtgtgcattttgatttgattataccccgaatatgcatccataaagcttaatattttgtgccctgttgttgcgtccacaggctgatctattcttggaagtggaaaacagtctttggggcatgccttgttaaggtcagtgaaatcaatacaaactcgccatttccctttcggcttgagtaccagtacgggattagcaaccccaaccgagtagaaagcttcaattatgaaattattgttacgtaacttctctatctcttctttcagagctaggactcgctccttgttcaacagtcttcgtttttgttgaacatgccaaaaatttggatcaatatttaggacatgtgaaattatagaaggatcaattccgatcatatcctcatgcgacaaggaaaaaatttctaggttcgctctcaaaaattttatcaatgttgattttacttccagcaacaaaccttttccaatcttaagctttctgggtagaatatttgggtcgattcaatcttttctagttcttccactggcccaacattgttgtttgggtcccaaagtcgaggatcaatatcttcatccccgcctttggcggttccctatttggcaatattttttcccttgtccaaactctggctagaggatacttcctttttagtcttggttagggcaaggttgtaacattcccgagcaacttgctaattttctctcaggcaccccaccccattctttgttgggaaattaaatcatgaatggaatatcgacataacagccttcaagtcatatagggcttggcagcctaacatgacatttaatgttgatgggtaggcgaatttgccctagtggtgcaacactctggctggagaaaccgtacacgggctagagacagggagttaagtctttgagttggagccccatcttttcatatggtgtcttgaataagatgttcacagaggctccattatctatcatggttcgggccaccatcttgtcggctatctagacttctacgaccaacgggtcattgtgcgggaaactaatcttgacagcatcttcatcactaaatgttatggttggctcccatgcccgtggtatttttagtttcctttctttgacggccagaactacttcttcttgctcatgttgtactgttcgggcatacctttcccgggcttagcctgaatctctagctatgtgcggacctccaataatgagttgcagatgtccatccactggtggtggtcgtaaatcttggtttttatcgcccctttgattttgattgaccttgacaaatttttgcacatgcggattattttttttattagaaattcaatttcccgcttcagattgttgcattcattggtgtcatggccataatcttcatgaaaacggcaaaacatggtcatgtctctcttgcttacatcttttttcatgggtgcgggcgtaaacttggtgggattctccctaggagcttgttcagttttgccaacaaactttccctctttcccatttccttgcctattgttgttgttggaccatttaccacccgagcttgaatggcttgggtactgggggagatggacgcatgtcccagcagaaggaaatttttgcttgcttggtttttgcaaaacctctgctcgttaaatggcttcttcaagcttaataaaaccatccgcatgatcaaggatgtcactcatagaatctattggtccattcttcctgatgtccttccaaagttcnnnnagaacttcaatgccccccagtatcgcagacaactttctgtcttcgatcacccgtgcaaccttaattgcctccgtcatgaatctggtgatgtaagctcggagaggttctcctggtctttgcttcacttcgaccaggttttctaagtgcaacggaagttggcaagaataggagaattgtgcatggaattctgaggagaaagccttccatga

SEQ ID NO: 34850 - DNA, 1127 bp, Cannabis sativa
tgtacttttggcacttatagatagtgtttttattgtgctatatttgacacaaaaaataattttgtgatagatttacatcaaataacaaaaatcctaaattttaggcaaaagtttacaaattttttacaaaaatactatctttttataagataatgtaaaataacaaaacagaacaattaaaaataacagtagaataactaaaaaataactgtagaacaatagtggaaacttaatacaatagatagtatttttttaaaaaaataatacagtatttttgaaaaaagttcgccccacagtaaaaaaaaagttagaaattttaatatatggtgtaaaacctcattctaatatatgcaccattgtcccctttatatttttacttaaaaaaattgtaattgactaatacaagaaaaaatgtgttagatgggaccaattgggcaactattttggttgtcccctattggagatgctctaaggcgtcaagtaccacgttacatattaatattggtgcatttaatatcgaatctcacatattttaatttaataaataaataatatgagaaactgctaactaattatagaacgcgttaaataccttaaataaccatgatgtttttgaaaaaaaaatatattattgggattaaatttgtggcactatttaaattaaggctatttaggatttttactccttaaattttaacatgtactaaattatgctccctaaatttttctgaccatttaaaattccttctcaactattgagactgttttaaagacgtttgtccaattttattctattttactaatttagtgattgtccatataataaattattgctcctcaaactttgaaatctattaaattatatctctcaaattttaatatgtactaaatcatgtctctaaattttgattattgttagattttttttattaaaattgaacaaaaatccttaaatccaacaatcttaataattcagagagaacttttaacggcctttaaagttttaaaagcataatttagtatatgttaaaattcgagaataaaaaatctaattagccttaaattaattaggtttccaaataaaagtaattaatattttaaaacaataaacctaattaattaataag

SEQ ID NO: 34851 - DNA, 1285 bp, Cannabis sativa
gagattttataaagtgggtaaaaattttaattagcttaaattttaaatggggttgtaactcaacccaatctaacccaacccgaacctataaaataattagtaaggttataatgtaaaaatgttttggatgggttatatgggacatgattttgtcttgtgattgtacttttacggaatgtattccgtgatgtacgataaccgttagatgagggagttattttatttgagggctgaaattgatctaggggtaattagggttaaaaaatagtaacataccctgacactcatctaatgtaccttgagacccatctaatgtaccacggaatacattctgtaaaagtacatcacaaagacaaaatcgcgtccctacaattttctaaaccaatgcaattggaatgactcataaatatatatacccccaagtcagtggcggaactagcacttactagaagggggggccgatgtacatattagttttaacaaaaaaaaaatactattttctgtcaaaaataaaatacattgccacaacaataataatatttttttaaaaaagaaaatcatgcgattcttaaataattgctaaagaaattttatttgcactctaaaatcttataaagcatcccattttatttatttttattttatataaaatatatgatgtgatcaatgcatgatcaaaccacctcgcaaataacacaacacaaagatttgatcaagaacagaattaaacaatggcaaattgaacaaatcaactatgacagaaaacagtaaaaccagtaatgcataaaccagtagtgaaactaaggtataacagaaataggcaaattatcaatgacagaaaaataagagaagagagatcaaacaccatcaattacgaggttcgaacaagtgatctgttaatcacttgcctactcctcgaccagaacagccccagtggctttgaatctttattaatgctagattgagagagaattacaagttgttttacaaagtgttcatgaaacacatacactcgtgaagcaaagcttcaattacaactcatctcaccataactctctcactgttttacagtctaaactagctctcaaagatctttctctcaaccctgtcccaaaagattgtaactaatggctatatatagcctttggcctagagtcttgatcctaactgtcataactgacagttaggtgagttagttagagttagttgctaacttcttagccaaaaatatagacctctattagtgaccaaactcaacaatatatatatcaataatctgtactag

SEQ ID NO: 34852 - DNA, 1120 bp, Cannabis sativa
acatacagttgtgttggtgtgtggcaaaacgaccgcgttgagatcatagccaacgatcaaggtaaccggacaacaccttcttatgttgcttttactgatacagggcagttaatcggtgatgcggcgaagaaccaagttgctatgaaccctcaaaacacagtctttgatgcgaagaggttgattgggcaaagattctctgatgcttcggttcaggccgacatgaggcattggcctttgaaggtcattcctggccctggagacaagccaatgattgtcagttaactataaaggcgaagagaagcaattcgcagctgaggagatttcttcaatagtgttggtgaagatgaaggaaattgctgaagcttttttgggtcagactattaagaatgctgtcgttactgttccggcttatttcaaaaggtcacaccatcatagtcaaaaaggtttccttggttgttctcaggttggtaagggattgatattccaaggaatacaatttctgataactggactttgaacccagaatgctaaggatgttaaacggcaaatacagaaacacggtggtattattctaactgatattccttctcctccaaattcaaggagaaaacgatggtcaagaagtaattggtaccagcttcctattatcatatcctcagaaaaggtgaatattaaatgtatatatatttcaattttctactttttctctttggaatggtggatttgacaaaattgcttttgtgtttagacttaggtcaacaaaccatctttacaatttgttacttctacttctcataaatcaaaaacttgaaaagtcatttttattctacttacgaggtggtgactataatgtaaaatattatatcttataattacaacatctttatactttggtacgtttgaattaccttcgaatacttgtttcttaataaattcttttattcctctcagcaccaaactatcaagttcttgtatggatgtgtagcaaatgctttaatattgacagtcgattgggttactgattcgattggagcaagttttattgtagcacctgaaaagtaagttgtacttcttgttcgaatataatttttcgctttgttcatggggttgtatcttgttc

SEQ ID NO: 34853 - DNA, 3065 bp, Cannabis sativa
  modified_base (55)..(55): a, c, t, g, unknown or other
  modified_base (95)..(96): a, c, t, g, unknown or other
tggtctgtagggtcaatcatcagtccatgaaacagccagagtgacgtactcgtgnataagagccatcattctgtgggtgtaagggcccaatgganncttgaagcgaggacgttacatattgtattattggttgtctcataacaagctatgaattatgttgccatgataggatgagctatgaatgtatggttagcacttttgcatgatataactcctccaaacaacaagtagacatagccagaagtggatctcttaatttcttggcaacccactgttgtcagaatacctaatgatctccaaattttctgacctccgataagtaagcatataatcatttgttctttataattatttcatgacccattttgttgccttctaatgatccataccgggatcacttaagtattttcccaacatagtcactatgtactccaaaactagatgcacgcatacttgagcatacatacgacttctaatagcgaaagcataaggaaccttctttcatctttactctttgaatttcattcttggggcaatagttgagactaaacttgtctcctttttgcaataagatttacattaattcactcccactgaacttgtgatgtacacaatcgtcaataatattgactttaaatctgtatgagataatgatttgatgagaagcttgtttgagaccagagatggatcttgagtttgcaaccatagacattggataacttgacataaaatattatggttgcatcatatatatcatttcctcaatgtcgtcaatgagaaaaaactgtcttaacatccatctagtgtaactctaattcaagatgagctaaaagtgacataattattctaaaagagtctttcgatgacactggagaatgccttccttttgtataaaagccttggcgaattgacaagatcctaaatgccattgtctctcatggatttcatatcatcattcatggaatcaatcaactgttgataattaacactttgtttgacttgttagtagttgattggatcatcttccatcgtccttatgtcaaactcatgctctttaagaaacataataaaataatttgaaattatacttcttttctctctagtggatcgcctatgtgtcacttcctcttgatgttgttgagtttgctcttttggagtagccttttgatattgagtagggaattccataggtgaattctcattgttgtcttcaaatatgtcttaacaatgtcaataggttgatcattgtcaagaacaatatttcgtagaaaaatttatttctcttaaaaaaaacaacattccttactttatcttcctcctcaaacagaacatcctcgagaagtctcgcatttcctgtctcgaaaaaggacttggttgagggatctcaaaactttaaaccccttgacctttctagatacccaacaaaatagtagttaattattctttagtctagtttgttttcatgtggcctaaaattgccttacctcaattggacaaccctaaaatatgtaagtgtttaatactagactttttccatgtccatagttcttctaggggtttattatctaccaatttgctagttactctatttaaaatatagactgcagtcttaagtgccaattccaaagtgattcaggtaaagaaaaatgattaatcatgcttcttaccatgtccttaagcattctattttatctcccagcatcaccattcattcaaggttgccttggcattatgtattgcaagacaattctgcatttctctaggaatatggcaaaaggtcatggaggttgtttacttgatttgtcatatctacaatagtgtttacctctacaggtaaacttgacaactttaatcttctcacctagttaatttttaactttggccttgaaggccttaataaacgtccaaggattgtgactttttatgtatcaagtataagtacccacaacgagaatagtcatctataaaagtgataaaatactatttttcattccaaaaaattgtaggcaatggaccacatatatcagtatgtatcaattttaagacactagaattcctgttggcacttaatttcttaatgtttatctgttttcctttgatatattcgatataaacatcaatgtcaatgtaatcaaggggtgcaagtattctatctaaacacaaatctccttattctacttttgaagatttgtcctacgcatttgtgccataagatgatagaattctcatttgataatttttgttttgtacctcttaatgttatttatatggtttcataattataagaatcaattgtatttagcatatataggttgtcaattaaagaaccagtcacaactaagtaaaattaagaaatagactaaatttattatttccaaatgaacaagactaaccatagttgtctaaaatagaaataaaaaaaaaatcaaatttcatctaattgacggtactacataagtctcgtttaattcaataaaataaccagtcttataatataatctaaatgtgacaattgcttcaactgaaaatgctttgcccttgcccacaaggataaatctttcagcatcatttgaagatcgactccaaatgtaaccctacataaaaatatatacttatgtgagtagtagcaccagaatctacttaccaagttctttgtcactaaatatagtattttgatacaagttatcactaatttagtattagtcacaacaagtattgtgactaaaaccacatttagtcacaacaaattgtgatttttgtgacaaacttttagccacagactttttaatcacaacgtaagaatcacaatttataattactcacaatttaacaagtattgtgactaaaatcacatttagtcacaacaaattgtgatttttgtaactaaaacttttagctacagactttttagtcacaacgtaagaatcacaatttataattactcacaacttttttatttttattcacaagttttgttgtgactaaaagtaaatttttttgtaatgatgcatagctatttataaatagggtaatttctactataaaaggctatgatattttgttct

SEQ ID NO: 34854 - DNA, 1160 bp, Cannabis sativa
ttcatctttccagcttatttcattattcttgacatggaggaagatgaaaatatcccaattatactagggtggccattcttagccacagggagagcattgatcgatgtacaaaagggagaattgaagttgggagtgcaaaacaaagaggtaacatttaatgtttttgcagcaacaaatatgttatctcaattttttcccacatgacatggcatgtccacgtgtgcaagatcaatgctacgtggagtacatcttgtcaaaaagacggccaagtcatctactcaacacttcaactgacaggaggtcagtatacttaggagggacataaaaatgacaagccagccaccctaagtggtcggctttacgaccagcataggccggccgacctctagacattgtagggccagccagcctacacctggcaggcatttggtgtgcaaccttcatcttcagacgacaagctcaattgtgatttgggctttaagaacccacgaaaataggggagaaatatcagctacttccatattcttaagaaataattaacacatttaatacttattatttaattatgtaaataactcatcatttacctatttttaagggatattagttgttaatcttcatgtaagatctactatataaagagcactagcctaaccctaattccctatgttctaagtctctaagttggcaagctctaagtctgaaactcaaactttctcttctcttctctctcacactccctaggcactctctctcacttgagatttgctaacttgattctcacttgtaatcttacgagagccatttcgaatgccatagcccttgtgatcatagcggtattctctttggtattaatacaacaaaaagggggttaggtcattacctgctaactaaacgggtcaaacctctataaaaccttgtgtctcttttactcttttgttcttattgtgtaacacatggcaaacattagtaagaaatacgactctattctcgattggccgaatttgagttcaatagtttggtgcttttattgagagcaagttgttaatttatctgatcctagaccatggttaacacaaggagaactctagctacaactcctgcctcattcgatcttcctcaagacattatggcggctgatcctaatgtctgtgttcaag

SEQ ID NO: 34855 - DNA, 2745 bp, Cannabis sativa
  modified_base (1984)..(2000): a, c, t, g, unknown or other
ggactgtataaatgtttaatgggccggcccatagtatttttgtaatttttttttctttttttgtatttttctattttttcccatatattttttggtgtttaacctttaaaggaggagtttgccacaagattgcggaggtgttataaaaagcaataagagaagataattagtatttcgatggcaaaaatctaagaaagcccattatatgtgatacccatcaaatgaggcattttgtgttattattgtttttgtttttttcttttaatagacaggtgttattgttatttgcaagatagattttatctttttctaaatgaaaaaacaattatagtttgcgtgttgaagaattacaagttagagactttaactatcttagtcaacattttcgtctgtttttgtggttggagtaatatgttgcaactccaatccaatctcccaaaactaaaaaaatataaaggaaagacacgcccagtgggactcgaacccacaatcgcctgattagaagtcagacgccttatccattaggccatgggcgctcatgtttaatcgtaaatgtaattatttacaaattagaaaagctgagtttaatttctttccttatatataatcacacctaatattttcatatcctattttcttctctcatattactcattaatttacgaataaatagtatttatctccccaaattttaatttttttagagaaaaaacttttagagttaatatctcttttaatcataaaaaatgttgttaatatctcttttagttacattttgcttatttatttgaacaatttattatgtagtactaatgtagataatctaactcaagttattaagagttcatacaaaatataaatatattaataaaaatgtaataataaattatgaaaatatgtatatatatatatttagagttaatgtttatgtgtttaatatcaataaattaaattttgaataacttaaaattgttaaatagacttgcctaatgaactatacaacatagaacaaattattttaaaaaacgagtaaaaatgtaattctatactttagaagctttcgcaataaaataataataagatgatgcatagttcaaagaattatttattcttaatttaatattgtattagctatacttttgttcacctcaaattattcttttgataacacaaatgcccattagaatctaaattatattatatttgttgacaacttttatagggtgggtggctatatttttgtgattccttgactaattaaaaacattatttgaattgataatacttaatcaatggacaatgacaatttactattattggtgatacttcataatcttgcctgtataagttatttcttaaaaaaaaaaatgaagattatgaaaaatagttttacggctgtttttttatattattattattattattattattaaaacttcttttttggtaaacaaatgagttcgatcttataacttgttataataaagaaaaacaaggtcaagcactcctcgtttcttctttctttgttacaatgtttttttgtttatttttttataatgataatgttaaattatagtttttaatttcaattttgttttattaacgtgatattcctttagccgaccaacttttaatcattgacgaatttgtaaactaaaagtattttgcttccacagaaaacttattaatctcttcttcttttctttttttgaatggagcaggaaacctattttcggaggttaccttttgaactattaaacaagtattttaaataaactattaaacgtgatatttaaataaaataatatataatttataatactattctgtaattaattataataatacaaaccttacaaaaaaaaattataataacatataatttttcatcaaaaaaattgttgaaaatcctaacaaataaaaaaatatatcattaattttgttactcttgatatagtcattaaatattatatatatatatatnnnnnnnnnnnnnnnnntaagcgtttatatattacacaatgcattggaactcgaacccaggacctccaacacacacgcaccctcctatgaccacttgagctaacctgaagtggttaataaaattcaaatttaatagtttagtaataacatgcacacagcaaaacatttagcaaaatttaaaaaaacattattattactcatatagaactaaaaacaactccttgtactaataaataacttaatattaattatatttattagtgtatgcctttcaaatatattattctcaactgaaatttgttttgttttgatttaaataaaagctgtagaggtgcgaatgaatagtactccacgcaatagatctcatatggataatatcttccaatcaagtgggactattttttcttcttcttcagaaaataatagagataataataaataaataaaaaataataatggtgatgcgtgttcagattgggaatgatcgaactaaactaaaactatataaaacgttatcaataaaaactaaaataaattaaaattacgaagttaattactatgagtatgggacactcttctgtttttttcttattttttattatgaggtccactgaagttaggatgagtttgtttacatgtgattattatatggtgaaatgaataaagacaaatgtaattgtgtgttgaagataataacagaacgtgtgttatcagcaaccaagagttccaaccacactggaacaacattcataaatatgataa

SEQ ID NO: 34856 - DNA, 1125 bp, Cannabis sativa
ttaacaactaaccactatgaagcttagttgcactttgtgagtgtaacccattatttcatatttcatgacttaacttagtaacgctgtcttataaggtcaatgtcgcactaaaatacatcattttctcttatcttagtcaagagatcaagcttgaacaatagtatagacaaataccttctttagggctacgaaaagaaaaccgtctcaaggacagcctatactttttcggtgttgaccaataatggaggttgaaggttacattgacatgaactctttttcccactcactattttaggttaatatatttatttaatacatattaactactttaataattatgattaatttatttataataaaatcctcaaattataaataaatttcctgtgacaattattaaatttgaattaattctttaattcataatttaaatttgttttaaattaataggttaattttaaattactaagttaattataaattattcttagtcagttttttatgctctcagtttcaaaaacggtaaataaataatcacataggataatcttaatatatcatgtttctatactatgagatgcatgataatataactgtgtagaatttctatatatgacatgttatacactaatgcatgagcatgttattaatcaactattaatgaatatttatttaaaaataataaataaacaatgatgatgaacgggtaaaatatttgatctttctaattttacaatctttgaaaaaattagaaatttaaattacaaaactaatctccatcactgcaggggcaattttgtaattttgtaagattttcctaagcttgaaaattaattaaaatatttttaattaattatacttaaataaaattttatttaaaacatctttttaaaccctttaaattaattaaaatatttaattaatttatttttaaataaaccctttatttaagataactttattatcatattagttttgtcttaaaataataacgtttattatttaattgggatcaaaacaacttttgtgttaatataaatatagcttttgagcttgaattttaaatttataaccaacttatatttatttaattcaaaattcaatttgaaaaaataaatatcccac

SEQ ID NO: 34857 - DNA, 2095 bp, Cannabis sativa
tattttgaagttgcatgttcgcaagttttttttttaaaaaaaaaacatattatatgtacatattagtaaaatacttataaattgtattttaatactcgagatcccaatccatatagttataaagatataatatgttaaaattatctttcgagtttagtaaatatttaaatacaggcgttacatatacatttataaatagtggcatagcccataagaaaaaggagagattcggatagtgaattattattattcaaattctctaattgtactctgtattcagaaaagattcctaataagaaggacttgtggagtatgtagattttaactacaaaatcacgtaaaagtatctagagttataatttcttttattacttattaattttggaagaatatttattactaaaaggctatttattttcggttaacgaaaattggcattaacacatacaactctaaacagctaaacaaattgcgagacagggccaacatgaagatagggatattcccttaagatattagtcctgtattctagggatttagttattatttttgtaatttaaataatagataaaagatgttaatatctctattttgaagggagatctttacttatttgaattatgatattttgtaagtcctatactatataaagggcattagatcactctctcgagggctaagtcattccacaatcattaaaaggtctctacaagtgctctctcatgcgccatgaagtttctcacacgtgtgaagcctctcactctcaaaccttgtaaagttatactccatcaatgtatcctagacactaagtcaagatttttgataagttcttaacaagatctcatcagtttttatctgcacacaatgttcttacaattataataatgaagagagccatagctagaaattacaaggtctagacatgtaatctacatagtattatcttaagagtgaatacaactaaaaaaagagtaagtcattactcgttaaacaagggggccaaatacctctataagtctctttgtaacttttactatttgttactattatttacacgtggtgataatcaacaattattaaagctccaccgttagttggccaaattctgagtcaacaatatatatacactattatttatacacaatcatataatatacattacttcatctcatgattaatctgtactaattttataatattttaactgttgcactgtcgtggatgtaagggattaaagcctccatgttgctttggcttcgatatagcggtgtgggagttggtgtataccgaggatctcttcgcatttgatatcaacagtatcaacttctactgtggtggtacttgttgttttgttcctagaaatcctgataataaagcagcccactagctagatgtttcgattctactttgtatctctcacattgtttcggttgaatccttttaataaaatttctttttttcataatatattaatgagcattgctatgagccaccagtggtctctagcaccttctcgacatgtcgcgttgcgattagttagcgatattccctaaaagctattatattaaattatatggaacccgatacttagttggaccaataacgatattgacatgtaggaaggtgctaggtaccactggtgctctttagcatttctctatattaataaatctcatgtcagtacattaaattaagagattgactcttataatctttttttttttttattgaggaaaatattttatttttaaagggcaaaaatccgggttagaatattttgtgagatttatattaactattaagtcataataattgtatagtaggattttaataatttaataaatactatgattgaaatttatcaaaaaataaaaaatatgattcatgaaattatagctagcaaacatttaatggaagtgttttttaggtaccaagtttgatgtaagtttggaatacttagaattacataattaaagcaaaaatgtaagttttattagaaactaataacttttgatggaaatagtcctaacagttttttttttatcctattttggtctaattaactaaatacttatcataaaaagaaatactttga

SEQ ID NO: 34858 - DNA, 1508 bp, Cannabis sativa
aacaaatgcaatacaaagtcttattcagactcttaggcatacattaagcttctaaaatagaagcaaatgattgttcttaatttattctcattctaaattattttacagatgctgattttagttgaatttatcacacttaaagataaaagtaacatgagatttatttaatcagagatgatgtggctactctctaattaattaaaattatatatgttatttatattctttatctcaaaataataatttgagatatgcattatttcatcttatatatgaaacttttatcatcacttgcaagtatcatattgtctatatatgaaataaatattactcacactaaccttctggtatataattatttccataatgctcttttcaaacctaaagaaaaagataacataatgaaaataccaatttgtgagatgtttgttttaatttataggtagacttttaaagcttgcatatgttcaccactagagaaaaatttttagttatacatttttctctagtttactattttaaaattgatgaataatttgaaacgagcaccaaatatcaaagttactataatagaatcttttataaagacaagtgagaatgtaaatctcctttgttattgatttttagttcaaaatgaacttgttttatatctttatgtctccatgttgcctaataagtatttattagtgaaagacctatgctaaattaatgttctctaccctattagacaactttactaaagataaacttcattgctctttaagaatttatttattcattcatggcatattgtactacaattttaattctttgcatttcacagtttttatctgtatcacaaattaatattgtagttgaacttttattgtaaataatgtattcattagaaaccactaatccttttgttctaataaattatcttaacgatgaactaacaaactctcttaaagagcgaatagttcaacatgtgttttgtttagcaactgtaagtaattactaaataacataacttattagaattttatcaatgacttgtggattattaataattagtcgtggattattaatgattagtcatggattctcaataactattaaccttaagggttgttgtgaatcataattaatctaatacttggggtggaagtttgataaaacaaatgatcttttttagaaactagattcctacatcgatcgctcccactgatcaagtcaattcttaattccacaattctagtattgtgagatggataataaagtatgttaccattataccttataacatgtctaatgaaatgatcatttatggtatttgggcccagatctttcctttgacaattgtactctaactgtatacgagtatttctaaaatgtgtgcatatcataaagtcaggttccagccttatcacaattcaaaatacgtttaagaaacaactttggttagaacaccattcgatatgtacactcccattgaagaatatcaatcgacaaagatttagaaaagtttg

SEQ ID NO: 34859 - DNA, 2531 bp, Cannabis sativa
ttttcaaaaaccactgctccacccgaagagtaatcaccatctcatcagtagactttctagccttaacacaagtctagaaacctgatttggtgtagtctaagagcattaaaatactaccatcatcaactaacacataggtcctcttttttatcttaagatttacttgattttttttcagtgttcctttcttggattaatctgatacctactcaatacactcactcaacagcaagtgtctggtctaatgcattacaaagtgttcacgcttatttttgttaaccaataataagcctttttgtaataaatttaatatagaaataataaagaataaataaagtataaatagtataacaacaacaccagatatttttacgtagttttgcagtcaaatctgcatactccatgaatctatcatattcaagatattttctgagtattcaatacaatattcaattgattgcatttttatttttctctcaaaagattctccgtccctttttctctaggatctgcccctatttataggaatataggtttacagttatttatattgaaattcaaattataaccgtttaataaaatgtgggaatcgatcacgtttcatttaaatcacgtgttagataacaattgatagttgcatagccgcttattattcttatcctcagagatggtcattgctgatttggacaatcatatcttgcatatttccaagtttttatccttgtctattgtaatgtagaaaggacgctaagtgattatctaatgattcgcctcgtcaagtttcttataaatagcgaggtggacgtcttgctatatgtagtccgaggttgctccgggtaaccatatccattccttcgtataaatgaattatctccttggatttgtatactctgaggtagacatgtgtctcgtcaatacaggtattaatagttttccatccttatctcgcttacgactatataatcagcgagttatgaatatcttctattaatcctttatttaacgggttattctttccctttgcattaaatgatataattttactatatcaggtggttcatattccactgtacgacacgtgtcactctctgaagtatagccaaatttccggtataataatttcccttaaaaatttcttttttaataaaaaaagcttttaaataattacaagagtatttttctcttaacccaattcaaaaaattgcatgcctcgaattttggcagttcatgatttcgaggcacaccattagcattaattacccatctttaccaattctctcttcttcccatctgttagatctctattcttttaatctaatggtgatcactctcaaggtataaaacttaagagaaaccaccatttcaccatttttgcttttcaaaactctcaagcttttctgttgaaaaatcattattagctttccaaaccttttcataccctctttaccattaacttattttctacaaatttcttcaatttaatcttataccaagggagttttcagaatacaccaagtcattcatttcgaccccagttacagaattcttctttgtgcgaaaatccatctatgaatagtaattagtttattcctttttctgtatttctttttcctgatatggtagtcttattttgtaattacccgcatcattgttcactttgtttggtttgagtaatttcgattcaattttttggacaatttctagggttttaacagagaaaaacttagggttatcgtattcataagcttctggtttcaataaatttcatccatgtactggggttgttctttttgtaaaaatatcccaatctggttttgaaatgtacactccataattcttagaaatagaatgtcctatggaattggcccttccattcaaacccaaaatccataaacctcaatccaaacttgagataaatgatgcaaaaattagggaccatttaataaaaaccactaaggatgaagttcctagtcgctataggcattttctacaacagataactgagggtaaacgttgttatttgggagatgcaggctagcctgaacctttgtctttatcttctatacccctagctaaacctttgtttttacccaaagtcactgttgctttttcatcaagtgaccttgattttgaaatcatttccactagtggattatgttagaggtgtaaatcaaagaccccacaggaccccactgtgactttttaagccgagctcattaaatctaaagtaggggccaacagagattatgttggagttgtattaaaaacttgtggcattaggcggagacgagatgccgcattagatgtttttctccttgagaagtcagttgctttctaccagaacgagttattcgtgaggaatgtcgtgaggccagtactagtagctcgtcttggataggggcctggagcctcgagcacatcagggctggagtaattctccccctgagaaagtacttcaaagaattctgtaattatcttggaattgcccccttttagttgattccaagttcttacagaattctggctagcct

SEQ ID NO: 34860 - DNA, 2078 bp, Cannabis sativa
aaactaatataattacctaaataataattcttccatttatctcgtttagttaatttctaagaaaaccatcgttttacttctaaatagttatagaagctataaattttatatctatgatgaaagctcccactcaaatgcattaccgagtctccaagatgtaagtatgggctagtccgacgggtaacctaataatgaacaaatcagagatctcaaatactacaataggctaaagtttaaccatctgaggattgagattaattgatctaagatcaactaatagtaaaattgacttagaaaagatataacgataagtttctaatatattttctacggtcaatatgagtccagtttgatgtataactaatacattggatacaagtttactttgctaatgttcaggaaaagacattctacttatataagtataagcaaaccatatcacttattatcatgtcagtgtaaatccaatatactcgtaaatcaaagaacgaaatagtttgaaatatatgatcataattattttattaggtagacaacactataataataataataaaaaaagtataaatcgtaattgttttaatttattcaataatcaatgtccattactataaataaagaaaataatagaaatgccattttttttaatgatactaagtctagtatatatataacagcctgtttcctcaaaaagttaggtatatatacgccttcttgtgagtcactaaatgattattaacgacatttaaataaaacaatatataagcatgcaatgcagctaagacatgtgcttctactcctaacaaactatatactgtctaaaccactattaacacatagattttaaagagctttgaaggagtttcaaccaaagaaacccaagagagtggaaaattgataggttgagattttctattattagtgtgttgaacaacaaagcaaatctctatattaatagctttcaaggagaacaatatatttaattttgtcttttattgagaaaatctacataataattaatcaaacaaatgaattacgcacaaaatcacatccatcaccaattaattccggcaattattttaatatgaagaacacaaatctgtaaacgtacatcttactaataacaagtgaatcgtaataagatcatgattcaaattaataccattttataataatgtgaacactattttttccaacagttttttctcaattaatctgagatttgaattctttctgaatgcctctacatatatatatgagaattattgtagttttattttatatatgtatctcaattatatattataagcttaggtgaggatcatagttaatatatagcagtgggaatgggatgactaaagtatataaaaaaatcaattgagaaaaatattggagtccctcaagtactctcttctaccactcaacctcgatatactccacttagtttttttttttgttactcgagccactgattttcacattcaatagttgttgaaagaaaaataaaagttgggaaatgctgagtgggaactaaaaacaattccatgagattctttgttgatttttcatagggattctttgtatctgtcaacattctagatctttggtcttagaagtggatgagtttaaaaagtcaacacattgttaggggacaagccaaaattacatttttctttaatccaacaaaaaaatctggcaaaaattcacggatctattctttaaactatatgatatatcgagttcaaaaaaaacaaaaaaaaaaactatatgatatatccatggcgaagctacacatgaggcaattgttccctctgaaatttgtaccggttttaaattatttggagcttaagtctaaataatttttttgggccttcatatgaatactttacaggtcaatattctacattttttttttttaaaaaaatattattattaggatttaaaccacctaaaaagaatgtgaaaagccaaatttgtaaataccattgcataacaattactttaacatcattatgcattattttacattttattaaatgtaattctataatttctattaaaattttgaaatatccaca

SEQ ID NO: 34861 - DNA, 2277 bp, Cannabis sativa
attatattgaatagggcacaaaacccaacataaaataatacaattccattaccgttaattccggtaaactcaatatcaacttaccttcccaataccaccaataccacgaattattaccgctgtgatatttttggccaccaatcaggtccccacagttgccggacctcaaaatatttttattttataaatagcatgtgatactcacatatttcagtaaaatttttgtaattaataaattatgcttatttattcaattaacaaaattccctaattcccatagaattagcttagtaagatcataatctgactcattatagccttaacacacatattactccatattttataaaatatgctctaattaatcataattagattttcaggataatacagtttctcttgccttctcaagatgcacgctaacataaagagttcaacttccattcgatgtgtaaaagccttaaattggtaagtctttgctttgctgatgacttaattctttttgcaagggatatgtaccttcaatcgagtatattgcagctgctttttaggattgttggggtccaacagagagtgaagcttgctatcctagatttaatgtcgtttcaagaaggttatttcctattgaaatattgggtttgaagcttagacctatgaaatggaaattttttgattgtgaagtcattttgaagaagttgaggatgaaactccacaattgggctagcagacatttgtcatttcctgggcggtcccttcttcttatcaactttgttctgattggtataataagaaattattggatgagtatattcttgctgcctcaaaaagttaccgagaaaatagattgaatgtgtatgaacttcttatggggagagaaaggtaccacgagtaagttacattatgcgtcttgagaaactgtttgtaaaccgagaaagttcgggggctttggctttcgtgatggtactagatggaacaaggcatctcttgctaattatctttgggcaatatccttgaaacaaggtagcttatgtgtgaaatgagtcaactgtatttacttaagatgccaagatgtgtggtctcatgagcttaaattagatgtgagttggtattggagagaactcataaggcttagggaggtcttctctgcaggagatatccaagaagttgttagtagcaaataaattcaagatgaataaaattaaaatgtatgaaaaattcttaaataagaaaatcatgtattgtttgagagggttgttaggtgtaatcatgcatccccatcttctcaccggggacaatctcattaaaaggaatatacctactgagtcaactctttgcacattttgcgaactggacttggagagtcattcacatttatttttctcttgttcttattcatgacgagtcatgcaacttattgggagatggttggacagcaacctttggctgagtacttatgatgattgggttcaatggttgaatagtaggatcaaaaaaagtttagtggctgatgttttctatccaactatggctggagcaacctatagcatttagttgaaccgaaacttatgtgtgtttgaacataaatgtatagctccatattgtataaataacatagttaaggagagtatcaaagtaagggtatgtttttttcatgagaggaagttgtctaagagggacaaattgaatttaaagtttgtaaagaacatgtaattaatgaagattagattaaaaaaaaaaagagagaaaaaacctcaactattcactaaaccctgtgagggtttttaataactcaacttttcttctcctctcacgacctgaagtctctcttacttggttcttgagttctcaaatcttcttgccttacgcgaaaatggctacaaggttcctaatttcaagagtatcatcagccagaaacctcttccagcttattccctacaattcttccatggtttcccaatccctcacaaagctttgtcaatccttttcctctagtttttcgaaacttggtccctcatattccagacccatgacctcattgtccctcgaccaccgtgttcccgccactatcattaccggttttctcggttctggaaaggtttttctttcctccttctcattatttttcaactgactcctccttattttaatatcaatgttttgatatgacttataacttgcaatgcagacaactctactcaatcatattcttacgtcccagcatggtaagcgaattgctgtcattgaaaatgaggtatgagattttctgttaccctaact

SEQ ID NO: 34862 - DNA, 1908 bp, Cannabis sativa
tttaaagcttggaaggcattctcgcattcttcagtccattcaaatttattgttgccccttaggatgttgaagaaagggacacatttgtcgattgactgtgagatgaatccactcaaggcagcgatctgacctgtcaagctttggatgtcgttaaccttagatggggatttcatgtggatcaaggcctttatcttttatgggttagcctcgatgcccctagagttcactatgaacccaaggaattttccagagcttaccccgaaagaacactttagagggttgagcttcatttagtattgtcttaggatctcaaaacattcctttaagtctttaatggtccttaggccttcttagacttgactagcatgtcatcgacgtatacctccatgtttcttcctatttgttctttaaacattcggttgaccaacctttgataggtggctccagcatttttcaagccaaatgtcattactttgtagaaatataagccaacgtccgttcgaaagcttgtatgttcttgatcaggtgggtgcatgcttatctgattgtaccctgagtacacatccatgaaagttagaatttcatggtcgctgttgcatccaccaactgatcgattctaggtaggggaaaacaatcttttgggcatgccttgtttaagtccataaagtcaatgcataccctccatgtgccattcgactttggaactagtatggggttcaagacccagactgggtagtaggcctctttgatgaagttattgttccagagtttttctaccttttcctttagtgccttggctctctctttgtcgagtagccttcttttttgttgaactggcttgaagttttcgacgtcaatgtttaaagtgtgacttatcacggtggggcttattccttccatgtctttgtgtgaccaggcgaagacatcttgttttcccttaagaattggatcaattccgatcttatgtcctttgaaagctcttttccgatcttgactaatctggaaggttgtttttggggtctaaaatggtacttctcctccaattcttcaattggaccaacccatgtatcaatatccccaaaatggagatcaatgtcttattttgggcgagtcctcattgctgagaactacttgttgtagctttgagggatttggctactttctccctggttgtaatggataggttataacactctcgtgctaccatttgattgcccttcaggcagccaattccacctttggtaggaaattggacgaggaggtgaaagatggaagtgaccgctttcaggtcatacagggctgggcggccaattaaggcattgtagggtgatactatatccaataccacgaataatgccatgatagtgacactcttgggggctattcccactttcaatggtaacttaatgagcccagctggtgccataccactttctgtgaatctatagatgagacgttcacaggtttccaaatccttcgttcccaagcccatcctttccaatgaagacttgaagaggatattggctgacgacttgttattgatcattgttcttgctacagtcatattggcgatttttacctctaccaccaaggggtcattgtgtgagtactgaacgtatttggtgtcatcctcagagaacgtgattgactcatgttcataccaaggttatttgggagctcgctcctggaccgccaacacatcgtcacccggctcatgcctgaaagaccgagcgtatttctcccatgatttcctagagttcctggcaaggtgaggtcctccagttataacattcgaatggccagcaacggggggaggtaactgttgaccgagattttcggcaactattagaatataattatattaaagagctgtaagaaagtgagatgaagatttttacgtggttgggg

SEQ ID NO: 34863 - DNA, 1337 bp, Cannabis sativa
aatgtaagtattttttaatttttatttaactttaacacaatacactattacttaataggatgttctttattaattttataatattatcatatatatttaaaaataaaaattatatcgatattttatataaataaattttaactttactatatatttaaaaaaaattatgtagatattttatataaagaaattttaacttaaatttaaaatacttaaaatattgtagataattttaattttattggtttaactttgaattaatacaaaaaaaaaaaatatatgtatatatgtatataattaaaaaaataatttaaatgtaaaatataaatattttaatcatatttttaatttcattagtttatgtttgaattaaaataaaagacaatttgctcaattagacacacaacgatttacaatatctcacttaaatttgtttgtacatataaaatatgtatatatatgatcacatccaaaaagcacacaaatataaccgcaatggctaaaaaaattctcaaagatcaaatctcaaatttcatttcaaaaattaataaaaattacattacctaattaacaaaaattaagcatacatgtattgcacttaacatcacctaattaaacttaattaaaaagaaaactaattatatgtgcattgcatataacatcaacctagtatgtacatatgaaagaattagaaagattatgtggcaatttataagagtatttttttgcctattccttgctttctctattttttttaatgtatttaatatttttattaatttttatcatcactattttatgtaattaataattttaaatatctttaaataaaaattacaactaaaaacttttaagaaaataatttttatatgaagtactttttatatgaattttttttttagttttttaatatttgacaaattaaaaaatgcaaaaaaatgtgttttgcattcattaaaaaaattacaactagttgggcatgattaagttcttcaatcatttacatcaaaataaataaataatactaactttggtataaactgaagtgaaaaaatagtgatctatatataacctagatctatatcaccataatagtttctaaaccatgtgggactttataaaaataactctcatattctaaagatataaagaaaaatatattaaaaaaaatgtgaaaaaagacaaaacgtaaagaaaatttatatcatgttatctcaactttttttaggctctcctttatatattgttttaaatatatttaaataaatattataataaaaaacttttaagaaaatactttttatataaaatacttgacaaataataaaaaatgcaaa

SEQ ID NO: 34864 - DNA, 1625 bp, Cannabis sativa
tgcttcatttcaatattcatgttttttcgtatcccttattatgaaatgtgtgaccacctccagcctttcttttttgattaatggtactgttaaagggtcggttaaaccctctcgaggcctgagacagggggatcctctatcaccctatctctttcttctttatgctgaaggtttgtcatccctcattcgtgctcatcaatctgaaggtcttctaaagggtatagccatttttaggagggctccttctatttcccatctcttttttgttgatgacagtcttattttttgctctactaatagggattcttgtagctcccttaggagtatttttcagctctatatccaggcctctggtcaggctattaaatttgctaaatcctctgttttattttctcctaatacccctcaggataatagaaatcttttctacaccacttttgatcttgaagataggcctttcattagcaaatacttaggtttgccccaatgtcttactcgatcaaagtatcattcttctgcttttcttaaggacaaagttctttctgtgcttactaattggtctagtaaatggttttccaaggctggtaaagagatacttcttaaggttgttattcaggccattcctgcatatgcaatggcttgttttaggcttccagtcaaattatgtaaaggaattgaagctgcaagggctagattctggtggggatcttctggtaacaccaagaaaattcattggaaatcttggaaaaaagtttctcaatctaaatgtctaggagggttgggttttcgttctttaatacattttaatcaggctatgctagcaaaacaagcttggaaaatttttaaacaccctaactccttgttgtttcaagtgcttaaagctcaatattttctaaactcatctattttagaggttgtccctggtcataacccatcttttgcttggaggagtatcctttggggaagatatttgatggcttcgagtcttatttggaaggttggggatggggacaacattctaaccattgaggatcattggcttcccaataataaatatatttcttataaagatggtcacttgcctattttgcctaagctttttttttttaattttttatttctgactctgggtattgggatataggcaatctgagaaatcattttgatgagtctgttatacaggatattcttgaagtccctgttacttttaggagccacttgattaagttagttaggcttgttttaatctgttaattagtttgttaaatactggagctaattcggttgtaagttagttatgcaactaacatatcttgattattcagggctatataagactagccctcaattgtaaaattgagctgagaattcataatagaaataagctctatttttctctgctattttctttcttctcatatggtatcagacgtatttcggcctccagcttccatggccagaccttcgacccgttctcaggatggagctcctcctttgacggtcgacaatcacacagtcgagatcaattccgatcccgttcaagctccaaattattctgccattcctgttcgcaacccacagactcggactcaatctcaatcgacagatccccctccccaggacca

SEQ ID NO: 34865 - DNA, 3115 bp, Cannabis sativa
agaataagaccaggataatggttttaaggcctaagggaaagagaataatagcctgcaaatgggtctacaagcataaagaaggcataactaaggaggaacctacaaggtttaaggttaggttggtagcaaaggattttacacagaaataaggcataaattatacagaaatattctcaccagttgctaagtacaagactatcagaatcatgttatccatagcaaactagtttgatatggagattgatcaaatggatgttacgactgctttcttacatggagatcaagaggaagaaatctatatagagcagcctaaagggtttgaagttaaaggcaaagaaaaaatggtctttaagctgattaagtccctatatggactcaaacaggcccccaaacaatggaatagaaagtttgatgcttttgtgataaagcatggattcaaaaggagctatcatgagacttgtctatactacaaaggaagttttataatagatgtcatctacctacttttttatgtagatgacatgcttattataagccaggaaagatctaaggttgacatggtcaaaaatctactaaaaatataatttgaaattaaagatcttggtaatgctaccaagatccttggaatatctatcttaagagacagagataagggaaagttgatacttagataggaggattgcattgagaaaatcctagacaagtttctatgaaggatgccaagactgttaagcaacctataacaagccaatatactttatccaaagaacaattccctaaaacagaaaaagaagttgaagctatgaaagatgtaccctattcaaatgtaatagggtgcgtcatgtatcttatggtaagcacaagacctgatctaggttatgctatgagtgtgctctgtaaatacatggaaaatccaagaaaagttcactggtaggccatgacatgggttttcagatacttacttgggacaactaaagtagttctggtctataagagacagaatgtaggtactataatagaaggttgcagtgactcagactatgttggagacagagacagcagaagatctagattaacctattttttcttacttggagggaattgtgttagctgtaaagtccagctacaacctcttgtggcactctcaacaacagaagctgaatatgttgccacaacagaagctatcaaggaatctacttggctaaaagggctaatgactgaacttaagctacttaaaggggtacctatagtatattcatacagtcaaagctgcatatttctatgcaaaaatcctatgtttcacgatagaataaaacacataaagatcaaataccactttatacgagataaagtgacttaaggtgaagtaaaagtggaaaaggtgcctactgaagacaacccagcagacatgggtactataattgtgactcttaataagttcaaacattgtatgaacttattaagaatcgacgctggagactaagagtaggacctatcaagctaggaatctcagagataaataacactacatcaaaattggttataagaggaattcaggtggaaattgttgagtaaattccacttataaccaatccttatacattttatccacatcagcatacaacataaataacagaaaacaagattaaacgtaggtggctttgcctccacaagaccaaaaccagaagctagttacaactattttgtaactaacttccagcttgatcaacaacttgcgctatcctacatctcatctacatatcagaagaaaaatacaaaaacagaagagtgagagagaaagaaaaccctagtttgagacttcagctccaagatccagagagaaagggtccagacagagagtaaagctctcgtggtgaggagttttgaagagaaggaagtacatgcacaaagagaaaaaaaaaagtcagatcaagtagttgaaaagagaagaaaaataaaactgtaaaagtgaagcaatcgagtcttacttgatcaaaatcttgtgacaggaagctccacaagctgtaaatcgccattgttgatagtggatatcaagccaaatctctgagatgagcttgacagaaatttagccctaatttagggtgaactctgaaatgatttctggtgtttcctctccttttactcactttgttttgtttttcttttttttttcatttttctaatctttgtgtgtgtgggtaaagatcctagggttctaacataggattgagcaagttcttcttaagaacttgctctgctagggtttcgagtttctatgctaaagtgattgtgtttgttgtgttttatgaattaagttttctagatttttcttcaaaattctttttgctcttgggttaaacgacactattattgtggtcgtattgtacttgtgttgttatttttggtctaaaatcatttagataaaggaatgggcaagattgaccttagatactgataattagtgttttgttaaaatagtaaaattcctacaagtttaatatttcaacacccctttaaacttgatttgtgactccaataatacttcgtagtttgatgaatgtttctctcttgagtggctttgtaaaaatatctactgtttgatcttgagagacatattccactcttacttcttttcttccaatgcattctcttatgagttgatagcgggtgtcgatgtgtttgcttctttcgtgaaagactggattctttgctagtaaaattgttcatttgctatcaacacgaatctcagttggttcctcttgtggcatgttcaaatccttcagcaactttcttatccaaatagcatgacaaatgcatgaagttgcagcaacgtattcaacttcacaagtcgatagtgtaacgattggttactattttggcatacaagtaaatgttgtgtttcccatgaagaacacaaatccagtagtgctctttctatcatccaagtctccactccaatcgctatcactatatccaactatctcataattgttagaagatgaataaaataacccataattggtcgtacctttgatgtaccaaagtattctctttgcaaatttcaaatagttgttgttggagcttccataaagtgtctaacgatttcaacaacata

SEQ ID NO: 34866 - DNA, 1593 bp, Cannabis sativa
aatattattaaaacattaatatgataacactgattatttttttagtgtaattttttatgttgtggttgaagtagaaatagtttttgacattaaattttttttgaatggaaaatgcatccttattaaccattaaaattcgttaccaaagaaggtaataagtcgattggaacggattccatatcgaaagtacaaccaggaaaatataaaagatctagcacagttgtgagctactatatttgttgatcgtttaatgaacaattttttacattaaatttagtgatagtgtgacattaaatttagtgcactccttagagatgctctaaatctcttttcaaatcacgtgtcattagatttatttccttcgtccaaccactttttttctttcttttttgtctttctcactctttgttatctaaacactaaccatttattttagtttttttttatcattttattattatttattttaattacatatctctctctctctctctctctctctctctctttacagttttcatttttttctttttcttaaaaaaatataattagcatggtcggccatgatggtgtgcaaggtgggctactgcacagggcccaaaaaaataaagggcccaatatattttttctttaatgcccaatattttttttaataaacttttgaaggggctaacaatttgtcattagtcacttacattccaatttctaaaacccattttaaattctattaatgcttttaagctaaaaaataaaaatttattattgttatttattatttttttcaaacctttaatattcttttttttttatcatttttttttgttctattggaatcaataataatttttataaatagttgaagttttttttggtgttttataaaatatatgctggataatattatttgcaaattacattttttagggcccaaatttttaattgaaacagggcctccaaaatgtttaagacggccctgataattagtaagaagtattgccattaattttactagctatcgagtttgtaaagttgatcaagactatcattatcatcttttctttaattgttctttttctaaacaactcatgcatgttattcattcttatcttggtaatgttatttggttgtcatcttactcggattgacttgtgtggttgaatgattactgagatcgtagtcttcttcatagggtagttatagttgttcgtgtggctgcgattaatgattaccaagtatctttttcttcttctgatacagcttggcaggcatagaagagagtattttcatcatttttttttcttcgaaaaaattagcttcatgggatttctttaaatgacaaattttctaagtgtgaccaaattttttacaattttggcactgtgattttcctttaaaccgacaatatttttctaagtgactttttcttttacaaatgccacatgaaggatacttgtcattattttgtttttatttttcttgtgtctttttcccatcagcttttggtttttgagacagtggattgattttagactaaaaggcattttcagcttcatctttcttatgcctttcttgttaactttcatatgcctcaaa

SEQ ID NO: 34867 - DNA, 2682 bp, Cannabis sativa
agtcttttggagggattttagcatattttggtggaaaatagtggaagtcgcgagctcaattttacaaggcagagcttaattgaaaattttggtaaccttaaatgcagaactagacttggagctcaacatgaaagttttagatctcactcttagcttttcgcaacatcttgcatcattccattctaagcaatatcgagagagttatggtcaaaatactattagtcatcgcagcaggaaatttctaaaaaaaaaaacgataaaaagatagcgaaaaaaagatagattttcaagtagagttgcgatttttttatctttattttttcaaaaaagatgagttatcttttcttttagtgagatatttcctaatactgtaaatagaatcctaattctaaggggattcatctatcttttcaagcactataaataggacctcttaggctacgaatttaatcattctaaagctacaaattagagagagagcaaggaatagacaaagatcggcttcgaattgttcttcattctagttcttttcttctccttctacgtttactaaatatattatgattttggttataatgactagttctgagtagttttttttagttaagggttatttcaaaacccgatacatgaattcttaattttattattgaatattaatttctagtatccattatatcaaattgcttctattcttctttgtcagtgttatgattattgttttgatcttgtttagatggccactaaattaaattttactttaatctaccattatcttaggattactattcacctaatagtctaggattctaagtgtttgtgaaaaattacaatttttaattgtgatgaagaatagaacctaggttaaatgaattatatgcttcatttatttgttgcctattagtctatctccataaatctcaaagctttatctaagttaaataaattgcatgcttcatggatttactgcttaggtaaaagagttaattattgagtgctttgccttgattacatacaatagggagattgggataattgactgatttagcattatctacgagataaatagtttgattggaaactaaaaattacattctttaataggaattagaaatgactattgagagtggccaataacctttaactagtttctcatattgtattctcaattttgctttgttcttatcttttttttttttttctgctattcaattacaactcaatatccccgttaatttttgtttaatagtgaataataaagtaatcatagtcctcgtgggttcgacccgtacttgcttttatactgaaataattgaaagtattgaaaaaatagtaaatttgatacggcatacaacacgcatcactaagtttagcataggatataaattcctcaatggggtaggcagtagagaaagtatgacatacatagtcttttaggtgtgaaggtttggttatttggcgaccagtttttgatgtaacaataggagccttggattttaaatctggtgtgggaataacaccatctgtttgtgagtgtggctcaatagaggcatctggtgtgggaataacaccatctgtctttgattgtggctcaataggggcacttggtgtgggaacaacaccatttgtttttttattgtggcacaatagaggtacttgttgttgtaccagggatagtgtatggaacgtgtcattctgtaactggtgtgggattggtaccagtgtgttgatgtttaataataggtgtgtgagcaggtatgcatggctattggaaaaacaaattgatgtcattgctcgaaccttaaccaagaaaaggaaagatgtgttcatggaatataacatctcgagagtgatatatttggttggtttcaatgtcaagaagggtgtaggccttcatgccatgtggatacccaatgaagatggatgcatggcttcttggggaaaatttgttccttgttgatgtcaatgtggaggcatatgctaggcacccaaaacttcttagatgttcacagttagggggtttttagtataatttttcataggatgtgctaccattgaatagagcatatggggttctgttcatcaagtctgtggcagtattgattaggtatgcccaatagacaaggggtaagtgagattgaaagcacaatgttcttgcaatgttaagtatgtgttgatgttttctttccgcagctgaattttgttgtgggcgttcaacaaaggaatgataatgagtaatgcccttggaagcataaaaggatgacattgctagttctttggcattgtcaaatcaaatagctttaattggtgtagaatattgagtgcaaaccatgttgtaaatcatgggaatcacagtgtggacatcttctttagttttaagcataaaagtaaacgaagatgtatcatctacaattgtgagaaaatttctatatccttctattcttgtaacatggaatggtccttgttatcccattttttgcactatgacgtggcatcacgtgttggtgacacgcggacctgattccccatatctacccaatagagatgctccgagcagggcacaacacatacctacacggacgatgtcttcccaactgagtagtgaacaatccgagcagcgtatcaacacttagcaattccagaatttgcattgtgaagcacaagagcaatccctataaatct

SEQ ID NO: 34868 - DNA, 1360 bp, Cannabis sativa
taaattgataactaatcagattagattgtaatgaggtttatttagggcacaaaactcaacattcacatcgtctgtttgggtcccttttacatctcgtgtgtttcataggctttggttcactaaaaacgatctcctgttcatgcgcgaggtagatactttctcgagtttcattaagcttggtatagtcagtataaatgggtaagtatttgtcgtgtttcttctgtttcttatctttggacgacctcttagaatggtctttcctctttgatttggaagcttccgattcgaattcttcaacagaattgcatcccaattgctttcctggttccccgacttgatgcctcctgaacttattctccaactcgtctattcgcaaatggactgactccctttgctttagaccaagttgttgacgaagatcaggttttttcttgttcaagcattctcgtaagtccaattggccatgacgactggcagatcttgttccagatcttgttccacccatagtctgtattttgcctttttgatcatcgctgcaacaagcgttctcttctcctcacatttatcgattgtgagttaccgtgtacctcgcggtagctctcgcctcttcacgtcctgctcttctccctaaggtttaattcgtctcgttccccctattgggatttgtgcgagatcatttcctatgagcttggagagaaggttggcgatccctgaacgatgatccatgtatcccaggctgtgtccccagatttcccttattcttgtggggaactttcgatttcttggttcttggctgatcatatgacatctcaccttcaacgtatcccccaatttcctcaggttgtctctcctgagcgttctgaggatacctttgggatgcctcctgctccctggtttgcgagtcacgaggtttgcctcgtgattctctttctccaaggtcaggttgattttgggagctattcccctaggccgcccttgctgctactacctcacgttctaattcagcattacgcaattttgcttcctccaatcgacacctgagatggcgattttctaattcaacgattggtatgtaccttgttggatcataaacgccatcctcgtcaactagattaggaagagaccggctgttgcttatcttaggcccttcaagtctgtttcccgaatcctaggtttccctggagcttggggcttgctcaaatgataagtcaaatgttccttggggacttagtggctcttttccaggacgatgattggctccttcataaggattattttcttcgttgtcaaccataagagaaatactattttttatgtaaggaggatttttttttagctttttcacgaaggctctcaatga

SEQ ID NO: 34869 - DNA, 2230 bp, Cannabis sativa
  modified_base (1598)..(1619): a, c, t, g, unknown or other
  modified_base (2162)..(2199): a, c, t, g, unknown or other
aaataaataaaataacaaataataaattcaaataaagaaaaaaaaatgtatttataaagaaatatttttcttttattttaaattgtatttaagaaaaaaattatatacaatatacatttgatctattaagttttgaatatgcattagacttttaaattactattttttttacattaaaatattatttatatatataattttttattttttttacaaaaatatgtagattggattggatcggttacttttacatgtcaatcaacatccgatccgcacaagtgtgggttttgaattttctaatccaatccaatctgcacaagtgcggatatccacactttacggatttgattggattggatcgtgcggattgaattgatcggctattttatgaacacccctagatatacagatagatatagattagatatagatagatagatatatagatattagggacatactttacaaatgcaatccccttaaattgatgtttccgtggtctaatttttgggggaaaaattgcggcaaacattctcaaaaagttcattttgatgtaaataattttttaacctaaaaaaatagcggtaatagtccacaagttcgagattattgtaagtctgtcaatcctaattttaacagattcgttagttgctcctgaaaatgtcatgtgttaatataaaattactgtataagtccctaaaaagtttactttattgcagataagtccataatcttaaaaaagtatggtaaatagcccccagactcaagattcttgttacccaatttaattgctctatttgttgctctaaaaaatgccacgtgttgatattttattggccaaaataataattttaattaaaaaataaaaaattaataaattaattcaaaaactaataatttaacttttttttatcctttttatttttcttctttcttcttcttcttcttcaccctagcccaccctgtcgagtcctagtctactctactaaaattctacaatttcattagcaagaagggtcactctaaaaaaagttgtctaagttaactttgaaccaaaaaagccgaggtcagagaactggccaccacaacccaccaccctccactaccgacatctctctttctctaccgcatactccttccatatctcttggtttcttaaaaacatgaataaaaaaagagaaaattgcggtataagtcaccaaaaatagcagtaatagtccctaagctcgagattcttgtaaatctattggtcctcattttaacagatttgttgttgctcccaaaatggcatgtgttgatattaaactgcagtattagtccccaaaaagttcactttgatgcaaataagttctcaatcttgaaaaattattgtaatagcccaaagcttaggattctcattagtctgtaaatacccaatttaactactttattttttgctctcaaaaataccacgtgttgatatttccttagtccaagtcataattttagtttagtataatttaaaataaatgaataaataaatgaataaataattttcaaaactaattaattaactttatttttttttatcttttgtattttttttttctttcttcttnnnnnnnnnnnnnnnnnnnnnnttcttcttcttcttcttctcgttcactcctagcccaaccttcctaaaattcttccaatttccaattagcaagaggggccactctaaaaaaaacctatctaagtaaacttttgttatacccatattttaagcaagcaatatggtgatgacatgtatgaagaggctggaaaataaaccagctcatgttataaagcaacaaatatgttcaaaaactcgcctaagaaaatataattggtagaaatattcgaacttatcctttcaaagataaaggcaagccgtgaataataactgtcgtttttgtaagaccagcgagatgaacaataaacgtagaaggtccatctcgtgatacacatactatactacagaacaacaatcagttggatagggtagataatacattatttaagagcttgtagcttattaacccacatactcgtgagtatgttggaagactaaggggtctacatacaataaaatttatcttggaattatcacattatgatagtacatcgtgtttttgttaaaaatattttaccaggatctnnnnnnnnnnnnnnnnnnnnnnnnnnnnnnnnnnnnnnatgaattctctaaaacaataaaataaacaca

SEQ ID NO: 34870 - DNA, 1874 bp, Cannabis sativa
gtatttttgtaattttttttccttttttgtatttttttatttttttccctttatatagagggtttttttttaaaaaaaataaataattagttaatgttagatattttataaaaatttattaaaataatagtaaaatattaatttatagatttaatcactaataaaatattcaaaaaatgagagaatgaaggagagaagagattgatacatttagagtgatattataatatcatgttaccgcctcatacttttcctttatatatatatatatagatcgttcacgcgttatgtttttttttttttcttttttgcatttgcttgctaataaaagtaacatttttttatttaaatcttcaaaatttattattttatttgtatttaattttttaaattcaaaattttgataataaaattctttcaagttattgaactaatttttaaagtgtcatttatttactatgcttatctattaatatagattatttacgtttacactcttatacacatgagatattcatattgacatacataatattattatttaaaattataaaaaattattttaaaatttatttcaaaactaaaaaataatttaaagttatagaattaatgaaataaattaaaattatttttattttattttatcctttcttatcctgatgactccctctcttccttcactatcactctcacctccatcactagtgccaccacttccatcaccattgccaaatcaacactaaaataccatgatacaaattcaaacccaaatttaaaaaaaattatcaaactaaatctaagaaaaaaaaaaaatggcaaacctagatttgaaatcattatgattatgttgcacagtgagtaaaaaaagttgttgtacagtgaacaaattgtgagctcaatttacattctcttgcttaatttcttgcaaactaatatacttaatcctattaaaaatttcaaatttaattttttctgttgtacaatgtatagattggaccctattttcccaataagcaacattcagacccttgaaatgaagtaaatcactgctgtaaatagtaaaaaatagaccactcttctgaacttatcaagtgagaaaggcaagaaattgaaatgggaacggacacgacgacactgagagtggggctccagtgatgctcatcatgagtgtgcctagcttatttgttggcttcgggataaaataatgagagcgtgcagataacgggatcgggccgctaggttttgttcatcgacgagatgtgagtccccagtctgctaggttttgaaattatttttttataatttttaaataataatattgtatgtacaaatataaacgtgccacgtgtaaaagagtgtacatgtaagtaattcatattggcacttaactatgataaatgaagtttcgattggagactattttaggacaaatttcatgtcgattttgtcctcgacgctgcctccagaacctcagcttcatgccctggttcctaatttgatcccagaggaagctaaccatcttcttgtgaaaatcccttctgcagaagagataaaggaagtggtgtgggccatgcctcctcttaaggccccggggcctgatggaatgcctggtaaatttttcaaagaccattgggagacggtgggtagtgatgtaattgccacggtgaaacagttctttgagacgggggagtttgtgaaagagattaatcagactttcattgtgctcattccgaaaaaacctggggttaactcctttgacgaatttcgccctattagtctatgtaacttcacctataagatcatttcgaagattctggctaatcggttgagacccctcctccacgaaatcatctctccttatcaatctgcttttg

SEQ ID NO: 34871 - DNA, 2062 bp, Cannabis sativa
  modified_base (1334)..(1338): a, c, t, g, unknown or other
taatcatttaaaaagcactttcatagaaaaggatttttttaaggggcaattgttatacctgaaattcagctggtacttcagaaggtgacacgtgtcaatctcagggaatatgatcaatgaattcgttgataattatatcaataattattaaatggaataactcattaaatgcaaaatcaatagagtatatttatgaatcgcagactacattgtctttaacgagacaaggatgtacaaactattgattcacgtattgacgagaaactatttcacgtcaaaaggcataatcccaagaaggacatagataatgcatggtgagacatccttctcgctatgtataaggaggcattgatgaggcgagtcagttattaaaacacttagcgtataatatacattatagtaactaagtgtaataacttgaaggacatgattgtccagtctgcaatgccttatggtcaaagagcagttcttaagtttgctcagtacactggtgctcatgccattactggaagacttatgaatagaccatgttgttcatgtaccaagcgagacgcctcagcgagatacgtttcgcagcgtgtcttaatccacatcagcattgaccctttaaaagcggtttaaatcacaattgtgtgatcttcaaataataactgcatttatttacgtggagcataattacagcccacaatttcggggaatattgttacgggatttgaacttaaatgtaattaactgtcaacctatgttactataaataggggtagattgtatgaaaaaggggacaaaaaatcttatattgaaaaaagaatgcactgattgtaaagaaacctagttctgtaccaaaaaaaatctgaataagattgactcgtggactatgtagagttcactgcaaaaccacgtaaaaacttggtgttatttttgcttctattgtttttcttagatttttataatttctgtcaaatctattacgaaaattggctcataatcgttaacgaaaatctcgtgaacacaacctaaaataactttttaaaatttaaaatgcaaaataattttaaaagatgtaggtttatttgaattacttttatcaaattaaattaaatatctaataagataaattatttgaaaataaccaaatagatattttcaatatcattttccagtcttataatcaaacaaaattaaaataataaaataaacaaattttaaaatagatatagttagtcaattattattttaagaataaaataataaacaaacaataattaccctaattatatgtcaaaatatctcaaattaagcctttttaaaatttttacaaaaatatctaggttatnnnnntatttaaaatactatttataaatatctggtaagtaaaatgatataaaatattattttctaacttataatttataaacaattaaatatttaacagaataactaataattttgaatttgaaaatattatggttagaatgtctataaaaatatttaggttaatatcaaatttattattatttaatttatcctataagataattttgatataatatttcaaattaaaaggataatgttatcttttaatttaaaatatagccaatattaaaatatctgatcttttaattgaataataaataaatgttaaagaaattaacaaatttttaaaatctaacaataattttaaaaataaaataatcaattttttaaatttaaacctcaaaatatcataaattaataataatctattaaaaaaattaaatattactaatttacaacattgatatttatgtttatattaaaaataatattttattttgatttttacggtttgaaattgggaaaattcaaaatttgcagaaaaaatctacaaaaatcagattttggtgttggctgcccaaaaggcttaacgtgcaacccagataggctgcaagcaaccctatgcgcgcgcacaggtgggagcccgcagcctccctaactgagaaacctcggtcagctatagggtttgggcatgcgggtggagtgtctgaaggaggggtgagcgagtgcttctaatagggattttgtc

SEQ ID NO: 34872 - DNA, 1988 bp, Cannabis sativa
cccatatgatataaaaatgagaaatttttttaattagatataaaaattaagcataaaaaactcaaaattttctaattttaccaattttacccattcatgtgtaatatccgtgcacccttatatatataataacaataaataaaaataaaaacatatagaatgataataaaattatatgccacgtcaacaaaagtagaataaaaaatattagagcatgaatattattctaaaaaataatatattgtataacaaaaaatacatatatcattcaccaaaacatatatactaacaattataataaaaaaatatatattactaatatatacatttactaaactaaccaaattatataccacaattaaaatatatatatcatgacaataaaattatataccaccattatatataataaaatagatcgaaactaattaaatattatttaaaataaataatatattatacaattaaaatatataaaaataataatgaaatatatgtagcatgccaataaaattatatacatatattaaaatatctatattatgttaataaaatttataccaatattatacatatagcaaaataataaataaaaatatcatttaataataataataatataccataaaataaaataaaattatactatactatacaataaaatttaggagcttttttatatttacacttctaaacattttctttttttttttttttgcatttttacggaattttacataggaaccctattgcaacttatagagtaacctaaatcgcaaccaaaaattgtatagcaacctacatagaaatcataggagaaaccactttagaaacccaaaccgtaaatttgaaaaaaggttaaaaaaaaaaaaatagtatatgaggtagtttctctaaaatctatatactaataacttacaacaactaataaaaaaaattaaaaaaatcgttacaattttaaaataaaaatattttaacaaaattaatatagtttacttctaattctaaaaaaatatgaaaaaaattaacaaaagataatatgaaaataaatagtatgaaagagttattttttttttataagctttgaaataagaacatttatttacatagtgttatagtgttttaattggatgttatttgctataattttctccttatggtgactgtggtcccatatattggctcatattttttttgagccttttcccaaaaattatggtctaatactcatgaaacgtaatattaattttatctttttattaattaatgcatacggtcaattttatatgtatgaaccttgaattgttgtgattgtatataagaagaacatcctaatgtaaggcagtcatgtgcgtagatttatccattctgttaatccgattatccgattatttatttatttatttttatttataaatatttttatatagaagaagataagataaataaatgtacatctatgacagggtgcaatgttattcaatcaagtttggttgcacattttggtaactgcagaaatttttggctgttggacgttcgtgcttgacacatgtatattccatgaatcttagctaaaataaagtacacataataaattatagtttagttctattagaaagggttagttaaattaagaataaaaactataatagtaataatacagttggttattcgatccggttagccttccccactatctgccaaacatgctacatttttcacatgtgtttgtatattaattatcttcttcattattttcttctttttctttacataaaaggtgtacttcgattgatgactagggtttaacatatataagaaagtttcttcaacacattatatttaggacttatttagaagtaattaatattatgtagtgtagagtgtttaagattttaatatacaatagaataaagggaaatttacatggtatactaatttttgttatttttttacaaaaatactgtcaggcagtattttttactttt

SEQ ID NO: 34873 - DNA, 6666 bp, Cannabis sativa
agatggatctcttttcatcattgttgcacctttccttagcatcagcctcgactcccttaagcttcacattggctgcattgagttcatcctgaagtttttggtaggcctcgcatttgtctttggcttctttctgagctacctcaaaatctcccatgtagttcctctttaactcctcagcatccttagtcagtcgtgtgatctcctttttagcatcattccattgcttggcaacgacttcgcgttgttcaatggatttgcgaaggtcagcttccagttgttggaccttttggagaccctgatgttgtgccacatgagataaaaaaagatgcctaaaagggaaaaatatatatatatatgatttcttttatatgtaaatttgatagaaagataaaaaaaatgaatgaagaagggaactaaccgagaggctaaagttgagactcctctaaaataattcctcatagctaccattgttaacaaaatcccagtcgccagactggaagaatttgaaatggcgccaactacaggtggcatattgcgagcagtactcccaaccagtgctccccgcttcgttgggcaaggggcaagaaggttcaagcagaatcatttcaggccttttacctgaagacgtagcatgatgagttgagccctagacttgttcctcaacgtgtacaatggccaaagtgtgagcttgaacctaatcttctgctgactcgggatttataggctgcgaggcacatttcttgtggcagtggtcttccttgatctcttcagaggttctatattcaacctcgatgaggtttctgaggcaacaatcctcttcttcccttttttgctagaggtgttgagaaggttttctacatccatatctattaggcaagtaaatatgttaacacttgttcaaaaatagataaaaaaatggggaataaactctcacttaaagaaaagttaccataatcataaaatgatgaagagggaggactatagtaattactaaactccttagaccatgtgatcattaatatatcataagggtttattaaagataaatcccaatttgaatctggatggctcgacctatcaaagttggtaccatacggcgtggcaatcctgtaatatgagctagtgcaactaagttggacgtggaacctaggataccaactatcaaacttatgtgttatacagtttatgaggaaattattccaagtatagaaattatattggttatcctgaaaagttactagtgaagtgcactctatctttagtatggtaggtgaccatccacattgattacctcaggatgcttcttcttcaccttcccgaggggttactttccagaggtaatggacgcgagcaacgtaatcttggctttcttcattagctgggactgggaccttctctcacgaagagtacttcgggactttgtaatcacaagtatactcgtccgagcaagaagattgaccgtcgtcagattggcctcgttcaaaagaaagctgctaatcgcaatccgaatggaagacccagtaggattttgtgatgctcgaccatcttaggggtggggattggtcttttggagaccgccgtcaacacaataagtgtattaagtcagcgaactcaaagtcataaatataaaaagaactcaaaaccatgtttttgagacaaaaattacttacgtataatgcagaatgcagttatgttgataggacaaagaccggttgtccagaagaaatcctccttgaactcggttatttcgtaacctcacgatgatcatgtggtcatttgtgtgggtaccgaggtaataaaagtcccttgaacatcacatccgtacaagaatggccttgatggagtagaaataaactatctcgaggggagtgggacactcccagcctaaagtatggtacaaaacttataggccttccagaattttgtaagaatttggaatcgattggaagggagaaattccaagataattacagaactctttgtagtactctctcaagaggataactgctccagccttgatgtgctcgaggctctaaaagcctatccctgacgagccgctagtactagcaccatcacattcctcgccgataaccctttctggatggaagcaactgaattctcctagagccacatgtctaatacggtatcctcgcgtttgcttgatgccacgagactctaaaacaccaccaacataatctccaatggcccttactttagactcaatgagctcggcttcaaaagtaacattagggtcctgtggggtctttgatttacgaggcttggtagacataatttcaaaatcaaggtcacctgatgaaaaagcaacaatgactctgggtaaaaaaaaaggctttagctaaaggaatagacgataaagataaaggttcaggccaggctgcatctcgcaagtaacgacgttaaccctcagttatttcttgtaaaaatttcctatagcgactggaaacttcatcctaattggtttttattaaatggtccctaattttggcatcattaatctcaagtttggatttaggtttttggattttgggtttgaatggaagagctaattctttaggacattctattttttttttaaaatctggagttgaaattttgaaacaagattgagacatttttacaaaaaagaataatcccgattttcgaaagaaatttatttaaaccagaaacctatgaatgtagtaaacctaagctttttctcttttaaaccctagaaattatctagaaactaaattgaaatcacttaaaccaaacaagtgaacaatgatacaattaattacaaaaataagagtaccaactctggaaaaagaaataccagaaagaaataaggaatgaaccacttactgttcaaagatggatttttgcacaaggaagaattctgtaaatgggattgagatgagcgaatcagcgtactctgagaactcctgaggttgagaattaaattcgaagaaattcgcaaaaaatatgtcaatgatagagagggcatgcaaggtattaagaagttgagagagcaatttttgcagaaaagcttgaaggttcgaaaggcagaaattgtgaaatgattgttttctcttgaattatatactttacaagtaatcaccgttagatcaggaggaaaaagatataacgaatgggaactagagagaattggaaaagatgggaaattaatgctaatgatgtgcctcgaaatcatgaaccggcaaaactcaaagtatgtaatttttcaaaattggattaagacaaaaatacccttgcaatcatttaaaaagttctttttattaaaaaaaagaactttaaggggcaattgttatacctaaaatttagcttcatttcaagaggtggcacatgtcacacagtggaatatgaaccacctgatataatgaaattatatcatttaatgcgaaggaaaaagaataactcgttaaataaaagattaataaaaaatattcgtaactcgctgactatgtagtcttacgcgagataaggatataggtctattaaaacttatattgacgaaacacatgcctgcctcggagtacacagatccaaggagataattcatttattcgatagaatgaatacggttatgaaaagcaacctcggattatgtatagcaagacaatcacctcgctatttataagaaacttggtgagacgaatcatttgctaacacttagcgttttttctacattataatagctaagaataataactcagagataagcaagatacagttttccaaatcaacattgatcatctttaaggataagaataacaaccagttaagcggttatcaagtattatccacatgcaatttaaatgaaacgtgggaatttatcacttttcatcaacaattatattttaaatagaatgtaaataactgccaacctatatttctataaataggggcagatcccatagagaatagaacgaagaatttgagagagaaactatatatgatcaattgcatgttgtattttgtattcagaaaatatcttaaataagatagacttgtagagtatgaagatttaactgcagaaccacgttaaaaatatctggtgttatttatacattatttatttttttttattatttttttattatatttattacaaaaggcttattattggttaataaaaatctgcgttaacaggtatcagtagtaaaatcctaatatccaaaccatggttcagacatgaggaaccctacgcctctctcctaccaccgccaccaacccgcctccatcattcgctgctgctccagttgagtccatcgtttcttaggcttctcttcttcctcctttcgcaccaccatagcttagtgtcgtgacgtctccgctagattttgtagattcgttaatgaatgtttcagctctaatgttctctcccaatgctctgacttctccaacaatcatcgtcagctccaccgtcacatcttcttcaatgatcttggatccaatagagcatatgaacgagacctctgacattccttcttcaacattcttatggctgcattattcattgtcgtctcatattggtggatctttcactcttccaccgttctcctccttctttcagacaaatcattctcatccagcgatcttggtattttgtagtctatctgctgctctttcagtggctccaatgacttttcctcactttccccctagtttttgcaactttgatcctcctcacgctaatctggatcgaccttccatttatgaatgcaatccatatcaccttggaattagagacaactcgaatttccttattgttccctttcaattgactggtgaagacaactttcagtcctggaagcgtgctgctaccatcaacctggctaccaagaacaagactcccttcattgaaggtactctctctcgtcctcccattagtcatacttatcgatatgcttgggatcaatgtaatagtatggttataacttggatattacaatctattttacgagaaattactgccagtgttatgtttaaggattctactatggctatatggaatagtctccacgatcagctcaatcaaagcaatgaccctcaaatctttacgctcaaaatgtctcagagtcgcatcaaacagggcgccaattctgtcaacacttattttactcaattgccatctctttgggatgaacttaattagttcaaaccttttacacactgttcctgtggtttcacttgtggtgctatgcaacggattcaggattactacacttgtgatcaaatattgcaattcctcaatggtcttaacaaatcttatgttggtgctcgtgatcagatcttaatgtttgatcctattccacctttgtacaaggtgttttctatggtggtgtagtaagagtgccattgttctctcgacaataccaatgccatgaccgttgttgccttgtctgcttgccctgcctccaacaactctaacaatccatcttgaagcaagaggccttgtcctacttgctctcactgcctcaaactaggtcatttggttgagaaatgttacttcattaacgaatttcctcctagatatggtcctggatatggagagaaatgcaaacaatctaaaactgccaagaccaatcaagcctcgaccactggtgccatcagtcaagacacttccactcatctatctcagttgcatcttaatcaacaggtcattcaacatttgagccaacaactcactgcaggaaatatcaactttactggcagagaagtctgccgaagattatgaaatccgtcggtataggccattactggcggggtcccaccgctattagcctgcttgtaatagatgatcgttattacacaacaatagaggcagactgacacattcgctggtactaattattaatatcggcagatcaatagcagggggtcaccctgctattgaccttttcaaaaaaaaaattctgatacataaggagcggtggggtcctaccagcattgtattttttaaagtagaagaaaataattaaatataaaatttataaaatatacaatatgtatattaatattagtaatatatataaacaattaaaattttaataacaataagaattttatttttaattaaaaataaacttacattaaactaattttacacacataactaattaataattttgcaacatactacattaaacaaataattattatccacacataattaaaaacttaaaaaaataattattgtccactcataattaaaaattaatctaataattatggtccacacataattaaaaattaaattaataattattgtcttcatcaagtacattatctcaaaattctaaatcgtcggtgttcaagtttaaatgggttgtttatgcattattctgagcttgcgaaactggcgatgaagggtaatatggctgctgtgaagataacatctcaataaattgttgagtctgtggttgttgtggcaggatcagagatttttgttgttgtgaaaaatttagagattgttattgaaactgaccagggaaaaaatattgattttttggactgaaaaattgacccagagaaggttcctatattgaacccccaaacatcatcgactgttgagatgagctcctaaatcgaccaaacatcagctgttgtgactgtgatcccctaaacaaatatgagtagaaaagt

SEQ ID NO: 34874 - DNA, 1735 bp, Cannabis sativa
agtcggttttttttggataataaactaaccgaaaaaattatacatatatatatattaatttaaacaagactttatttagttatgatatttttatatattattagtaactaaataacaactcactttaatatacaaaataataaaatacataatacattgcatcaacttaaatgaattcaaaaacaagactttaattaaccaatatccctatatatacatatatttacaacctttggataatccaagtcaaatgttaatatacttaactaaatatatctttctatagataaatatagataaattaggcataataagtccctataaatattccactaaactgcaaatattctattcatcacataattttctggtagatatatacaaatcaatatctccttcttcctctaatttatatatatttgattactttttaatattgtgattgttttggtttatgcagaaacccaaaatctcattcaatggcgattagggcatttattatcttaattagtatattatgttatatttcatattatgctaatgctaaagaaaactttacaacattatcatcatcaatatcaaaagaagaacacttggaaatagatgagcaacttaagcaattgaataagccagcagtcaagaccatccaagtaatttttattttttctttgaataaattacgaaatttcatttggttttcaaatatgatgaatgagtattaattagaaaaaaaaaatgagattttatgttttttatttttcttatctaattgagatgagattatctcattagccgaaagaaataataaaaaaaaagaatattattcgacaaaaaaataagataaataaaaattgagtttggcataaattttttatataaacatatttttgatatagtgcaaaaagatatggttttgattttttttattaaatggttaaattaaatatataaactcaaatttttgttttataatactttaattttaaaaattaatatttatagttaaatttttttagtaactatcaatgtgtaacacccattgagaagtgtaatttatatatatattcaagttttcaattgaaaaatttatattgttattactgtgttgtatataaattataaatttactaatttagcaaataggccatttaaatatttaaataaagataatttttttaatttttttagaaattaaatttaggtaatgatgatgtctaaatattgattgccaattaaaaaataatttatatacttgcaggtaaatgatggagttatttatgactgtgttgatttctataagcaacccgcctttgatcatcctttattgaaggaccataattattaccatacggtttgttgtaatttttatatattaaacatataaatttattaataaattcaccaaaaatatttattagttattcctgataaaataatttatgttattgatatacagatgaaaccttcttctcgtcctacaaatttaattaaaaatgaaaatgaaacacatagcgagcataaaatggaagaggtaaagggtttaggatgtccaactggaacagttcctattagaagaactacaaaagaagatctcattagatctaaactattcgcaaatagaataattactcctcaaactgttgagaagccaggtcttcatgtaagatttttcaatatattcattaaaacaacttttattattacttattacgatcaatatatatatatatattta

SEQ ID NO: 34875 - DNA, 1606 bp, Cannabis sativa
  modified_base (360)..(361): a, c, t, g, unknown or other
tggagtgctgctcacatcagccgacccaaaatcaacaaaaggaaatttcaatgccggtgcacgctttctcttatccaaaagaggagtataaataacagtgtcatcagcttattcatcagaaggaatgacaactgccttttcaactgcaacacttggattggattctggaacctgaaatataaaatttaaaaattagaaaaaagtaaaaaagttgcaaaactaatataaaactgtcaagcacctaaaataaaactgattttaccaacaaagaatataaacaacacttacattgattttaccaacaacctctaaactagccaacgcaacttgctcatcatcaatttcaagctggcttaaacnntcgaaaaaatcatctccctttaaagtagactctttgtccttaacattctcatcatcctcagccccctcttcactgcctgcaacagcctcagtttgattcacatcatcagtaggttcatcacaaacaaccttatcaactacaacaacatcaccaccatctttacccaactcatcaccatcatcaaaatcggaatcaatattctctggattaggtagtcccttgtcatcatcctcatcatcgtcaacatcatcatcatcatcattagaatcttgggtgaccaattcatcagatgacttaacctgaatcaaaaaatggtattgcaactaaaataaaataggaaaaaaaaactaataataacaacagtaaaaaatgaaacaataatagtgtaaataaatacttcatcagaaggttgacgatgaatgacattaactttttctttaatatccttaattacagtcatgacagacttgaaattaaggtcaacaaaacacctcaacaaaataaagtcttcggccaaggattcttgattgaaaatgaccaactccaacttagatttcaataattcaatgtcctctaaatcagactttttagaagatgaaccactctcgaatatttgcttagtggtaccacgatcatcaatagattcatctaaaaataagccttccagttgcaacttctgcctctcctcatcagtaggatgaatgttcttaatcttcaattaaaaaacacaaacaaaaaaacaaaacatgaaacaaaaatatttgaaaaaaataaagattaataaactagcaccaaacaataataaaactataaagaaattgaaaatcacattgttcaacggcaaatcaaaaatcttgcctttcaagtctctcaaagttggatttttggtcccaacatcattggtccaattaagaattcttagaatcctggatgaaactcttttgcaaaaggtgtttaccattgcaggacaatattcataaaacaataaacacccaaggacaccccaacactctataccaaccatcataggactgacctcccttctcttattttttatttttcattttaatcccatgctctattcttcctttatgagaatcaatagtcaattcaaaggactctctaccccaataatactcctcgcatcgatcgctatcaacgacatctagatcaaacctagaaacttttttatccggagtattgctaagaaggaaacattggatgaaatacaaaacagatagtttc

SEQ ID NO: 34876 - DNA, 1081 bp, Cannabis sativa
aaaatatatattataaatttataatattaaatatattatattttaaaaaccaaaataaaaaaatataaaaattaaaacatcaccatcattcacgtcaaacccctgtctctatatatattatataatttatatttattttattacatatataagaaacatttaaaaaaacaaaaccctaaacagacccctctctctctatcgtattctctctcacacctcacccctctttgaagccgcatgctgcccactgcccagagagtggacgatgacgtgattcgctgcccagcgatttgacgacgacggagacgacaacatcttctcccctactcgctgacgacgatggtcatctccttcgggagtcgccgacggcatcttcaccaacgacagaatcgacacagctcctccctccccaacgacaacacaactcctccctctccaacgaagacacatcttcttcctcgaaaacgacagcaagcaactcgggtcatttaactttctcttctttttcattttcatagttatgcccaaaaatcagtgagttaattaattcttcctggctgtctctttcagtaggatgttgtagttggagagtgattgtgtgtttttttctctttttgttttctcttctatttatatttcttttttcttgtctaatcgaacataaatattaatagttattatatgtaaatttttcagttagtgtctgtttgcagtcataaactttctattttatattcaaaatactggattgaaagcttgggagaattatttattatctttatattgttatttctatggaatttttacgcatttttacgctattgttgttaatgattgattcttcgataacagccaacagttgtggaaccttaaattcatagtaggttttaggtgaaaaattaggttttactcttggattggatggatccaatcaatccaattgatattggattaagaatattggatggatccaatctagtctaaaaaatattggatcaaaaaggttggatggatccgatccaatacagggttccatccattggatggaaccgatccaatccaatgtttcattggatcggtt

SEQ ID NO: 34877 - DNA, 1374 bp, Cannabis sativa
atcctaatccctgatttgtgccatacctcttcccaacctctaaaatggcctcatacgcccaatattacactgcaggtgggaagccataagctatgtatttgctatcatgctgaactccaaactcagcttcttctcgtagttggccttttgtttcaacatgtccttctggagcgagtgcataagtctggcgaatgagtgcttcccccaaggaatccagaagaagaactcgagatcttcgacatatctaagtatgtcagccgtaatcaacgtgttagcctcgcgacccagtagcactacctcaacaaacaagcagaagccaagcttgtacaagtctttcgggttttgacagtttgtgaacctatcttggagtgcttctgtcttcacactatcagacgagttgaaatatttgttgatcaatcggtctgaccccgagtgggcaacatgtgcagccttctcctctgtcattggccatgaggagaagttcaggcccataatgagcgcaaactcaaccactcgaaatctgagctccttctgaccaatgtaaaaccgcatgtgcaaatcctcctcaacatcaaccttcatcttgtgcaacatgacttggtgaaataacaccgaggagaatctcagggtacgacattccaaaagttgccaaaactactttcttttgccgtgttattcaaattgtactcctcaaaccgagacttgatttttgcaaaagcactggtgcctctatatgtcacacggtcagtaaaatgctcggatgttagaactatgagtcgtggagccatctgaaaaaatattgctgatgccctcaaaaaaatagttgacaaaatgtcaacattctgtcgatattatcacacttagaaatgacagaaaataattaatcacatgtcgacaacatatcgataacctgacgacaatttatcgacaaattacatcaaaaaattactgcacataggctgtcataaaactatcgatatcccgtcgacatcctatcaatgtattctttaaaaaattgaaaaaaaccagtttgtgttcaaacaaagacctactatcaacaacatattgacattttatcgacaaaaatcgatataaccaataaattcttacaaaatatatcctaatcaaaatgtcgataaaccatcgataatatgtcgataacctatcgatatacagtaacaaaatagaaaattcttatgctcaaactattttcaattttggtcgatattatattgataacatatcgatatctcatcaataacactattaaaacacactgaaaaacatacagaaaaacacacattaaccaaaatctacaaaaattcaactaatctgaagaatatacacaaatttgcatccaaatctatgaaaaat

SEQ ID NO: 34878 - DNA, 1374 bp, Cannabis sativa
gagagggaacgtctgagagagagggaaagtttaatttaggggtattttaggaatcttttaaaattagaggaatcaatttgtacaaattataaaagggtgtaaattttgatatgagttatattattaagggcaaataatgaaatttcccaattaaaaatcatactcagaatattgtcacaacttacaacttactttatcacaaaacataaaaggtccaaggttgcatgtgactttcttaagtcgcggtctcaccatatgagaatatttttttttattgtgactattctaagttatatttttttttttaaaaaaaataagtattcttaattgtttttttttttgttatttaaaagattataaatgaattatttgctagggattaaaatattatatgattatttattgccaaaaatatattatttagttatttttttttataattatttaaaattacataatttaaattactttgtaagaaaaatattaatcatgagattagataacgaaataactttatatttttttttttaaaaaaaaagactgcaaaaataacataactttttaaaataatagttattatattatttctaatactaaaaaattatctttagtcttactttttaattaatgatataataatattatttttaaaatttattattatttctaatactgaaatggaatacagagcttttgaaaaaaaaatacacacataaattacacaatatatatatatttctcaatttaattatatatacacataattctctttattatattgtattgtatgattatcaatatgtagacgtgattatatagataataattatcaaatgcgtaacttaaaaataaaaaagcattatttatttgaaaatatgcttggtgataccaacataacacaatgattattttcacaaatatttcaagtgaaataaaatattaattggagggtaaatttagcttaatttttttttaattaaatatatagtgaagactaattatataactcaattagaaatacattctcacttttatataaattatatagagataagttaaaaaaagatctattttttatatttattaataaaaaatattcttatattatattttattaaaatatattcattttttttaagtgggttgcccaatatacctttactctctacttaaatttaggggtttttttttggttggttgattctcttcagtttgaatagttttctaattaaagttttatgctattttttgatgttttttgatttttttttcagatggaacttcagttttttattgagttaggagcgttgtttgaagatgttatagctttattgtctaaatttccggggacagttttgtcccatggggcttgct

SEQ ID NO: 34879 - DNA, 2418 bp, Cannabis sativa
  modified_base (559)..(559): a, c, t, g, unknown or other
cgaagtgaagcaaagaccaagagaacctctccgagcctacatcagcagattcatgatggaggcaactaaggttgcacgggtgaccgaagacagacatatgtccgtgaaactggggggcattaaagttcttggagaactttggaaggacatcgaaagaatggactagtagattctatgagtgacttccttgatcacgcagaaggtttcattaagcttgaagaagccattcagcaggcagaagttgagtaaaaacctagccagtaaaaagctccctctgctgggatatcctccagctcccccaatacccaagcaattcaagctcgggtggtaaacggtccaacaacaacaataagcaaggaaatgggaaaaacggaaagtatgctcgtaaaatcgaacaagctcccacggagaatcctaccaagtttactgtattttctgtcttgacagaagatatagaaagcatgtacatggctactcaatcattagccttgtacaagaagcctgcacccatgaaaaaatatgtaagcaagagagacatgaccaagttttgccgttttcntggagattatggccatgacaccaatgaatgcaacaaccttaagcgagaaattgaatttttgataaggaaaagtaatctagacgtacagaagtatgtcaaggccgatcaaaatcaaaggggtgataacaaccaagatttactaccaccaaaagtagatggacatctgcaaatcattattggaggtccgcacatagctggagattcaggcaaagcccgggaatagtatgtccgaacagtacaacatgagcaagaagaagtaatcatggccgtcgaagaaaggaaaccgagaataccatgggcagtggagcccactataacatttagtgatgaagatgctatcaagattagtttcccgcacaacgacctgttggtcgtggaagtccagatagctaccaagatggtggcccgaaccatgatagacattggagcctcttccaacaccttattcaagacaacgtatgaaaagatggggctccagctcaaaaatttaactccctgtctccaacccgtgtatggtttctccggcaaaggtgtggcaactctagggcaaatttgcctactcctcactattgggcaagctctgaagagcataactataatggcacaatttttagtattggatgttccatcagcatttaatggcatgttaggccaacaagctttatatgacttaaaggctattacgtcaatattccattcatgccttaaattcccaacaaagaatggggtggggtgcctaagaggaaatcagcaagttgctcgggaatgtgataaccttgccataaccaaggttaaaaaggaagtatcctctagccagagtttgtacaagagaaaaaacattgctaaatagggagccgcccaaggggggatgaagatgtggatctttgacttggggacctaagcaataatattagaccagtggaggaactaaaagagattgacgtcgacccaaatattcaaaccaggaagcttaaaattggaaatagtttgttgctcgaagtaaaatcagcattgataaaatttcagagagcaagagcaaagagcaaacctaaaacctagacatttttgctttttgcctagtgcctagtcgcatcatgaggagatatggtcatggtcagaattgatccttctgtaatttcacatgtcgtaaatattgatccatacttctggctagtgcaacaaaagcgcagactgttggacaaggagcgagccctagctctcaaagaagaggtagaaaagctacggaacaacactttcataattgaagctttctactcggcttgggttgctaatcatgtactagtacccaagccaaacaagaaatggcgagtctgtagtgatttcaccaacctcaacaaggcatgccctaatggctgttttccacttccaagaatagatcagcttgtggacgcaacagaagggtacgaaatattaagcattatggatgcctattctgagtataatcaaatcaaaatgcatccaccagaccaagaatatataagtttccgcacagatatgggtctgtattgcgataaggtcatgccgtttggtctcaaaaacactggagctacataccaaagattggtaaataagatgtttaaagaccagatcggaggaaacatggaagtgtacgtggatgacatgctagtcaaatccaggatggttgggggcatatagatgacttggacgaatgattcaaagtcctcaggaagtacaacatgaaaatcaatcccttaaagtgctcctttagagttagctccagtaagtttctaggctttattgttaatgcccgaggaattgaagctaatcttgagaagattcaagccctcttggacatgaaatcgccaacaagaaccaag

SEQ ID NO: 34880 - DNA, 1455 bp, Cannabis sativa
ataaatattttggatgaaatagatactttagatatttttaagagagaaataattaatacataaaatacttaattaattttataaaataaataatatataagatttttgaggtagcaaatttatataaagtgtaaaatttaagaaaaatacattaatataatgtttatctttaaaagtaataatttaatatttttgtaaatcaatatagaaggaccaaaattattgacatttttattatagatgagagaaaaaaattaactgtttatatatgattctataaaaaattcaattaatacaacaaataatattcattttattttaaatagattttgaatagaagttatattatttattacttttttataataaaggagaggggagattcgaacatgaaacctcctttttgaaatttattattttttattaatttcacttttttttttataggaaatggattttttttttatataggaaatggattagaatttgaacctcctttatatgaagaaaaatgtaagcttataagactatatttatgaccacatctcttactgtatattgttatcatactcacattatttttggtatttttattttttttgtttatatatatatatatattttgctacacttaagtaataagctttaactgacttaatcaatgcagaattaggcaacaatcctagttttgtttggcgaagcatatagagcgcacaaaatttggttaagcttggaagttgcagaacagttggtaatggtgttacaacaaacatcctgaagcatcattagttgcccgatccctccaatccgtatgttacatctggtacaattggacttgaaaataaaatggtgaattctgtcttcgatatccatgctagaagctcggattactcacttatcactgacatgttcaatcaccgtgatgcaacattaatcctcggcattcctctcagcaatacagcaaccgaagactgctggtcctggtctggggagaagaccggctgcttctctgttcgaagcgcttatgagctgctacagcagagtaaacacgggcaacaggtacatgataactcagggttttggcaaaagttttggcacctaaaaatccctccaaaagttaagaatttcatgtggagggttgtcactaatacccttcccacttgccttgaacttgtgtcaaaacacattgacttatcgtcattgtgtcccgtctgccaagctttcttaagttgttcttttgcaattagctgttggaccaaatgcggattgatcacactctcggatacatcatcaacaataggaaattggctcgagtctatgtttaataaatatgatgatgatgtctcatgttgtgctatcatgatctgttgggcattatggaagtcacaaaactgttagattttatgccctaaataaaactccatttcaatgtaatctattttattcaacatcaat

SEQ ID NO: 34881 - DNA, 1787 bp, Cannabis sativa
aaaaaacaactgtatttcttaagtcctttaaaggtgaacaaccttagtcctttaattgaagattgctcttataatctcttattcaaactaaactggtgagactcattttactcatataacactcaaatctattaaagaaactacaacataattttttaaaaatatatggtcttacatgtactttcgaattgttgctggatctatagacaaacaagagatagacaaactaaaacgttttagtagcatgatagaaacaaagcaaaagtactcccacaaaaaaaaaaatagttgatttacattaaaagtactttcttaatggttatttatactttccaagcaaataatcctgtaagtagtaacaccacacaggcacaaatttaacaaatacaccaatgacaatccaaacactcgagcatttagaatttgtagccacctctacacttaagtcgacatggagataaaaataaaatgaagagttatacataaatggcatcaaaagagaacaagatgaaagctcccaaaataatactcaacaaagaagcaacaaaaaacatgatataataaataataagaaaatgaataaagaaaataagacctagaaaaataaaattagcaaattgtaattcaaacccactcatttttatgtaaaatgaaattgataatataagaaaaaaaaattataatatacctgtgaaatgctataacttacatagagagatagattgagcttaccaaaataaaagtgtgtaaaattctttcccatacccaaattaaacagatgaaactctaagttaagttagaagataaatgagaagttgcataaactaatgggttagtcagtcagtaagagtctaaacttagtcagtcagtcagagtattaagtattacacgcatgatccactaattttttttcttcagaatttttattttagcacctgattacttttgtaggcaaaacagagtacattgaatactatactttatttcattaatcaaacacaatatcacaaaattttcttgctacttgtagttgatcgcctacaattttgaacaattaatcaacagatctacaaacaacattctatgagaagttccttctcgtaaaatttaaaggttgatgctttgaagtgaattcaagagttcatgaccttaattaaatagtcgtaccatggaacaataagattacttttccaaataaattttcatcaagtgcattgatgaaattttcaagcttcttgggttataaaaatatagaatgttgctaaaagatttgctacacgatatgtggaaaggaccataaaaaatttcttaggttctagtcgtaagaaaaaaaaattattttagtttagtcaccttgcaagcagtatcaaacccaaaattggttgggacttctttgcatttcaagtcaccatctattgtttttggacatccaatcaccctagttttcaaattctttcccctggttgaaccaaagaaaaagaaaaagaaaaaagtttgttaaacaaaccagtagaaaagccttaaagccagactcctgtgaccctgccatctgccaataaagatttctctagagagagagaaaaaaaaagtcatatacctaaaatttttcagcaaggaggcaggcatttgtgtttgagtcatccccaccaataacaacaagtttaagaaaataaaagagaagaagaaaaaaaaaacaaattgaatatcattacacattcaaaatagacaaaaattccaaatttcttagattaaagaaaacaaagtgcataagataaaaaaggagagcc

SEQ ID NO: 34882 - DNA, 1730 bp, Cannabis sativa
  modified_base (469)..(477): a, c, t, g, unknown or other
  modified_base (1702)..(1704): a, c, t, g, unknown or other
gttttggggttaaattattagtcaaaagactttgtattgtcttattaataaataatataaatggcgattttatttgacaattaactataattattaaataaatagttttggcatttataggattgaaattagaaatatggtattattgaaaggagaataactggttgaaataaattggtaaagttgtaactagagataggtccttaagtggccgaccactctagtaattttttgcccgttattttattcttttttaattcatataatttaaacctaagccctagttgaagcactataaaaggaacatgatgctctcatctcatccaactcaactattcacttcaaccaaatcaaacctagctttcattctctgataactagtatatgagagacaccttctatagaattttgaaccctccttcatttttcttcaaccaattcgcccttagtgatagagtgccatgcccannnnnnnnnagtcaagtacttaatcatagtgcggaagacagtggtaaccaacccgaaggagagaaagagatccagactcagatcttgataatactctgtgacagattggaacaagggttagagatttgagcagaaggagtcatattattctgctgtaatcaatgtaaggttttctaaactcttatgtgtgtaattttatcgtatgaaaaatttatatttaggatgttaattcaatatacttgttagtaaatctagatcctgctaaaatattcctaacaactgacctcaaagccatggtaatgatttacttttatgtaatatggatttaaaacgatgaatatgttatatttgttgatttggatgtgtgcatgttggtttatgtgttatttaatgattgtacatgattttcgaaatttttccatgaaattaatttcatttttattctaaaaataatttatttagattccttgtgaaaaattatgcaactttcatttttacggaactcaattccgataaaaaataagagagttatgaacatttgaaaatcggggtccaaagggtgtcgagggtcgagcaccgcatgcactccctgatccctcggacacactgtgtctgaagcacacactacccctcgttcagatactccctccggtgcgcttacatgctgtaggtgacccagttctctcggtcagggatcctgcatcaaactcatgcgcgcgcattcgaaggctgtgtgcagtctattgcacgcccaaatggattttcaaccccaaatttctaaattttgtgatttgttcatttcaaatcataaatgtcaaaaataaaattttatttattttatcatttatacttaaatatcaatttttaaattatttattatattattattagtttttgatattttgaggtttaaatttaaaaattaattattttattttttaaattatggtgagattttaaaaatttgttaatttctttaatatttatatattatttaattataaggttagaacttttaatattaggtatattttaaagtaaaagatagtatattcttttaatttgaaatatatattaaaataatcgtataagataaattaaataattaataaatttaaaattaacctagatacctttatagacatcctaaccataatatttttaaatttaaaatcggttatttagtgaaatattttattctttataaattacaagttagaaaaatgatattttnnntcattttacttatcagacatttataa

SEQ ID NO: 34883 - DNA, 1498 bp, Cannabis sativa
ttttgctctccgtcactaccctcctcctcttcatcaccactaccttcatccaaatcttcagcatcttcctcttcttcattgtcatttgcttcttcattgccctctgaactaatatcttcttcattatcactgccaccatcatcattgaaagagtcactacctttgtcctgtaaaaaaaaaaattgtaaataaacaaaagcatatgtaagaaactaaaaccaaacttgaaaataaccataaaagaactgtcataccttagcaacaaaatcaacaaacatagatgaaaactgtatctgcattgtagacatttgggcagcaaaagaaacaaactgtgcagaaacaaactctttcaactcaactaaattagatgaaatcttctaatgtgaagtatacagcaaatcaatcttaagctccaaaccatccacattttcagaaaaaccattatgtttgacaaatatgtcactctaaaccacagaaggttgttcctaaacaggcacactctcgtaaaaattgtaatcagtgtcaaacttgaaactactcaagtataagaacttgaactcagtagaagtgagtttcatattagatagctgcaactgaaaaaacataaaaggaaaaatatcaataacattttcactaaaaatattaaacaacaaataaacaactaaaaaaaaacgaaaaaaaaaactgaagtaccttgtctttggagacatcaaaatcgtagtcgtcaaaattttaaaagtgggatggctgctacaagtccactgaataatccttggaattccagaaatttccttttagccattacttaccattcatgtatttacaacactcataaaaccaaacttgaaatacatgaggacaatcgatcaaagtataaaatacactcagcatctttcctaaactcttcgcctttctaacactttcaacccaactatcaagtttatccttcaacgacgaaatagtcaattcaaaagaactcggtccccaagcaaattcatcatgcctaccactatctacaatatctaaaatggacaaatgaaagtttttatgctttgtaccactaagcaaaaactattcaacaaaataaagaactgctaacttaacaacatcctcatcagaatcacctcatctctttgtggtaaaatattccctaacagattatttagtaatagaagtgaagctcgactaatatttcaaataaagactgttaacatcttgcttaaaatccaacacactatagtcaccttcacaatctaaatctaaatcagttatcaatgtaaattcatcaatgctaaacttaagcctaacaccacgaatcataacccacaattcagcatcgttaggctgctgaacctcctttaacaataacccatgaaaaacttggggttgcactttgaaatcaagaagcttaatgaaatgcccaaaatagggttttaaaaacatttcaagctgtttagaagaaagacaagacttaatattatggataaccttgtaggaa

SEQ ID NO: 34884 - DNA, 1233 bp, Cannabis sativa
atttggattcaagacctttattttccttagataaacatttgatagtctttgacatcaacttgtttttcgaacaaacctccaaccacttaccatacattaccttgtaggattcagctaaagaatctttgtccgattcagattcatcagattcagattctataacatcgtcaacacctttattaactgaaacaatgttgtttaggcaaacaagatttctcttttttagcaaaaaatgagacatgctagaaagagcagatgttaaagctactaattcatcatcactactttcataatttttgttactcccagtagcattcaagctatttttattctttttcaaagtattagcattttcagattatatgtgaccaaaaccatcacattctctgcaatgaacaacacttttattgttatgcacacattttttttaagatgagttactttctcaaattttagaaaaaaaattttttgcatcccaaaattttcatgtattggcaaaaatttctaattaatatggccaattcattatcttcctcatcatcagaactaatattcttcgaacttttgaaagcaattgatttttctttttcttttaccttattggatttctctttttgtcggatttgttgattaagctcagatgttcgaagtgatcccatcaactcttcaactttcatcgtgttaaaatctttagcctcctccatagccaaaagtttcacattaaacctgtcaggaagaactcgaacaattctcctaactaaaacagattcatcaagttttttacccaaggaaaaaaattcattagaaatgttagataatctttcataaaattcagagagagtttcagaatcgaacattctaagatcatcaaatctactttgtaacataatgagacgagaacgcttgacatctgaagttccttcaaattgagtttcaaggattagccaagcttctcgagcagattcacatgaggatattaatttaataaaaccttcaccgacaccattaaaaatagcatgcaaaactttattattattactagacaatctttcttcctcatttgaccactctaattcagattttaccttactattaccttcattatcttctttaactggtggtgaccaaccagttcaaatagatttccaggctttttcattttgagatttgatgaaggtcttcatcctaactttccaataagggtagttagaatcatttagcaacggtagacca

SEQ ID NO: 34885 - DNA, 2176 bp, Cannabis sativa
taaagggttggagtatgctgcagccttaaaacagtataactgctttcttcgtcaacagagtaaaataacttggttgcaaaatggagaagacaacactagatacttccattcggttatgaagaaaaggaagttggagaatcgaatcacaactgttgaattgaatgggcgtctggttgatgagtatacccaagtagtgcagcatttcttgaaccatttcaggaattttatgggaaggaaaagcactgctactaggaggcttgataaccatgttttattccagggaccgatcctttctttggaacaacaggctaatctcattagaccttttagtgagaaagatgtgaggaaagctttgtttgggattcattctaataaaagcccaggtcatgatgggtttggttcaggtttttttaaaaccctttggagagatattgggaaagaggtgtccacagcgatccttaatttttttgaggaaggggtgatgccaatttcattgaaggatgctgtaatcactctaatcccgaagactctagatcctaaggaagctagtgactttcgccctattgcttgttgcaatactttgtacaaatgcatctcgaaaatgatttgtacaaggttatcagaagtcctcccttgtcttgtgagtaataatcagggtgcttttatcaaaaacaggctgcttgctcataatataatgatcttccaagatctgctcaaaggctataccaggaaaaatgtctctgctcgttgtataatgaaaatcgacttgagtaaggcttatgatactgtagactggcaatttgtggaagatctcctcaatggtttgtgctttcctatgcggtttgttcattggttgcttacgtgcttaaggggttctacttactttctgttgcttaatggaagaatccaaggctctttcaaaggtgagaaagggcttcgccagggagaccccttatctcctcttgtgtttgttctaataatggaatatctgtctagattgctctctttttattctagcaaaaagggttttggctttcatcctctttgcaagaatatgagattaactaacctctgctttgctgatgatctaataattttctgtaaagggaatgtaaattcagttgagttagttaatgctgcctttctagagttttgtcaagccacaggtctcgcttccaacaagaggaaatctcatgtttactttgggggagttaaagaggagactaagagcaagattttggagatgattcaaatggaggaggggactttccctctcaagtatttgggggttgtcctcagaccgactaggtggaaggcctcggattgtggtgtgattttggataagcttagtatgaagcttagcggttgggcgagtagaaatctctcctttgcagggcgagcccaacttattcactcggttctccttggcattcgaaacttttggatgagcctcttcattcttcccaaaaaagttgtggatgctattgacaagaagtgtcgtgacttcctttggggaatgaatggcaatagaagcaagctccacataccttcttgggagaaagtttgtcttcccaagcaattcggtggcattggttttagagaaggtaagaagtggaattcggccatgattgctaaacatgtttgggcgatttcgagcaagcaagacaacctttgggttaagtggatcaattccatttacttaaaggatgaggacttctggactatttcagcgaatcatgactttagttggtattttaaaaagattttgaagataaggaagatgaccaattctgtcatgttgaaccaggcggctaaggggaataaattcaaggtgagtaaattctatgttgatcttattggggctgccaaatcctcttatgcttcttctatttggcataagttcattgttcctaaacatagattcattttttggcaaatcatgaatgaacatttgctcacccgtgaccttttaagtaaattcctgcctatcacttcagctctttgtgttgtttgtgaggatgctatggagtcccatagtcacttatttattgattgcatcttcactaagaaggtaatcgctggtgttgaaatctgggctggtattctaaattggccgaaaagtttcagtgagttgcagcagagatgttttctaaccaaaccagattttgctgagcag

SEQ ID NO: 34886 - DNA, 1576 bp, Cannabis sativa
gagaaatcacctaacacacctgatgaccacgccaactaaaccacaccctctgcatcccgtatcactccccccaatccaacaaagcccctccctagaaccactgaagcatccatcgcaagagcaaataattcaagaagaggtggcatccatcgagtagctcggtttacaactgggtttgcaaggtccaattccaaataaagacttcgtcgaccatactccttaaactcctccagatggttattgactaagtctggaataacatccaatcttgattgcttgttgccaaataaatctgagttcctatcataccacaaccaccaaagagttgtcatcatcaattcaaaagcctcatggggtagcctatcaaagagaaataggagaatttcctgcatcagtccataaacacatcgacagagcaccgaccacacccccaaccgatgccacactggaatcaaaccagaacaggaaaatagttcatgctcaggagtttcagattcttctccggattgggagcagcaaagaggtacccgaactttccagaagataaggtgtgttgctactggtaaagctaaatgaaacatacgccaaacaaatactttcacctttggtagcatattcagattccatactccattccaccaacgagttaacctagatgaatctgcaactccctcctcaacctggagcgaccactactacaaaataagtttttagaggcggtttttttagcaatattgctattggaccaattaagtattgctattgtctagcatcttcttatgtgtcaattttgatattggaccaattaagtattgagtcttaaagtatcgttatcgcaaagcaacatgtctagagatgctagatattaccgatgtcgaataataatgttctaaatataattaccttagggcatatattagttttcattgatcaacgagtttacttgatattattgttaattggttcttctggacagcagttaattattataagatacataacttaattaagtagttagaaagataagaaaacgttacttaaataaaaataaaaatatgaacacgttatctctgatatcttatcctcaaattaatgtgttgagaggcaataataatattacgaaatgcatattaatattatgatttcttgtgataaaaaaaactaaaagcaatatatgtttgtggtcggcccttgatatataataattatataggataggaccactatatataaatatatatatattaaaataaagaaaaaattaacttattctagctaatattataaatatagtagtaatatatattatagtgtaactgtaagtgattctttggcatcatcatattcatatatcacaagccacgttgtgtcttagttaaatagtttattattatgttctaggttatagttgtaaatatttgtgatatgagtaatatacatgatttatttaccaaaaaaatattacttattaaataaaatatattatttataatagggtaaattgcggtataaatacttaatgtttccgattttatacacttaaatacctaatgtttatttttggtggcaaaaatac

SEQ ID NO: 34887 - DNA, 2373 bp, Cannabis sativa
  modified_base (1837)..(1837): a, c, t, g, unknown or other
gagagtataaattggcctcgaaacggctttgtttttgtcatcctaagaaaggtatgtgtctaaactgttgctcaaggttgatctcttgactaagataagaggaagtgatgtattttaatgtgacatcaactcttaaggacacactaagttaagtcatgaaatcaaaaataatgggttacactcacaaagtgcaactaaacttcataatggttagttattaacttggtcaaaaaattgtactttatattttgaaaaagaaatatgagatattttggtttcaaaataataaagatcagaattttctcataatcttaatgaaattgactcgacaccgatcctaagacggcaatcaattgtcaaaaagttttattgtggaataacttaaacaagattttatgtattttatttgtatgcactcatgcatcacgtttacagtaattttaaaatgatatttattattcatgcataatcattatgttactttgtttatttcagtcatgtctactattttaaatccccttactactttactaacacttcaaaactaaatggtgataacttttataaatagaaatcgaatctgaatttaatgttagtttatgagaattacaaatttgtcctaaggagcgtcctgaggagcccgctgccaatgccctaaaaaatgtttgggacatatatgatgcttggattcaatccaggaacaaggccaaatgtttcatgcttgtaagaatagatgatgttttgcgtaagacgcatgagaacatggagaatgcatctcaaataatgaattcttctgcaagtcatgtttgggaagcaatctaatcaaataatacatgatgctatttgtagcttcatgaattataagattgcacatgattgcacatgctacttgtagctacatgaattataagaaaggtgtccctattcaatctcatgtattgcacatgattgagctaatgcatgagacagagacacatcaagctatcattgatgagagaactcaagtgactacgatccttgactcgctatctccttgcttcaacgctttcaccataaattatgtgatgaacaagttagagtttaacatgactcaattgttgaacgagtttaccgtgtttgagaaccttaacaaggataagtctaaggaaggtgaatcgaatatcattaaagcaaaaccaaactctccttcttcttctagtaagaaaaggaagtagaatagtaaggacaacaacagcggcaagcccaaaggcaagaagtcacctaaggctaagaagaataaagccaaccttaagtctaaggataagaaggctaaaggcaagtgtttctattgtggcataatgggacactagaagagagaaactatataacaaaagtatctctccaagcttaagaaaggtaaataagattttgtaacccccttatgatcaggcacgctacagtgactttctaaatacagtgcacacctttactaatcaaagggttttctgagaaatcatgataaattaattggatttaacttcaatcttttataaacatatatagatattaacataaaactaggatcccgttatttaaaatttacatgcatgttcaaaataacctttacatacatgtcgaacaatgactacaaaatgtagcccaagttgttccgagaccaaactccccaggtcgcactgtctcaacatgtacaatcatcccatgagctcaaaactcactattgttcagctttagcctttcttttacctacacacaaaagaaaaacatgtgagtcaacaaactcagtaagaaaagtttataacatacgatgtattgccgacttgtatctaggcgcccatanacctatcaagcttatcagatgagtaagaatgtttttaactaaggcacgaccactgtaccacatgcactatgtagtgctactgtactagtgttggtagggtttgcatcgtacctcgagtaccactaagtgttgtaccacatacactatgtacttaattgtaattgtatactagtgtttgttggtaacactgtattgtactcattgaacatcatacactgtaccaatgcactcaatactactgtactagtgttggtaacatatgaatcacataatcaacatgcatatattacacatacacatattcatatatgaatacattctatgatagtcttacctcatttctaaattcaagtgtgacggtcaacctgaacggaaaatcacgtgttggatggatgccttatgtcacattcacgtaaatgggtaaattgttgggaatattttaccaggaaattaaaaatcctaaatatgaatatctctaaaataatgaaattaaacacataagagtttataaaaccttacattgattgcaacggaat

SEQ ID NO: 34888 - DNA, 1010 bp, Cannabis sativa
ataattagggtttaattatggaaattatttattaattttgaattattaatttacgatgatttatttgaatgtgtcatatttagaaatttcataattttgcatgttttgtgcccggcaatatggaacgcggtattttgctattagaatcacatcttagtctttttagtatagtggggattatagttagacattgggaatgtcaggaatagtcgggatgttagaatttcccaaaatacccctaagtaccctttctgacttttagtgtgggagaggcaaaatggtcattttgccccattaaattttttgtcattttgtgagtttatttaagttaattaaatcagtttttttgattaatgttaagctgagattattttaataaaacaagtatctttcccattatctcaaaatataaaaaattagacataaacacctttttttctctctagttctctctttccttcgaacccacctagaaccagctagggtttgggttgttcttcaacaattcaagctttttccagcaagtgttaggtgatctcaaggtttaggtaagctcctagcaactcctctcttagttttctttagtttcaagtttggatttaacatgaattttgagtagatgagttctgtagctgctgtaatcatttggaatagttttctgtagttaaattatgtttgattatgttgtttttggttggttataggggttgtagtgttgaatgagcaagctttgagttttagaactcaagcttggctcattaatggcaaattttgattctggttctgttgagatgttttattgccttgaatgtgttccttaggatgtatagaataggtctggaaggtttggtgtgatttggggttgatttgagagagttatgaaatattgagcatttcctgcactgaaccggaattccggttcaaggggacctgtaggaaccggaattcaagttagtcccgaggaaaccctgcagaaccataattccagttgggaaccggtctaccggttg

SEQ ID NO: 34889 - DNA, 1239 bp, Cannabis sativa
aacaatctcaatagttcaagaggcatttttaacgaccttaaaagttcaaggaacatgatttggtacatgttaaagttcgggaagtaaaaatcataattagtcttgaaacaattcgagatcagatataacaaacactattatactttggttagagattcgtgttgataacgtattataaaatattataatttagagaaaaaaaaagtaaaaaagagataagaattttcttagtatcttattctaatgggtgatctcctatttatacatatatgatagtcgaaaattaggagactaaaaaaaaagaatattaattacaattaatggtaataaataaaaaatttaaacatccatgtctctactaatattaataaaattcactatattttcacctaaatttgaatctagaacttgtggtgtggggacaagggggcgaccaaaacacttataaaaggaacgtaaatgttataggttgatttttttttaattttattcatatcttacatttaaaaatttattcatattccataaaagaactgaatagtagaattgaaaattttatacctccaatctttagtattctgaagaaaaaaaacccgtagtttaaaagtggagaaacaccttcaacaaaagatccaagaaacaaatttagcccaattgaagagttttttatcattattattcattcttattttttctcttctattttctatattattaataatattttgagacgatgattctcacagtttttaaatattgttatatggatatccaactataattttgattaattttgtgatttgaattaatgcaaagtttattttaattcaatgttacttttgtgttctattttgtttaaataaatttaaaattgtgatttatatattattttacatctctcgaataggtggtggtagtagctgtagttgcacttgtctcacccttcatttttttagtagattttaattacatgcataacatttgcctaattattaagactctatcttagagtgtgtcttattctgagtaaggagagattttgaaactttttttcccatagctatactaagaatgtgatgtcgtttttacatttagattacaaattacatgttgggttcataattaaactctctgcacatttctgttatgatattgagcatgcatcagtgatcttaattttttgttcttctcgaagtgtaacgccctaaacaattaggcacgctacccaaaagtacttat

SEQ ID NO: 34890 - DNA, 1775 bp, Cannabis sativa
  modified_base (52)..(52): a, c, t, g, unknown or other
atattattaattttaaaattatgatattaaaaaaaaaactaaaaactaaaanaaaattaacatacgtgacttggcatgtaaaatttatctagtatataaatatgtatatatttgtacatgactatagagtcatcaacatagtggaatataatcatgattataagttcaaaagtttaattcccatgatttgtcaattcattggatttaaactgacatgataatcggtgataaggtatacttatgttaacacaaattttcgttaaccaaatatgagcctaagagtgataatctcacacaaaaaaataaaaacagtaaaggaaaaaatttgaacacaaagaatttttacttggttttgctgttataattctacatagtccacgagtaaatcttattatattttttatggtttttttagggccttttctcttatgatttttttgtcccttttttaatctaacttgcctctatttataatcacatagtaggcagttaattacagagttgatcgtaatctttacaacatttatcccttgaaatcgtggggtttgattacgtatcacgtagtataaatgcggttaatatatgaaaatcacacagctctgattaatctgcttttactgggttaaaatgatcatgtatttaaacactttttaaattatagcgttttgggatgtctcgacaggaactcagtaccaatgaccttgatatcgagcatgagcagtcatttgaatgtcagcttctgacttgtcaagactataagtctcactgaaagatgtttgaaattgattggtaaaagtaagaggagcgcaccttcctatagagagataggcgcctcgcttattaggttttgagtccacccaagtgttttcacagttaatatgcatcacttttgtcttcccaggtgtaacgaagttgatgtctcgctttatgcatccaatgccatatgatttctcgttaatacatgaggcaacagtttgtatatgtttatctcgcataagaccttatagtcagcgagttgcaagtatactctgttatttctacatttaatgagttattccattaaaagtgattaccgttgcacgcatcgatcaatattccccttaacttgacacatgtcctccactgaaatggtagccgaattttgggtataataattgccccttaaaaagtgctttttaataattacaaagagtatttttgtcataatcccttttagaaaaacccgtcctttgattttggcaattgtacggttttgagggtcaatattagtataaatgaactgtcttttcatcttctgcctcactcccaactgttagatttccaacctttcgcctttccgtttattgggttttgagtataaaatggtggctaggcttgccatattccataaactccttgtttttggtgagtttcatccagaaattggattgtcatcctcttgccaagttggcccatctaagttcagaaacttattcctcaaaactcgaaacaccaaaatataccaaccgcttttcctctccgtacgtttccaaaaacttcaaacctcagtttaaattgggaacgaaggattccaatactgaggatcttccgatcaatccaaaccaaggagatgcagttgatcgttacggacgatcctcaaaagagattttcgtgggtaagtatcatccctcccaattggtggtctgatttggattattatattttttttgttgttgctccattgatctttttgttggaaatattttaccaggatctagatttagatcggaagagcg

SEQ ID NO: 34891 - DNA, 2954 bp, Cannabis sativa
gtaaaaaataccgcctggcagtatttttataaaaaaatggcaaaagttagtataccatgtaaatttcccttctataatgcaacccatccattaaaatgtgtgtattggtgcaactcataactgtttcggcatctagaagaataccacattttttttaataatttttgaaaataccacatttttttaaaataacccaataattgtgttgctacctaaggcctaattaggctagttaagccctaggtagcaacaaaattgttgggttatttttttaaaaaatgtagtatttgttaaaattactaaaaaatatatgtattttaaaaataattttattttgagaagtttacaataatacacattgtttgcatttaatttacaacaatttactactattactgacgtgtcacgtcggccaaatttgacgcacatgacgttttcctgtttaaattaataaattttatttttttttttttgcatttttagaataacttttcggttactaatagtgctgataagaaaccaattagttaaaaaaattatttttatatcatataatttttagttacctttaaaatttatttgtatctatcttgttaattaattagttatttttaagttatattatggtagattatatttaaaaatacatttaggtaactttaaaaattatttttcgaaactaatgagttatcatgtaatataacaagctactatttttatataccaattattttatttacatttttattattttgaaaacaaattaattatcatataagataatatatttcaattaacaaaattctaaaattaatgttaactaagatttaaaagaattgtaaaacactaatcactatattattaaccaaatgatttctttaatggaaataacgaaaaaatatatgtttcccacgtcttgaaatatttacattaaagagtagatcacaatgatatattttttagctcatccgagtaacgacgtgatcagaaattatttttaaagtttgagaaaagaagacaaataagaaagagagaaagaagaaagggagaaaaggagtaagtttaagagaagggaaggaaaaaaagagatggaaaggtattgatgaaagtattgaaatatacacaaataaataaaaacgttattgatacttgaccaagtcatttttagcaactagattaaaaattaagtcttaagtgtaaagtttctaatttttttttctaaccagtgaagtaccacgtgcttcacactaatacggatgatacattatgttaaattatatttatatttaggtgacatttaatcaaaggtaatgaaatataaaggaaaaaaaaataatttttattctattattttatttaattacattttaaagaattgaaatgtcaatgctattctcattcctattcttactaaatactatcataatatttagtgattttatgagaagatttttttacaaaacttaagacataactaaataatttttggtatatattttgaaaagtataatgtatatattatatttttatggaaaataaacataactctcccttaattttttggatttttgtgtaagattattcaatacaatatattattttgtcaaatatttaaataaatatttaaatattatttgttttgaaagcaaatatttaaatattattagtaaacttataaggtagtatatatatatatatatatttgtctattatagttataataatttgttattaaaataaatttcattcttaactaattaaattttattaatttttaatttccatttgatttcaaccactacttttagaattttactaaataataacactttctaaatttattaaaaattatagtaaagaaatattagaataagctaatatatcatagaccttaatatatttacaagttatattaatttaagggagtatctaattcaatgaagatagaaatctctaaatattattaatcggatgtaatttattaatattgttaggttaaatatattttttaaggggtatatatgtaatttaatgataaaaaatccaaaatattgtgatttttatttaaattatagataaatccttggcctaattaatctaattaatctcaggggattagtctaggccaaattattcttagggttggttggtgctttttgaatgtagttaatagcaatgttaaagagtatttatggtgcgtaacactcttatcatcatgtgtaatatcgctattgatataatttaatatcgggttttacttattttaatttaataaaaatatagagaactgctaaccaattataagacgttatgttatagatatgctaaatactttagttataataaagcacattttaattaaaatccgtttcaaaccaatcaactaaaaaaattgcaactgtatgaaaaaattaaaaaaaaaaatccaatatttttatatataatttggatttataaaaaatatcaaatatggtgcaaataatttaaatcatcccattattaacttcattagaaaaagaatatataaacattaaaaataaccttagccaaaaataaatttcgccaaaataacattaaaataaataaacaaaataacttaaccaaaaatgaacatttttttatatgagaaatgttaaagaacattcatggtgtctatcatttttgtgaggtgtaataccactattgatataacttaatatcagattccacttattttacttcaataaatattataaaaaatcactaactaattataaagcgacactttatcatggtgctagacagtgtaaaatgcctcatagcaataccctttctatatataattagttacaagtgttttttttttttgctaagagttctagtaaaagaaaaaaaaaatcccaagactagatattttttgcaactgcatattttactactcatcattttttttttctcatcaactaatctcattc

SEQ ID NO: 34892 - DNA, 1393 bp, Cannabis sativa
  modified_base (42)..(50): a, c, t, g, unknown or other
tttagttacaagttgtcactaaaaacacatttagtcacaacnnnnnnnnntttttgtgactaatatctttagccacagactttttagtcacaagaatgatgttttataattagtaacaatttttttactcttagtcacaaattttgttgtggctaaaggtaagattttttgtagtgtatacagatatattttatatatctacagtagtatgagctatgcaatgtacttatattataaaacaatatgtaattttgatgaaaagagataagagagggagtgatatgcaacttcatttatttatatttatatggaacttcgaaggaaagtacaagaaaattattatctttttaaacagaaatatcttgactctctgaaatatatatttgttatttataggaaaaatatgacaaaattagactttggtgcgttaacaaatgaatcaattaaatctcgaaattgtacaggaatttgttgtagtagaccaattctttagggatgttatactaaggaggcgtttcgttgggaggaatgaaaaatatagcttggctagtatagctaggcgttttatttgggcttacattaaatttaattagttttattaaaatttggattgattagataactctttgttatgttagtgatcaatagttaatgaacttagtatttatgtgtgtaaaatctaagtgaagcgaagtgtgagtttttctaatcaatttaaacttttgatgagcataccctatccaactagaattaggtagctaacattaatttatctaacattctctatttaagatggtcccaaaagaagatgaaaataagagatggagtgagtagtgtcgagtaatgaaatatagatagacattagtcgttgcaaatcgagacagagacattggaatggccgaaagagaattcgacaagaagtagtactgaccctattcctcgcattttgtaagaaaaaaagagagacaaaatttaagccactacctcttaccctcaaccgttctttaactttattattaccagccatatttgttacataactattttaatttatattttgagttttatatatttaaatataatatttatttttaacacagattaaataggtcaacttatatttttgtcattattattattattatgtacaattatattcaaataagcggtaattatttaaatctgtcattattattttattaaattatatacgtgtataaaatttaaaacgatatttatactacaaatatctctatattaaaatagaataataatattaatagaattataatttaaagtatttaatctgtcgaaaaaaaatatataataattaagtgtataaaataaatagaattctagctcgcaatctattatgtaattttccaataagaaa

SEQ ID NO: 34893 - DNA, 2972 bp, Cannabis sativa
  modified_base (104)..(105): a, c, t, g, unknown or other
  modified_base (2935)..(2939): a, c, t, g, unknown or other
aaactatatgttcaattggaacgcgtgtacatcgatgcgtaatggagactacttgttacaactttcagcaacctacaccaaattggagatggaacaaatttttnntacaatgtgggctatttggactgaacgtaacaaagtggtacatagttgtaaagtaagagttgcaaggatttagctacttttgccactgtttatttagaatttttgagctgctcaacaaaaatttactacttcggctatttctgcaccaacaactacacaccagcaatacaagcttgttgcttctacatctgcaccagcagcttcgcaccagcaatgtacaactactgcatcatcaacaccgtgatctccaccagctccaagcgcccttaaactcaatgttgatgcggttgtcaattcctcaacaagtaccactggtgttggggctgatattagagatgctaacggatatgtagtggttgctttgtcaatatcaattgtaggtaactttaaatcccatgaaatagaagccaaatcactctttcacagtctcaatggggctattcaacaacaaataccaattatgcgaattgagacagatgcactcatggtggcaagtgcattgaaagctcccttaaattcaaattcatctttttcagatttaatggttgatgttatcagggtatgtttcacatgtcaaatgttctgcaaatgaagcggcccatggtcttgctaagtttacattaagggtgaatgagacttgttcttggttggaagttattactccacctatttatactgttattgtaaacgaatcactgtttgtttaataataacaactattttccataaaaaaaaaaaattgtccaattaatatcgaatacacgtgcctttcaaactgttgccgtgtcaaagcgtcctaacttatatttaaaacactggtaggaatcaccgtaagactaacaatggtgaattacaatttattagagttttgcatagatgaatctcaactcttcactgaaaagaggtatatatatatattggtggacccaccatctgactatgtaagtattaagcttagatcaattaaatgtgattcacaatgacactaatgaagacctttaaataattattagtaaccaattaaaattgataggcatttaatggaataataataataagtgaaagatggtgacaaaactaaagtaaaatccaaaaaagaataggaaggagtggggcaccatgctgctgagcatgtggtagggtgtggaatctaatatcaaacgggtccatcggttgaaagattcttttctttttaaatacaatataaattcttctgggtaatagattctagttagtatatattttaaaatttattctaatctatcaatatctatatatttatataacagagagagagggttagttgacttcccaactttcattcagtatgttatttatttaatttttatgaatcattcaaatatatattttcttcttattgattaagttgaaagagaacctaagatgctgagatcatgagagtgacactttgctatatttgaagctgcgtgctttctttttcccctttgaagattaaattgttttctttaatacaaaggaaaattgatgctagttagtgaatgatgatttcattgatttgatgatgaatggtgcctttttgtgcaaaatggaataatacgtgttattccaagtcataagattaaacccgaataaaggtaaaagatgagttcattgaaagaaaaaggcatggctcgaattcaatcaaacacccattttatatataaataatatatctatataaagttagacaatctatagaggatttagaaaaagaagcacattttatatctattttatgagagatgagtggggataatgagtcatgatggtatgaaaccataagaatttatgtaaagggtggtatagagcaatttcctccacatcattagggtttgcctttgatactcattccacctagctcttttgtaatgtttttattaattaacatctatccaataaaattggaaagaaagggaaaaaaaataatgggatgaaactagggcagacataattaatcattttatagattaccaaataagaacccacttattattattattattatgggattgagtatgcttattagttgatagtagatattcgccaaaagtaggtagccaaatttgataaacaacttttgattgaaagtgaattaatttggttcattattttaattattcagcgttgttgtagtatgtttgtattggtagtaacgaatgaacataaagaagagagcagcaaacactttggcccattgttgttgtaattagaatttgggagcaataagaatgtggaaaagttgctttgcatttgcaatgatgcgtcattaaaaaatatctcaagtaataacattgtcaaatttaaaaagttaatattaggacaacatccgactcttgagacaaattgctcagtgagagtacttttcagcctttttcgattaggataagagaggcttcaacaatagttggtttagcgtgacaacaatttcatattgactcttaagaagagcttcaacatcacattttgttagctttaagtgcaactataaaattccttgcttcatgttagtaaactcccaataatttaatcaattgtgaaaatacttttcaactatgctagaaaagggcattttttaagagtataattttataatatataaagatttggattaatatattcctcctaactttgttaaacataatgtttaaaaaagttatatatatttttaattaagtattaagtttcaaattttcttatgaagccataaattaaactatctagagtcgaaaaacaaacaaaaaaaagtcataaaaacaaagtaaatttacataatggctaattaggatttttctccccgaattttgacatnnnnnaaatcatgtcccctgaacttttttagcagttaa

SEQ ID NO: 34894 - DNA, 1510 bp, Cannabis sativa
ttttttttatattcattaatatttatgttgttagaattaattttaaatgtataaccataatggttacattaattttagtcattaaattattattgaatgattaagattaattaagaaactaattgaaaatatttaatatattacctgtcacttgatactaacttatatcttttaattttctaatatttttttccttataaaatactattattcatattctcagatgactaatacgtgatagtcacgggagagtaccactctcgactatccgtgattagtatatgattttcacttaatgacactacggaggctattatattacggaagctaattaaaggtccccaacactggcgaatagggatagggctccatgactccaattattcatccgcaattggggaggatcagagtcacccggagctacaagtattccagaaaggtagtatgtcagtgtgatccgggaaggccttggctcgatgatctcgaagcttatttaacaatatcttattcaaagctcaaagcgacagttacttatcctctaacatcgaatcagatcttatcccctacggaagaccatgatagtgtgcgtacgtgcctctaaagcctcctttttgtccaatgacttttctaaaaaacaacttttcaaggtaaaacctttgaatgatgtgttttcctgtccatacgagatccttcactgcagtcgtacaccacacgatgggaaagtttcctaccagccaacggttagatcgtcatgttatagtgacagtccttgtagcatgctaagtaccaaatcctaggtgggtaaagagaatacccttgcccacatttaagcctataaattcccttatttttcatgtataaagggtgagaaaattggtattagccgaacccctgctgaaattcctacaagtttttttctttcatcaagagaaacgagatggagtacagagctagggtttatattataaacacttgtattatccaaacacttacccaaagggccaacacaactgactcatggactacggatcattaacgcccaaactacgtaaacattatttgtcaattatttactattttcttcttttcttaagctctaatttattaatttctgaaaatttcggcaaacaaatactaactaagcttaattttttttttgaaaaaataatgttaattataataattaactaatttttgcaattagttatcaaacaaatttttttagcaattaatttttccttaaaacttcttaattatttaaaattattacatatatgaccataactgaataagttgacgacaataatcccatacattaataattattttcaaatgaactaatttagcttactaatcacatatattaatatattattaggctactacttaaataatttattttttatttaaaaaagtattttaaaataaatttaatatattaagaaaaaaatataataattttgaataaaaaaagtttaaatcaatgtttttttgaataaaaatcataaga

SEQ ID NO: 34895 - DNA, 1313 bp, Cannabis sativa
  modified_base (1285)..(1286): a, c, t, g, unknown or other
aattaattatacaaatataataaaatctttgtgataaaattattatacctatttaattaattatttacacgttatgtctataaaagtaatttttttaattaatatataattttatataattaaagatcgatgttgtggctactccttaattatataaaattatatttgtacaaagacaatatgtattatgctctacctaaaagtaattccgttataaccacaatagacaattactgagatatctgctcctagtttggtcatccgaaaattattaaaaaccgttctagatatgagtttttatcccaattttatactttcttatgttaaaccataaaaattacttacgttttattcatattttatttattttatcagcgtttaatgactattttataaaattttatgaaaattaatgtgctaaataaaatattcaacttatctttttgaatattttctaaatatatatctagtactatttatgaaatttatgtatagcattagaatcatacaataataaattttctaaagtaaatataaaataatacaattattgtgtgataattaattcaatgtaaatttctcaatatgtaattaatgacatatttctcaaaattattaatttagagaataaatcacttaaatttggtaataaaaatttaattgtataattataaaattaacacaattattacatgcctaaataaatcatgtaataaattaccaaatcaaaaactttttcatatttaatttatactaaataacatataaaattctaattatatgtattaaataaagaatagaaaaaatgaaaaaaaaaaatgtaatctattgactaaattaatacaaataagaaaaataattaatattctaaataaattaatttcataaaaaaaaaaaaaattggattttttttttaaaataggctgcccaaaaacgacacgttgtttttctctatggcagaaaaatgacacgccattttttaaccacaaaaatcacagcaaatcaaaggaaacaacgtgtcattttccttctatataaaatgcggaattaaacaaacatatatatgatataactaaaggattgaaatatcttcagccattgaatctttgagtttcaatcctacacaagctttgaatctataaaagaaaaagaaactgattagtgtgggttatgaggcttctaagctctctctactctctttagataaatttattatgtttacagaatgagtattgtaaccccctaaataattaggcacgctacccaaaaatacttatgaaacccnnatcccctaatcgggattactaatcaaa

SEQ ID NO: 34896 - DNA, 1171 bp, Cannabis sativa
  modified_base (566)..(568): a, c, t, g, unknown or other
aaatccaacatatataattaaagatagaaagaaagaaacaatgaaatttgaaggttggcttaaatgccagtaaggcatatcaaaattggctggcatatcacagtctacgaaagtaatttcgtactggtcgggtatcgggttacaacccgactaaataaatgcattgttttaaaacccaaacccgacacccgtgctgtgtattttcgggttagacccgacccgaccacacgggtttcaaaatttttggcttttttcggtagcgggtcggggcgggtggtcgggttttcagatttgcgggtataaatgttcagccctagcatatagatggacctactgacttgacaggttaagtgaatttaatcccaacaattctacttgattagactcacttaatctctgatccaaaagaaatgagtgaggacattaaatgtcctgaatgctcaacaagtttagacagtgcctaaacttgtctctagttacactttcagtgaaaatatctgtaagattatcatgtgtgcttattttcttcacttgcaccttcttggatgacacaatatcccttatgnnntgtaacttgatatcaatgtgctttgacctctcataaaacattggatttttcatgagatgcaaaacactttgattgtcacaataaattgtgatatactcaaatttgaaacctaactactctgtcaaccccttaagccatataacttctttgatggctttttgtaccaaccatgtattcagcttttgttgaagacaaggctactaccttctataggttagatatccagctgatgaagccctcaagagcagtgaacaaaaaccttgttaggctctttctagtgtctaggtttgctgcaaaatctgagtccacaaaatcaatgatttcttccttgagttggttctccttactgaacataataccagtgtccagagtacctttcaggtacctcattgtccatttcagtgtttctcaatgttcagggccagggtctgctgactacattcatggcatgagctaagtcaggtctagaacacaccataaagtacatgagactcccaacacaattttcatagagaacattgctcatcttggctctttctacatctgtttttggtgactgagatgcatacaacttgaagtgttgagcaagtggtgttgcaactg

SEQ ID NO: 34897 - DNA, 2190 bp, Cannabis sativa
gtacactgtgatcggatgggtgtatataatcaattattttatctatttttttattaggcatgtttaaaatttttagggtcgttcaattacagctgttatgttatcaaaaatttagtagaatccggatcaattttgatatatattatatatatatgttaatgaattgaaatgttaatataattttaaaacagaatacaagaaattataggggtatcaaatgtatttcttggggtgtggccatgaatttcactagaaaattgtccaagacaacctaaaaactaagaatgtgatttttatgtaatgaaatacaagagggatttcatcgcacgtgcaaaccccaaccgttatataaacgatcaaaaaactataattttaatttttaattatcttatttattatattaacaaataataataataaatatatatactaatataaatatttacttctctttatagtttgggagaaagaagatatacgatgcaaaaattgaattgttaccgttacatcgacaatggatagaacgattgctggcggtgattcacaaaaacttggactatatgctgaaatgtctaagaatttttctactctagcttacttttttagattaacttgtatttttcagatgtttaattagatatattaacttgttaacattttaaaatatttttctaatataattgtaatttttttagcttctatacgattaatttaagtatattggctagtcatgaaatttatttaataatatttaatttagctttcagaaaaataaatatttaatttcattcaaataatatttattttaaattcataaatgtataatttaaataaattagacttttgaattaataataggtcttaaattagaaaactaaattaattttgaatgatatggcatcggttttttagcatttgttgttgattttatatacactatggcgtcaattatatactattaatcaattttatagtatacatatgacatcagttatttttaaaaaatcgatgtcatagtgtacactacggtgtcgattatgttagatcctataagattgccttgatcagcgtcgatagcaacttttgccaaaactgacgctaagagaccttaaaaactgcctctaaagcttagatttgtagtagtgtcatctaaaccggcaaatcacaatttaaatttgaaccacaactatccaaaccattatacatcataaaccaaaagaccgttttaggtggctcggttaatctaaatcgttccttactgcatggtttggttgtgtttcataaaaaaacgaaattgcatgatttcgttaaaaaagaaaaaattaatgtatttttaattagataactatatacacaaaaaaaaaaaaaaagtacttaaaaatagctcctattaatattctttatatcaattaaattcttataaaatcaaataaatttagtatataactgagtgattatagttgtctttttttttttttttttaattttagagtgattataggtgcgcgctgtttaaaagtatggcacaaatacttataaaacaattaaagtcacaatataaacaattatttatttgttcctggaagttgatatataaagaagagatttaatatagattcgattttattattacaaatttcgtaatagtttggaaaagacatcataggaaaatataatttgaaaaggagaggacaggattaaaaggtacgtaaaagcaatgatcattgtgtatgtgaatctcattgaatctatcgcgatgtgagtccaacaaggaaggttcgatgcaacttccttcaccttcactcatcttcctttcttctataatatgtatacgtaaacatgtatatataactacgtacaattgttcttattaaacaaaacaacgtacaattttccaaaagagtctctaaaaatacagttatatttatttaagaccgtagtgtagatagtactgctgtaatacattgataaatattcacgtgatgtttcattttttattcttttctgttctaaacatgtatttcttacctaagcacttgcacacgcgtaaatcatgttttccattgttttaatggacccacgttttattccaataatgatagtcactagtggaaattttgcaacatccagttagtaaaattaagtcattttattttgagtattactattatataggggtgccttgtaaac

SEQ ID NO: 34898 - DNA, 1281 bp, Cannabis sativa
  modified_base (1019)..(1024): a, c, t, g, unknown or other
acagtgagcagacaaatcagccctgagtctctcaattttctggtaaaatcctttctaaaaactcttgttggattctcgacactggtgctactcaccacgtgtgtcatagtctttgttttttcaaaatacttatgctaattctaagttttcttgtgtcaatctgcctaatggtaacactgtaaaagttctttgcttaggaactattgtcatatcacctaatcttgttcttaaagatgttttgtatgtccctgattttcatcttaatttgttatgtcttcactttttatcctgattattgtgttatttagggcagcttgaagacacatcatattgggatggctaggagacttgggaagttgttttaccttgaggagcctgctgtgaaaatcaaccccaatgtcttttctttaatttctgattccaatatagacaatgacactatttggcattttagattggggcatccctcttgtgtaaaaactcattctttaaataaagatttacaatttcaaggtcaatcttgttccaatttttattgtcctatttgtcattatgctaaacaaagaaagctcccttttgtttctaatcacaacattgctaaagattgttttgatcttatacacatagacatttggagaccttttaacactttgattgttgtgggggcaatttatcaccattgttgatgaccattctaggtacacttgggttcatttcattaaaaataaggctgaggcacaaactgctattcctaattttattcagctcattaaaactcaatatggaaaaaccattaaagttgtgaggtctgataatgctaaggaattacaatttgttgaactcttttgtaaagtcattttttggcaagttagatgccaaaatattttttcttttatggtaagattgatttgcattcatacccgattatcttaccttatttattcgaattttattgctcttttctatgttaggaaagaagcatttttcagctgagtttttcttgtatggaaacttcttgnnnnnnaagcaattctcttatggaaagttagtttttaaaggaaactttgatctttatcactttccttgttaagttcgattttgtcttgattatatcagatcatattcgctgtttatagcaggtatcaagacccaatacaaaattgaacctatttatagtaagtttcctatactggtctgatttgctgcgtcagattccgattctgatgctgcagattgagtttttcttaagaaagttttgtacaactgtagattcgatcttgt

SEQ ID NO: 34899 - DNA, 1000 bp, Cannabis sativa
gcagttaaagagtagagatagtctattgatttggctcacttaatttgactgattattatttttattttattattttaaaattaattattcctttttaatttttttataaagaaataattataatataataataataattttatttattcttttttataattttatttattcttttttttcgttcaacagattcttttttttcgttcaacagatgcccccctcaagcaagtgcgtgtcatttatgtacacgtgtcttgtttgagaattttgtatttgattttttctgacttgcttttttttttgtgcagtatgtctaattttgagggacttggctctcaacgagctccaaataatttaggaagagaaatagaaattggaccatcttatcgacgctccattttattgactgaagttaaagcattcagtgatcatcaagaccctatttctttatgtaaggttgaagatgtaaattcgggtgacttacaatatcattcttcacttgatgataatgttgtctagcacacccgaggctttggtgccaatttccaggctaaagttcttgggaatattgacaataaaagggatgttgatatagtttaccaagtaaatgtggacttttatccaagccttcatcgtgttttagcagagaaaaaggccaataacaattttttctttcatggacatactgtatttgtgacatatcttatcgaatggacatacattattttgcgtacaaatcaagatactttgaatcgggttggaatttatggagctgtttatatatcaagatatccattcaactatgagagatctgtatggcgagctttttttgaactttgggatcctctctctaacacatttcatcatagcagcggtgagatgggaatgtatctgtaggacttgaaggttattggagggtttcctattttaggaattccttatgaagagttcatacctcctaaaaaaaaattggttggtggcactccatatcattctacta

SEQ ID NO: 34900 - DNA, 1787 bp, Cannabis sativa
  modified_base (39)..(61): a, c, t, g, unknown or other
attaattttttttatataatttgataataataataatannnnnnnnnnnnnnnnnnnnnnnaataataataataatatgtatttaggtaagggtgcgtttgataacacttttttaatcatttttttgttgttaaaattagaaaagtgaaaatatttttcaaaatatgttctatgaaactgttattgctttttaattttttaatttagaatcaaaattttaaaaattttgaaaacaaaaaaacaaatcacttttaaatttttttaatcaatattttagactccgatcccaacctaaactttggaactcggactcggaccatggcccatgaccctaaacctagacttgcccccgatcccgacctcaaacccgacttaataaaattaataaaataaaaataaaatttactaaacagtatttttgttttttatttttaaaattaaaaaacaaaaatagctatataatatatatagaagggcttttttcacttatacttttataactcactttttattcatttatacgctcatgtcaaatttaattcataaatacatttcttttgcaattataggcttattcctctactgccgcccctcacttttgcgtcaacctctaatctttctttcttccaacaacgaaatttaatttagaaagggccacaacaaaagctccaagatttatatataaagagagtaaggacacgtgtaatgttgtaagggcaaagaagctttgggagaagagaagacttttgggtcaaactttagtctttccttcttcccctcaatcccttctataatatcacttatcctattcctattatctatgctaagagaccattttacccaaatatcaaaaacaaataaaaataattaagatattggaaagaatttaattttgaaaatagaaacaatataatctccaaaatagaaactatagtttctaaaacggaaacaattatcatttatgttaaatgaaaacaactagtatttaatctcaaaatagaaattatagtttatgaaatgaaaacaactagcatttaacctaaaaaaatagaaacaatttaatcacgaaatagaaactatattttgtaaaatagaaacaactagcatttaacctcatatatgtgaaatgaaaacaactattataaaaaaaaatagagacaactcattttgaaaataaaaaaaaaaaattaacttgaaaaatggaaacaatttaatctcaaaaaacggaaaccatataacctcgaaatagaaacaactagcatttagcaccatatatatgaaataaaaataaatataataaaaaatagaaacaatttaatatcgaaatgaaaacaactagcatttaacatcgtatatttgaaattaaaacaaatatcataaaaaataaaaaaaaaaaaaaaaacaacttacattgaaattggaaagaatttaacctcgaaaatagaaacaatttaacctcaaaaataaaaataatttaacctggaaataaaaactataatttgtgaaataaaaacaattagcatttaacttcatatatgttaaatagaaaaagaagaaatatatcataaaaaaatagaaacaattaacattaaaattgaacaatataacctcaaaatagaaactatagtttctgaaatggaaacaactagcatttaactttatttatgtaaaatgaaaacaactagcatttcacctcgaaaagtaaaaatgatttagcatcaaaatagaaactatagcttgtaaaatggaaatgatttaacattaaaaagggaaacaatttaatctcg

SEQ ID NO: 34901 - DNA, 1191 bp, Cannabis sativa
  modified_base (27)..(28): a, c, t, g, unknown or other
  modified_base (253)..(258): a, c, t, g, unknown or other
ataactaattgggcaagattaaatttnncaatcacccacataaaaactaaataatattaactttgaaacaaatcaaagcaaaataatagtgatttaaaaatacaaaaatatatttgtatttatattaaaaaataataactaattttgcaagattaaatttatcaattaccaagataaatcaaaacaaaagaatagtaatatatataatgtaaaactataccacccacaatgatttttaaaccatgtgggactnnnnnnacatgactctcatattaccaaaagtataaaaaaaaatattgaaaaatatgaaaaaatgagaaaaaaaaaagaaaatcaaagaaaactcacatagagtgcgacatcatctctttttaaaccttcctttatatatatgtatatatttatatatatatatatattgatatgcgaaatggatcttttatgtaattttgtatttaaaatatacatactctacaagtccatgttattttattatgttctttagttacacatataatttggcagaattttctctaagttgaaaataggccttttacaatgtgatcactaccattaataggagtgggatagcacttatttttgagctaatgtgtacaacgatcatgaaatatggacattcctcacgttatatattttatctaattggcaagaaatagcatgtaaacatctcccttttgaataagataactatctttttttacttggtctttgtgtctgtgacatatggttgtcgaggcacttgattgttttgctgatggattcttggaaaatacatctatccttggaggtaaggctcaaataacataatccttcgaagatatactcatattattcctgagatgatgaacatgattaagcctaaacaaattaagcatctcaacgtgaataatgtcgataccaagaatattcctaaaattccttgacaaacttcgcatccttaggaatatgttcagtctctttgcttttaaagttgtaactatgagtttactttgagaagagcatgcatgagcttcatattttgaggagactatcatgctttgattattaaatttgtcgagttaatttattctttttgttgtacacgtgtcatgcaaccagacctattattttctgctcgaaataaagggatagcagtaatagatttaggttaactaataataataataataa

SEQ ID NO: 34902 - DNA, 1077 bp, Cannabis sativa
ttccatatatatatatatagattttgattagtatataaatattttttaaggattttttttttcattacaaatacattaatgcttttcgaaaaaaaaatacattattagaaaaaataatatatccctaaaaaaataatgtatttttttataaaaaaaattatttataaaaaaatatatcaagggttcgtttggtacgccgtattacatcatattgtattatatagtattatgttgaattgtatttcatgcaatatttttatgtaaaactatacgtggtattgacttttatgtgcaactaaatatataatatttcagtataaattaaaatttaacataatattatataaaaaaatatgatatacaatacaatacaatacaacttaataaacgtaccaaacgagccctaaaatgctagtcattcttttttgtaaatgactatttaatttttatttgttgataaggtgttagttaaatgccacatgctcaatacgtgcttcccaagaaatttatatctcttctatttttttttcttaggaaagataaaattaataaaccatttttctaacttatatgatgtacatggtattttacaataaatagtttaaatttttaaaaattaacataattaatgtctaataaaatatcactctcttatgagaacaaactaagtgttcctattataaaaattttctgtatatgtaaaaaattatatagatttatttatactggtagaataataaatataatattaaagaatgattttaaataattataacatatattatcattaaaaaaattaaattaaaaaactgtcataaatgcggaaacataaaaaaaaaatgtaatcataacttctaggtgtactattgaattagagaaatgttaaagggcactcccagttgtaacatctttggttaaacggaagataataacagatgccacctgctctgtttgtaaacaagcgtggcaattggttggacatgctctttttagttgtaagtatgctcgtgcagtttggaggcactctggaatgttgtttgattggcgtctttcttctgcaatgtacaaaggtgatta

SEQ ID NO: 34903 - DNA, 5465 bp, Cannabis sativa
aatgctcacatcgatgaaaaagtaatttcacattggcggtggcttacgtggatggtttggtagatatatatgaatatttatatattctctttcttaataaaaatctcaaatgttgtcaccaaacaaatttacataaaaaaaaacgatgcgtaggaaaaaagtgtgtttcttttttctgtgacccaatgaggagggaccttttattttgccatcttcagttaattaaccatggaaaaatggagttaatgttctggttaattaaggactaaggaggagttgaggacccataatacatccacatgggagctttaatgggtcaagaagctcaagccttttggtcgttattttcctctcacatgactcatcatgaccaagtacgtgacccactacattaacatggtgtcggaccacaatctttatccagtaatccatattagtcaagtaaacttgataagtattactgtattagaaaagaagaagaaaatagaaaaaaaaaatatatacatgtttattttttacatatttaatcaaataagccaacgtgttgtatctaattatgaacacttccgtgtaatttttttgaaaagaaatctttaattaacatgtgttttggagcagcaagttgatttaaaaactgtaataagagactactcctttacatatttaatcaaataagcctcgtacaaaatccagatcaattcaactctacacaaaagacaaatgatcagaagcattgtttaatgataagcattttgttccaaaaaactgtctcaatcaaactgtgatattctttccatgaataagaaaaaatatatttttttgcagcccaattaattgtgtactttttttaggagaactcatgaacttttcgaagctctttctttttttttttttaaaaaaaaaatattaatatatatagtagctttgttcgaatttcacataattacaaaacttattactgggaccacattatataatgttgacatgattttaggttgctcattaaaattgatcttcactaacaaaaatggtgatgctctagacatctctttattttgagctaaacactgtcaatgaggatagcaagtaaagggacagtattatagttgtgctttttgtggctgattggaatatatgttttgttttttggaattcatggtgattttaatgtaattgtgagtgattatacaaatgtaataattttgatattttaaattaaatttattagtactaatacttgaatttaatcaattacaaaatgcagccaaatagtggcctaaagcgatattcttcattttaatccatgaatgattttgtaaattaacaaagggttgtacgtgttcaatgtttcttcttcacattaaaaatgggaatatatcttaatttcttcttattttttttttcatatatatattatttatataaaatactaaagaggtgtatatatatattgatattactaggttgatgatgttacatataattagttttttttttttatatatataatttttgaaatatagtttgagattttcatctatggtaaaaaatatataagtagtgatttgttaaatataaatatcacaaaattaatcgaacacaagaataaacgttttcaaagaaagaatgacattatatttcaaagagagcaagagatgagcacaataaaagaaatatatattataatttatatatatatttatatagaatgctatcatgcttcacagcgcatagtaacactatgcaccaaattcattcaaccaataaaaaacttaaaaagaaaatagcgctctcacttaaaaatatttctatatatacagataaaaattaatatgaaattccacatttatctttatggttaaatctatataaacaaaaaactgagaaactatatttgtttatctttgactgttacagctactttgtaataaatttggccatgtatacaattacaaacaattaaattttctttgttgagacagatttttttacacaatctacaataccttcacaatctgcttgaggtagtacacaattaccttcatcttcgaattcatcttctgggtatgaatgaggcgaccggaggttaccgtgagtttggcaggctttcatggtcttgcaatgttcagcttcatcatctcttatgttgagaaatacatcatatagattctctgaaaaaatggagaagaattgaaatgagataagtcaaggagcataattttattgttaaaaatatgttaacagaatgcactggagatcattaatcatgttaggaaaaccgctaacaaatatacttccacaagtttgcatacttacctatagttggtcttcgagagttgggtggtctagaagtttgaaattcatctggataaaaagggaaagccagtgttactgtgctgttacacataggaatgtccacaagataaccatagataaaatgagaacattaccaaataaatacaaatcgtctccagtgtagtacttcacagcaatctcgggtgcaggcaactttttcaactcatctagaacaggaaatagagcagaacaatataaatgaagttgcattatgaggtatgaggtagcacatattacagccaataagtagatggagatcattatagtaaccaaaacaaggatacaaccatctttttacactagagatgcaaacacgacattgaatatgattgaccagcgtcccaatcgcattcaaaggagatgggtaagtcatgtcataccatctcattattcagacaaatcatactattaggcggtatgattacataaggtaatttctaattctttttttcttattgttaagcaaggtaatttctgtgctttatcctacatgaagatttatgtggaagttcaacaggggatagaactcgtacctccttcagccttgatgaatttgtcataggttgaaaatgcatggctctctacgcattcagaaaaatgatctgcaatcatgatgaaacctatacgttagacaaatgatctaaacattcagcccataccccaacaaactacaaaaacgctttcagacattcttaaggagcaatctaaaaggaaagcctgaactcgaatgtttgaaataaattaagcccaaattaatcgataaagatgtgaccagcagatacagctgcacatacttcttaattcataattcataattagtcaggattggaaagataactaagccactgtttttctacaatagcatttacacattcatcatgatgattttattacttaatttggttttaaaataatgggaagttctcacataagataatcaaactaattagttgccaagagacaaaattcataacagaggcggtgactacatatgctcatacttacatgccattcttgggcttactatatacataaagactgtcataaaatagtaaaaaaccgcaatatgttgagcaagaaagcgatcgaaccacagagaacttcccccgagttcctgcaaggtgcacaaggaattgcaatattatgtaaaggccttcatcatgtgttatgtggaaggaatatcaaattttcattaatgcaaacttctacaatgtggtgaaaaatgtatgaaaaagttaacttccttccccaaaaacagaagtagaaaagaaggtgatgctttctgaaggagatacatttattagtatctatgtgtgagagagatcttgcaggagaaattgtctaattgtgtttgaaaacctaaagtggcgtgcaatatcaatattgctagaatctaaggaagatattacctccatgataagcaagtggtgcatctcattccagctctcagcaaaatgtactttcaaataatctgctcttctccaccaaccaaacgtctcgtacaagtgtagaacagacataaaagctgtcacaatttacgagtcagaactaactataacaataatcataatccaaaattcagctacacaatctttctaccattgcaatcaagatcaaacaaggacacagaacaaataaagtaaatgataataaccagtgataaaatgagaaagaacattataattccctattatatttagttctaacgagtaagtttcagacaattaaacgcattatcatgtgcatttggagtaacactgcatttgtttaacaagctaggatgagcagacatatagacaagtatggacccccactataacttagctttcctagtcgcaagcaaataactatactgtttaatctgaaagtagattcagtgataaataactgaagaaatggatacagagcaaattttacaactcaccaaagtaagggactctggcaatagtttctaaaacgaagaacctggcataatttctgtcatgatacaaggtgtcaagtatctttatcaccgagtcctggaattatcatgaaaagaagaacaaaactacattgtaacatagtaacattacagaggcaagtagctcctttgaacccaaaaaatcataataaacaaactgaaggggacaaaaaagtccaaagggaagaagatttaccgtcagcaatacgttaacggattgctcaaacttgatgacccaactctccaaagtactggaagatgtgctctctggtggttctccactgctttccttcagctcatccttggatgaagttttggtctgaaaggattcttccactaccactttgtcctcattatcttgcaaaagggtagcgtggactctatataatttcctatacaagaaaaaaaatcaagttaaaaaaccacataaagtcccaattaatagacccattcaaaaagataagcttgtatgatcataggctcatagctcaagtttacaaagctgaaacaaccacttttctactctatatattagtagatagccgtaacattatcataacagaagaaaaaacatctcaaatcacaaggcataaacttgaaaaaccatcatctcagactgagtttttgatatttccctaagtggatggaattccaatgaaatatctttccggatgttatataagtgaatttagttttcccaaacgacaatcagaattggagaaacagacaatacttacctagtaagagatggaggagcagaacgagaattgtaaccaatagggcagaaggagaaggaagaagaagcggaattgacagtatatttccttagtttcagagatgaagaagatgagcgagaggccgttataggaaagactggagaagacaaaggggccgccattatcgacagtgaagctgtaaaatacggttcaactagaaatgaaaacaaagataagagaatcaataacaagaacaagcgccatatcaacttcaagcacggcgattacaaagaagtagtgtcaaaattacatttgggtttgacaagaaaattgatctaacttcatattttgtttgcaattgcagccaatgtcatcttgtcgttttgttagcctgcttgtattcaacggatattccttttctgtttccgtgtcca

SEQ ID NO: 34904 - DNA, 1775 bp, Cannabis sativa
cattaatggctagacggttcaattatgttatcagagcactttcctctgcttagtgctaacatggctactcttggcaataacacaacagcaagcttaggccctgcgataatggttctcaagccaatcacactaaagatattcagatgcaagaaccggtctacttcaatcacaacatctcaattcgtttgaatgaccataatttccttctatggaagcagcaagtcctagctgaaattaaaggaaatcggctgctcaagttcatcaaagaaccacctccaaccgagttcttgacaaataaagatcgtgaccagaatagagtgaatcaggctttcatcgactgaaagattaaggatcagcttcttgtttcatggttgctatcctctatgacagaaagcctcctcacaagaatggttggatgtgacacttctcgacagatttggaccacattggaaaaacactttacactacaagttttatcaaagattctcaaattttgcacgaagttgcagaatttgaagaaagggaccttaaatctcaatgattatctgctgaaggtgaaacagattgtggatctccttgcatctgtaggagaaaagctcagtgaccgtgatcatgttgctacaatttataaagggctgccaagcgaatatgacacttttgtcatatcatcgaacactcggatagaaaattacacagtaggggagattgaagctttattgctggcttcagaatcaagaattgagaaatccagcaaggaaatggaaccgagtgcaaacctggttacaaatgatcaagattcgataatggaagctaatctggcctttaggaggtttaagcaacaacaggttggtcgggggaattttcagtttagcaatcctacaggtcagtttggtaatagaaactttaatcgtagcagtgattatggttctggttcaggccaaaactttggaaacagaggtaatgcttttgtcaatagaggtggtaaatctggagttaacatgaatctgaatgttaacaggagagttcaatgccagctatgcttgcgttttggtcacactgcctatgattgtttctataggtttgataaatccttcttaggaccacagtcgggtactagaaccagaagtggatcaactcagcaaaaccagcagtggaaccagcaacctcagactaatcttgccaccaccagcaacacttaaggaagcccttcaacaagaacattggaataatgcaatgggtgatgaaattctggctcttgccaaaaacaaaacatgggttcttgtgacgtttcctgaagggagacaagctattggatgcaaatgggtttataaaatcaaggagaatgttgatggaagtgttctaaagcataaggcaagacttgtggcaaaaggattccatcaacaagcaggatttgactttacagagacttttagtcctgttgtgaaaccggttacaatatgggtgcttctcactttagctttaatgcaaggttggagtgtaaggcaacttgatgtgaataatgcctttctaaatggagagctgcaaaaggaggtatacatgactcaaccacctggatttgaagttcctggtcaagaacacttggtgtgcaagttgaacaaagctttatatggcctttagcaagctcctagggcatggtttgacaagcttcaacagtgcttgttgtcctttgggtttgtttcctcaaaatttgatcattccttgtttattaatcactctagtcactctactacacttgtgcttgtgtatgtagatga

SEQ ID NO: 34905 - DNA, 1649 bp, Cannabis sativa
ctatgtggtgcaggtaaaggcaaagaaaagctagatcaaccatgaggtggcagtcttctcctgctatgtacatattgacctcatcggcgtgcgtgccgagttgctaggagttgttttgtgctggctgtatctgctgtgtattttgattttgtgtttaaattattgtcgtatatattaagttttgagatataacattggagaacgaacgacgagcgaaacccttttctttctccttcaataaatttttctcttgttctatccattttctttgattttcaacctcaaacctagcgatctaagatctggtagtagcgggataccaaatccttaaagcaggaaagcttagggtatggtttaattatattttaagctaaaaacgattagtttcatataggggttttgtgaattagaatagttatggaggttctgacttcgtggaattgttctttgatacatatgggattggtatcgatgtttacttggttaatttgaagtgattttgagttagaaatcgagtttgtaactttttaaagcttagtccgaacgttaatggtatttttcatttaagggctcgattttaatttctatttcacaaggatggtaatatttatggtatataagggccctgtgaagtttggagtgattttgataagtttaggtagtgtttcagtgagtgtgaaaattgagatttttgagttttatagtttttagaaattcctaagagatcaaaatcgttttcttgtcataacttttgacatgggtgtccgttttaaacattctatatatcgtttcgaagcttttgatgagctctaaaatatggtgtatgttttagagccaaaatataagttttatttcagtttatttataccatggagtctggtagaaaatcctaaattgtcttatatgaatattaagcagtgttttaggataaacactttattggtttatcgttgttgtgacatagggccgagatcattggggatcgttctccacttgggttggccaaaatgtatgaacttggattaaaggtaagaaaagtatattgtactgcatagaacgttgtctgtaatacaattagtattgttataaatgtattaatattgagatatagttaatattgttatataatgaaaaggctaatcagtagtaatgataatgtgataatattacccatgtgatatataggctcacctgattaggtgatgcaattttcctggcgacgtactgggcgtaagtacgggagtcagtgatatatgatgagtgccacgtataggtacgacctcaccctattaggtaatgcgattttcctggagacgtactgggcgtaagtaggggcatcagtgatatatgatgagtaccaagtgtaggtatgggcccacctgattaggtgatgcgattttcctggcgacgtactaggcgtaagtaccggtgtcagtgatatatgatgagtaccgagtgtaggtacgggctcaccttatcaggtgatgcaattttcctggcgacgtactaggcataagtacaagcgtcaatgacatatgataagcaccgggcgtaggtacaagctcgatatattggtgccagattgtggcacgggctcacctgattaggtgatgcaattgtatgatatatgggtgcaggtttttgggcat

SEQ ID NO: 34906 - DNA, 1104 bp, Cannabis sativa
ttaaacttccctatttaacttattttgttggttttattagtattgaagataaaataattcaaaaagcactacaaattaaagaaatttaatgtgtagagctcaagattgtctccaatagtgcacattaacctagcactttattaaaaaggaaaaaaaagaattaatgagtaataataaactttataactttaattgtttataaggaacaaaacataatggaatttttctcctcaatttggtgcaacattaactaaagttagtagcaaaaatactttttgaaatcctttttcttaggctaataccttaataatgctccaattaaatacctattattggagacaaggttgtttctactttattctatttgataattttctctcaaattgtaactttgattttattttccttttgaaatttattgcatattataagtaatttcaacataatatgttaatgatctttaattcactagatacatctattggaaaaagagtgtcacatttctattacgaagagagggataagaagtaagtacaatattacaccacacaatcattttcactataggagaccaacaattccataaggaaagggtacaaacaaattgctacctatatttatataggagaaattcactagaaatgtttagtactactacattatattatatttttattagtacaatttaattatcaaatttatatatgctacataataactattataaaacattactaattatgtacaagacactacttaattgtagcactaaaaactattataaaactccttaccagtaagcttatagttataactagggtgtcatatttacactcgaaaattcactcactcggtaaactcactcaacttgaaatcgaaaaaaattggtttaaaaattatagactgagttcaagttatacccaataattacccaccaggtcaggttcaagtttcattaatttaacactaaaaaaactaggttatacttgaatccacttgaaattcaaatatatataatacttttttacatgaaaaatccattttacacaatttattacaaaattactcacacacgcctatgactacatttttacttacaaagtt

SEQ ID NO: 34907 - DNA, 1198 bp, Cannabis sativa
ttgcacatattttgtaattaattaaaataatgtatacaaaattataaaatgctcttttatatacctaaaatagggtcgggcgagttgggagtaatactacccatcccatatttaacccaaatatatatactttctaaacatctcatataattttttacttattatttattacatattaaaattaattgctataaatacaagattgactactattttgcctaatttattattgtaataaaagctttttaatatataatatatatatgaactactgtctatatcaaatatcaattttgatttcatatcttatggttttcttgttttcttttttttgggcaaaatttggttactttaaatttattatttttttttttatattttgactatcattatattattttctttttattattgttttaattttaatgggtacccaattaatgtgtccccatacctaatgggaattaagcggggcggggatggggggcataaataggaaatagggacggggttgggaggtatattatctgctcactacccacccaatatatttaccctatatatctataaatggacttttttcagttttaaccaaaaaagataacaatattacaaaaatacttctagctggctaaataaacgaatatacagtccaaataaaaaaaaaattacacaaataccttttacacataccttcaacccataatctatgcttcctaggcaaccatcgggcaaccacgcaacaacccaatgcaaccgaaacgaagatctaatcagaaaaagaactaccattaacttcgaccagcttaccttagaagacgaccagaattaatcaaaacattggttgtttcgaattcatgaaaaagaaaagtgcagaaaaactactacgaaactaaaattcaacaagaaatttagtttaatttgcataaaactaatgtcctaacttcaatttttcagatccatgaaatgcagatttcaaaaagctgaactgaagttcccaaacaatccaactcaagtataataaaaaaaaattacatcaatactatagtaaaataaatatcctggtgtatttttgttgttttctaaattaactaatggtgaatttgttcatagtaaatcacgaagatacatgtagatatagttacatacgtggaaacgctgttctgatttttactgttttataatagttgcattacag

SEQ ID NO: 34908 - DNA, 1210 bp, Cannabis sativa
gttttgacccctatttggtccccgcccccactcgatgtggtcaagatcaactgtgatgttaaagttggaggcgacactatatgcattgtggctttagctagggaccacaacgaatctgttttgtgggtggctacaaacaagctcaacttttctgatcctctcattggtgaagttgcagcttgtctgttagccgtggagacgactgtctttttgcatcatccttttgttctagtgaagagcgattctgagacagttatcaagattctgaatggcacttgttccagctgggggattgacaactatgtgcggcattgtaaaaacttctctactaatttgttacgttgtaatttttcttttattcctagagtatataattttactatatataatgtggccaagtgagcttttgctaatagtgtaaccgatatgattgagctatcttctatactagacaatatcttttataacgaccatgaggtctgattttggttttaatctacaaacgccttcttaaaaaacaaacaaaccatgtaattagatttccttgccgtattcagcaacttaattagttgaacaaaattatttgatgaatttacaattctttctttgaacaagtctaataattttactttattagtgcataaagtagacagtagatttgtttttataggagaaaggcattgagatttgagacttgagagaaagaatagaaaaataataaattattttataataaatcctacacatattatataaatgttataattcttggtacaaagagtacataagtgatgaatgtggtctcccaacaatggatattgaaaatgaaagtaaatagtaattaaagataacaaacaaacacataacaattaattaattaaaatggatcaaatagaagaaaagaatgatatggtgactgcaaacccaagaagcactgctacaatggagctggttgaacctctatttccatcatcttttgtggctccaggcgattcagctgtaggaccactaactgtacccactacattaaaaagatatataattacataatccactattttctttgtaaaaaaaaatacatttttacattttaatggtattccataaaaatagtataaaaataacaaaaaaaaactacataaaagtattatgaaaataacattaaaacaataataaaaaataacatataaaaaaatcaacaataaattaa

SEQ ID NO: 34909 - DNA, 911 bp, Cannabis sativa
atttttaagtgattgtttgctcatgtatattaaaagagaaatcacaaaaaaaaaaaaaaattagtatagattcacttatcgatgattttcatgatatgcaaaaaagacgttctgtagtttaatttcaattatgaatttaataaaaatattaaaattttttatacttaaatttacaatatagtttgggccccctaacttttcatgtttgctccgtccatgctttaacccaagaatcttcttcatctacagaagattcttcttacgaaaatctaaactcaatctctctcttttctctgtacctctctctctacctcttaatcttttctctctctcgatctcaatctcaatccgaaccatattctgaaaaacgacaagtcaagatgatatttatagacttaggtaggatcaaaatcctaaagtcagtggctgcaagagtcgaagttgttaaattatttagtgagcaactaacttaaccaactctcctttgagcgagatctccacgtcaacttaagtcttagtacattcgagaacgtatatgagcttttgagatcacggaccaaagacactcgttgaagaagtttctggataggatagagtctgctagagtcgactatccgaaattgcctttccaagaggaacaactagccactccatcctggaggaaggctagctttttttgaagaccattcgctgaagaacaaggaagtcttccaggaccagctttcgcaagtgaacgtctttctaaaaatagcttttggcgagatttttttcatttggagaaactataccacatatatatattatagtttcacatatatataattaagagatattaattacggtctttcctcaaacatcatattataggaaaaacaaaaaacatgcacaaccgtccttactaaagtattcta

SEQ ID NO: 34910 - DNA, 1451 bp, Cannabis sativa
ctggttttggttccaattttgggtcacagggtacgagattggttccaggttttggtttgggactgagttcgggtccaggtgtgggttaagatcctggtttgggttcgggtctggggttgggtccctgatccagacaccgaatatgggttcggtccaagacccgggtccagatctggatcttgatctcggacctggtttggttccatttcgggtgtcgagtcacgagcttggttctgggttcatgttcgggtctgggttcaggtcttgggttccggtcctacttccgttgcccaagtccctatcccgaatctaggtctaggtcccgaatctggtctgggtttgggtcccggtctaggttcgggtttgggtcctagtaagggtttgggtttgggtcttggtttgggtttttattttggtttgggttcgggtctgggtcctggtcctggtcctagtcctagtccagttccaattccaattgtgattctaactttgagtgtgggttcgagtacgggtcggggttcgagtcttggttcgagtttgggttcgggtcctgatctaggtctaggttacagatcgggttgtgggtgtgggttagggtcctgggtgtgggtcaaagtttaggttcgagtaccagatttcaatctccatttgagtcccagtttagttttcagtgtaagtcctgagtttcgatatcagtctaggttcgatttcgagtctgggagcaggcctaggtttaggtctgattctgggtatgggtttgagttcgggtccgattcagggtacgggtcttggttaaggtttggtcctagcatgggtttgtgtttaggttcctatcttggtttgggtttggggcaggttttgggtctgggtctgggtccgacttcagattcccgggtccaggacaggtccaggttcgggttcgtgtcccaaattttgatctgggtttgggttctacgatctaggtgcctggtctaggtcccccatccatgttcggtgcctacgtcatggtctaggtcgaggttcgagttcggctcttgagtgctgctattagtcctagtctcggtctaggttcaggtccaggtctcgatcccagtcttggtccgagttcaggttcgaatcctggtcagggtctggatcttggtctggctcgcgggtcttaggtctcagcgagggcttaggaccaggtcaggtccaggtctcgattcaggtcttggtccaggttcaggtcccaggtctcgggacccagtcctaatcaaggactcagtccgagtttgggttatggttcgagttcgattttggtctcaggtccaggtcctaaacacagttgaagttctgattttgggttcgtctttggtttcgggtccgattattggaccaggttggggtcggggtctgagtcttagtctgagtctgggtacaagtttatcggaacccaatctgggcctagtctg

SEQ ID NO: 34911 - DNA, 1875 bp, Cannabis sativa
tccttcctaagatttatgatgaatgggacatgatcggcttcataccaaggcttagaacacgaaattcgcaggcctcttatataatgcgctattgggtgagcagcgtgtatgtgagacatatttgttttcattgccttggctttgcagaacttgtggtataacgagtgaatggaatcatcgaaaaggcagtcagttgttgcgaaattcagtgtaacagcagaagaatatttcccttttttcctaaggtaatagaagatagtgttcatatgctgaaacaaaacaacaaagaaacacaaaagaacaagttaaaaaaatattacaaaaacttaataacagtaactaaactaaaaaccaatgacaaaacaactataaaacaactataaaaagttttaaaaggaaaaagaaattttaccgagtcattaataaatatgtcacagcaagccaaatgataaaatcaggttttatcttcaacataatcaacacctaatctaaacccggtagaaattttattcgcaccatcctcataacaattgtaagccctaaaacaacaaaaaatgacaaaaaaacaatgttgaattcaaataattgtaaaataaaaaaattcaaacaaataaaaaaaatacaaaatagaataaagaaaaccttcgccaatccaagcatcaaagtttgcctcaatttcaagagacacaggatcagcaaatgtatcatcgttaagaagagcgtaaaagcccttcacataagtaaccattttaaaatccctctcatctcctccagattgagatcctgatgacattacctccattggagtactgctcacatcagccaacccaaaatcaacaaaaggcgatttcaatgccggtgcacgctttctcttatccaaaagaggagtataagtaatagtgtcatcaacttcttcatcagaagaaatggcagctgccttttcaacaacaacacttggattagattctagaacctgaaaaataaaatttgaaaatcagaaaaagtaaaaagttgcaaaacaaacctaaaactgtcaagcaactaaaataaaacaaattttaccaacattaatcaaactacacttacattgattttaccaacaacctttaaaccagccaacacaacttgctcatcatcaatttcaagctggcttaaaccatcaaaaaaatcatctccatgtaaactagactctttggccttaacattctcaacatccttagccctctcttcactgcctacgacagccttagtttgattcacatcagcatcaagaacatcacaaaccaccttatcaactccagcaacatcaccaccatctttacccaactcatcaccatcatcaaaatcaaaatcaatattctctagatcaggtaatcccttgtcatcatcatcatcatcagaattagaatgatgggtgaccaattcatcggatgacttaaccttgatcaaacaacagtattgcaactaaaataaaataggaaaaaaactaataataacagcagtaaaaaaaatgaaacaagaacagtgtaaataaatacctcatcagaagatcgacgatgaatgacattaactttttcttgaatatccttaattatagtcatgacagacttgaaattaagatcaacaaaacacctcaaagaaataaagtcttcggccaaggattcttgattgaaaatgaccaactccaacttagattttaacaattcaatatcctctgaatcagactttttagaagatgaaccactctcgaatgtttgcttagaggtactatgatcatcaatagattcatctaaaaataagcgttccaattgcaacttctgcctctcctcatcagtaggatgaatgttctcaatcttcaactgaaaagcagaaaca

SEQ ID NO: 34912 - DNA, 1947 bp, Cannabis sativa
  modified_base (278)..(280): a, c, t, g, unknown or other
tttttttttggaagcttagatgatgtttgttttttcatatttttttaccttgaatttttttctctgattcgattatgggtatattcaaagttttttcgatatccttctcttcaaatcctatcctcgtacgctttcagtttttgtttgtagactgtttttgcattttttttacaacaatggaggttgatatctctgtttttttatttttttctttttttgtatttggatttttcgatattttattgtttttttgttgagatctacatcttgatttgagnnnatttccctgatttttgaaagaaaacaatggagatttggtgaattggggtgtttcgactggctcatgaaggaggagtttcctccttttttttgttaggttggtatttttgtaaatacaaacttttattttctatttatgtttatttttcctttataaggtataaatgtaaaatgttgcttttattagtttattatagaaaaaatccctaatttattttttataatttcacaataatttttattaatatttttaattttttactttttgtagtatacattcttttatttatttatttatttttgcttttagtgtttttttttttaagaaaagagaataaatgtgtatgaaaaattctttaggaccactattaaattgtgtcttttattttttttttcttttaaaaattctctttgaactatttccattgttaaatataaataaattatgttaggttttatcgcatatggtcaacaaaatgccttcaatgaaaaatataaaaattgtgctatattttatacaaaaatttactttgtgatatatttgcattaatttttagtattgtactctaatgcacaattataaaatttgcttcatgcaaatttatgttcaattaatacttctattaaagtaccaaaaaaaatatttatcactattctattattatcttattatttaaaacaataaataggaatgtaaatagtttataatataacgttatggcctatagtcatataaaatattaaaaaaaatatagaaataaataaaaatagtgtatttatagtgatataaatattagattatgctatattatgtgctaaatttagtataatttttacaatatatcaatcttaacataacttttaaaatactatattggagcaagttttttgccagattagctatatgcataacctatttgatgcatcaccattagatctatcatgtgagtgccacactaatgaccatatgataatttattttattttgaatatgttaagtgagatttattttactattaagtacattacatgacacatataatgctggattaaaactcaaccatagcaaaaagtggagctagagtcagattgcttggtagtagtacaagctattcaaaattcattacctatgctttcttcttttgggttattatagaagattgtcgtaaacttcatgcatctttaaacaatattttcttatttttgattaaatgatctgcttagatagttgatcataatcttgctagaccatcttgttcttttctggatcgagtgttcaataggggtgatgttcttgttgaggtacaatcttgtaacaccctactagcttaggcttgttagcgagatttttaacgtactgtgcagctcgttcctaatcaacgaggttattaaaaaatgtgattaattaaaattttactttttaattaaaacataacatattatattaataaaattcggggattccgtttacaaaatacaattacaaaagcttgttattcatttacaaaagattcgtcgcccagcgactatacaacagaagccctgaagtcccgaggatcatacagtccaggtctaaccaccccgacatgtacaatcttcaccgacccgctctcatggctcctcagctttagccttgcccttacttacacatagcaatagcattgtgag

SEQ ID NO: 34913 - DNA, 2189 bp, Cannabis sativa
acccgaacccagactagcacccgaaccaaaactcaaaccagaacccaatcaaagacccaaacctggacccgaagccgtaccttgtgacccgaaattggaaccgaaatcagaagttgaccttgaccaagaaatgggaccagaaccaggacttggacctagagctgtaaacgaacctacacctagacccaaaactataaccagaccaagaccaagactcaaacttacacctagacccaaaccgcgacccgaactcggatccccacccagacttggactcgagacttgaacccagacccaaattatggggaacccagagctgggaatcgggcccacaaactaggaccagaacttgggcctcagatcttggatcgggatccgggactcgaccccagaccaaaacctggactaaggacccacctcgggacctgggattcggactcgatgcttggacccgacccgtagtcagtgtctggatctaagacttagaccagaacccaaacccaaactcgaactcaaactaggacccagacacatacaaagacccaggcccacacacgggaaccaaaaccgaaacttgaactggaactagaccgggatcttagaacggtaccgggacctaaacccgaacccgaactcgaaactagacccagcctcagaccctaaccgagaccaaaactcagacctgaacctcgccccggacccaaatcaggacccgaacctggactcgaaccaaaacttgacctgaacctgtaccccgttacttgaaactggaaccgaaactagaagcggatcgggacccatgaataggaccaggaccaggacttggacttagtcccaaaactgtaaccggacctggacccagattcggacatagacccaccctgggattgggtccaaaacctgaacttaaacctaaaccgggacttgggacccgaacccaaacctgaactcagactcgaacattgaacaggactcgggacccagaattaggatggagacccaaaactggaccccagtctcggtcccacacctagacccatacccagagcgggacttggggcatgaattgaaactcaactacgacccgtgattaggatccaaatcttgtccaaggatccgagaaccggggcttggacaagacccatagtcgatgtcttgatctcggactcggacaaagactcgaagctggaccaatacctggaccttggactcagaccttggacccgaaacaaaaacttgaatcagaatgtgaccaggaccctggaacaggaccgggaatgtgaccagtacctggacctgggcggggacccgaattacaccagaacccaaccccagaactcggcctcagacctagtcctcgacccagtcccgaacctagactaggactgagacttgagcccaaaatcgggactcgatcccgaaatcaaacaaagcccctaacctaaatgattcggacctggacatggacacgaacccagacccaaacctgaataccgaccctgacccagaccgggatcaaaacactggacctggacacggacccagacgtagacccagacataacctgggacccagacccaagaatcgaacctggaccccgactgggatctgaaaaacccgtacccaaactcggaggaagactcattacccgaccccaacctagatccatgcccagacccggaaccaaacccagacccggaatcataattggaactatgactaggacccaaacttgagaccagaatcgaacccaaaccataagccaaactcagaccagaacctggaccgaggccttgactaggactgggacctgagactaaggacctgaacctcgaccgagacccggaccgggacctagacctgaccaggtcctaaaccctcgcaaggacctgagacccgtgacccaaaccaggatcaagaccctaacaaggacccaaacctgaacccggaccaagacagggatcgagacctggacctgaacttagaccgagacctagaataaaaccaagactcgggacctgaactcgaacctcgacctagaccaggacctaggaaccggacttggatgggggacctacactagggaccttgtcccggaactagggatgcacattttccccatggggatggggccccgcggggacccgcccctaatggggcggggattccccatctaaatggggaacggg

SEQ ID NO: 34914 - DNA, 1274 bp, Cannabis sativa
  modified_base (285)..(285): a, c, t, g, unknown or other
tttgctagtatatatcatatatatatttatatattcttgcccctttacctatccactatgtattgcattttaccaaatatatgtagtacaccgtttcaggagatagaaattttatttgttttgggtatttaaaaattattttattataatttattttataattgtgcatattgtaattatttaggatcattataatctttaaaattttttgaataatttataataccgaaaataaaatttaaatagttagctataaaaaaaatcttatttttagtcacaataaantttgtgactaaaagtaaaaaaattctgactatataaatcatccttcttatgttgcgactaaaaggtcgtgattcaaagtattagtcacaaaaatttaaatgtgtttttttagtcacaacaagtagactaaaaacacatttagttacaagtaactttttgttgtgattaaaagttatattttgttacataaaatgttgtgactaaaaatttgtcactaaaagtagttattttcgtagtgttacttgtcatgtgtataagaaaaaaaaaagttgcgcgtacaacaaaatatgtaaattttatttttagcatacatatatagtaaagtactcgaaaatttctaaaaaaatttacatgtaatcttacataactataacatatataatcataaaaaaattgacctaataataatcttgtgtaccgaaataaatagagaataatctaccacaacatctttttagacggtggattacaaactaccctcactacaagaatgtcacttttgccagtacattttgtgctggtaaaattttgatattgcgctagtacaatagaatttactctgatgtattggcaaaagggttggcaaattaacgttggtaatagaacttttgccagcacatgcaaaataataaaaagcactgacaaaaataatttttcctaacgcgtaaatgcgctagtaaaagttagattttagccactgcaaatgtgcgctagtaaaattttgatttttttatcagtacagtttgcgaaatgtgttgttaagttattttactagctatcacacgatgtgctggtaaaagtgatattttttgtaatccttataaattaatgcatattcgtttatttttggagatgggattattgttagaggaatgaggatcatcatatttaatataaaattaaattagttgagttggccaaatttaattggtttaacatactaatactatgatatacaattttctaacagaggaacttgattcattgtt

SEQ ID NO: 34915 - DNA, 1928 bp, Cannabis sativa
gactatgatttgaaagctagctccttgaccaacgtcaagcaacaacaatgagagagcttgaagaagtttattcaacacatgatggatgtggttgctaaaaccaaagtcactgatgacatgaaaatagttgccctaacatcaggacttataactggatccttactatggggagatcttcaacgcaaaagggcaaatacactgagtaagttcttaacaagagcccagggatttattaatatagaagatgcttatgtccaagcatatggagtactcccagcttcttacaccaaaatgataagtgcccaaccattgcagatgacaactccattcatttaacctctgctaactacttttactactcctatggcatatgggccaagtacatcggtgcacccatctatacatgctagttttcttgggtttggagctgcataaacaggatatagtgatgctcccaaaaaataaaccaaaaagcagaagttctagagtctaatatagcaactcgaggagtaaaaggagtacgaagcgtccaaatcagagtgagtccacgaagaagggaaaaacccaagaatcaaggtacactgagtacacaactctcatagatacttgggagaatgtatacaagaaacctatgacatggtacactacaagaagcctctgccaatgtacaagggcaaaaaatataaaagagatccaaacaaaaagttcaaatatcatgatgatattggtcacaccaccaacaaatgtgactatttaaagatgaaattgaggggttagtacgtaacagacacttaaataattgggtaagaatcccggtcatctatccgagataggcagttacacatggatacatttttgttctaggacaagaaggagccataaatcctcctcaggaagtaggccatccactagtttcgagaatacaagctccaaatgtaaaagcccttcaagggccccagaacactccaacaacgacattagttatagcccccgatcctaaaaatccataccctccacgagctgcgttaccagccttaaatggttaggtagcgacaatttcaaatatttctagaagcacagagaatgcacagaagcggtacttgaatgaattaaatcaaggcaaagctttccatttggtgtaatcaccttcccagtgtccaaggatgatgaatttgctaatgactttcacagaagacgatgccaggcacgtgcccttccctcataatggccctttggtaatagaagctcaaatagcaaatagaagagtttctaaaatcctcatagataatggaagctttttgaacatcattttcaaaggggcctttcatgccattggtctagtagaagccaatctgctaccatgcccaattaaactgcaaggcttcaatggagatacgttgatccccatgggaaaaatacaacttccaatgactataaattgggaagttcctcggagtaatgtagtatcatccttcaagtacaactcgtttatgagttgattgccctactacttataatgctatcctgggaagaccatttttaatggattttggagtggtgacatccatctggcatctatgattaaaatttcctagcaataccggaagcgtaggaactattagagaagatcaaagaagtgcgtgaagttgttatagtgttttaaccataactatgcttatggttcgggaaggaaataactttaaagccagaacatcctcccaaccaataaaaggggtgatcctagaagatgagcttgatccataaaatgacgtggaatgtgtcattaaaccaatggagaaagtgaagaagtatgcatagatgatggagatcctgttgagttgtcagccctaaataaaacccatttcaatatatttactaattaataaaagatcaaaaattgcattttacgttgcatggttcacatgatt

SEQ ID NO: 34916 - DNA, 1962 bp, Cannabis sativa
  modified_base (165)..(168): a, c, t, g, unknown or other
ttcaaataaacataaaattagaggtaaatttgattaattgatgaataaaagaggcatttttcaacttacccctattaaattacacctccttagcactttaaagtgtccactagcatttcttcatgtacacatgggttgatattaggaattattttacaaatacannnnaataataaaaaaataataaaaatacagttttacaggattttaaatatttttacaatttttatgattttatttacaaaaaatacaatcttttgatatatttttatgttatgctcttgttaatttattgttgatattttattatttgtatgttattttttagttattgttttgatattgtttggatattattttcttgttacttttatgtaattttttttttttgttgttgttgtttttataaaacaccctaaaaatgttttataaagaattctgtaaaaatataaaaattttataaaaaaaatagtattttatgtaattatttcttaatattatgcactaaaatatcgtggggcccatcatatattctgggtaaataccattttgaatcctgtgttttgaaaagattattaattggatcctctgttttgttaaatgataaaatggaccctgtattttttaaaatggtacaaataggactctgaactaatttttttcaaaattaaatttaataataatctaatctaaaggtgttataacaaacacccctaagtaaaaaagaaatataatatgagtaaggctaaagagtatggttagccatttataaattgtaacttgataacatttgatatttctcacaactgaacaagcttgcaaccactatcaatggatcttttaactccatccaataccaactgtgtctttctactaatctcaggccatttacaatttggctgaaccccatcatacacaacaccacgaacaagcctagaaaactcttcaaccatcaaagcctcttggggtaattcacaatccacactcacttcctcaggcactgcattccacccaatgtggagatccacaaacatggcaccacaacttaactcaaaagaagcagagtcttcttggtatgggattatgaagtcattggtgtgaattgtagcattagaaccagatatagtcaggtccattgaagtgttggagaaaaaagagcagtgaattgttgcagccgtgttgttcgatgaaatgtcccaatgaaatgctgctgtaaaggacaagatgactccggtgcagtttgttgtaacgtcctgagcttgtactgtggttggcaattggtagtcctttgcccataaaagggctccaatgcagtaccaccccaagtccccaagcgcgccgagaccgtctaagtcgggttttacccttatgttgctctccgaaaattctgggcttactgacattgtggatgtgctgtaaatcttcaaacaatggcaaacaaaaacaattagctcatctcatattcattgaattatctcttagtttttggtttggcatgttgttgattaatttgataccaataataattgtaacacactcaaactacatacacactatctacacttaatgttgtataattaaccttaactacataactaaaagtgatataagtgatgtgatttctatatttaatcatgaaaaatgcttaaaagaactaatggtgtttaatattttctaacactgtcatattgttattgaaatatcaataattagttgtaagacactatttttagatggttttaagtactaatagtgtcttaaaacatctctgaccatgctctctaaacacattagttaaaataaaaagtgaaatttgaagaaaaaaaaaaaagtttcaaccctacaaaaaataggtctttataatagagaattgacaggaagctctctaaatgtagtaaatataaggagcacctaacttaatcgttacactaaaattattattatgtctataaatatcatctt

SEQ ID NO: 34917 - DNA, 1624 bp, Cannabis sativa
  modified_base (562)..(565): a, c, t, g, unknown or other
aaagattaattttcacacaattcaaattctcaataattttgataccaagcatatcaaaattaaacactaatttagacactaagcatgtctaaactacattcttaactttagacaccaaatatatatatctaagttaatctttatttgaaaataccaaacatgtctcaaatatacacattttagttttagacaccaaatatatcaatatttttatatatacacataggcaaacttgatttaaaatttgaattcaaaatcaaataaactaatcaataatgtctcaacacattttgattaaatttgtgactcacctatacatttttaccataaagtatataaaatatcacttttgtgtatttttctcttaaaatgactctttaaggtcaccttgaaaaataccatttggcatttttatttttgtcaataaacctaaaatatcaagctcacatcaccacttacagaattatgtaattattttcacccataattgtaagattatcttcttattgagattagcccaatattataccaaagtttaacaaaattctcatcaattttgttnnnnactttgattatttaatattcaaaattacttatttaattttgttatctttttacaatttttgaatttactttgagtctaaaattgttcttccaattatatggctcattttacaagtttggatctacttttgatccatttgttcttattatgacaagacaatattttcataagtttaactctcatagttcactttttttaatctcataaatgatataattatcactgttaattcccaaaggatgtaacttttcaaaagtcacaattttctaaaaattactattggaaaataaattccaaattcaatctttattcacaacatagatgataatatttcacattaatagtaacaaatactattatattactatcaacattattatcatatataatatataatttatatattaacgtataaaattaatataaaactcccaaacataaaattataactcccaaataataatattatactaactaatatattatgtataatactttcaataactcttgtgtaacatacacataatagattaattattacacaactatatatgttacatatctcacacatatataatatatatactttaatgtattttaatatacatgtatgatatatattatatacacataatatatattatatatgcatgtctcatataaatatataaaagtaattatttctacatatttaatctcactaatatatactatatcacataatctacatatacataatatgtgttactcatatatacatattatatatattatatatctcacatatatacatataataacatgatataaattcaaatatcatattatatatcaatatatacatattaatatgatataaacacttgatcacatgtataccacatacatataacttacatatatatagatattactatcatataaaatagtaaatcacataatatataccactatgctcacccatgaatagttttcatataaaatctcttattattgtattctcaaaatcttgatttatctcctctttcattgaaaatgaataagcttttgattgttaga

SEQ ID NO: 34918 - DNA, 2959 bp, Cannabis sativa
gatcataatcccacttattacctaatacccataatataaatataaaccctaattatttaccattaggcttattgggatattacaaaaaccttgacataaagcagggattcaggggatagctgtaagatcctgcacaacataatgcacaaatgtggtatcccaatgctacctctaacaagtgttacaaagaaagaagttgaatatctattgacagaagtgcacaaaggctctacgaaaatcatgtcggggcaaagccaaccaagtgtagacgggatcaaaacgcagcatcggcctctgaaaggttggccgaccctagccccagtaggctagtcgaccataggatcatcaacctggccggccaccacctccacaagttggtcggccatagaatcaatgacttggcttgccatagactcctccaaatctagccacgtggtcttgccctagccaggtcgatccaccagtagtctgctctcatacttctggtctacagtgactaagaggtaaatggcatctcactagcaggattccttgatgaaagggaaagaagaagagaccaagctaactcaaagcagtatggttgccaacaaagagttaccaggcccttcaacaaacaaatcgaggaaagaaattctttgtcagagatttaccctaaagaatattccttgacagcgaggatcctgcagtaagcatgtttgtaccaaactgagaaggtccacacgatgttaaaagacaacaataaaggtgcatacaagtctagcgagtacaacaagaatttggagttcgtactctaccagaatactaaaatagggaacatctcaataagtaccctcactagcaaacttgtcaattagtccctctaacgtcttatcatgcaggaacccataaaagagctagtacccattgctttttaacatggtctcccatcactcttcagtgatggtcgttggacggtaagccgcataggggtagccactacgtgatttcaagagtgcacattaagctgtaagcttttgttacatgtaagatcaactgtgtctaaaccacttgctaacaagattaacttcttaaagttattctttcaattccacatgtgtactacaacaggcagcaacccaagaagagtctcagggaaggtttgtgaaacttggtgaatagcaagtgaccaagagacctaagtctgtatggttacttgggggtatccataccgtacattgcatcaaactaggataaataacttatgcagagaaattttaacgcttagaataagctactaaatctacctctaagtcgtgcaggcatacttctacttgacaagtaaatttttacattttaaggccataagaagatagccaggatgatcatatgtccgtcatagaaagctttaaggctaaataatagtagtattcaaaaataaaggacctatagaccaaagcaagaacataaaagccttgaggctagatatgacttcggttcacatgcatgaggccaaggccctgcaagaactgtatagccaaaaaagaaccagacagagctcctatacgggccacgtatcgtactacgactaaggtagagttccttacatgttttatgttatgtcactactacaaaaatttgtttcagtgacccatattgaatgactctaaaaccatttagtgacacttcaccgcgtgtcactaatgtgggtgactggaaaagcagtatttagtgacacttcaggatgggtcactaaatccttttagattcactccacgcgcctcactataaaattttagagtcaaaccttgtcagactataaaagtaacaactactctaaaaaagtgtcactatatctatacttttttatttataaaaaaaaaaattaatatttttaattcaaattatatattataaatttataataaaatttaattaataattcaatttaaaaaatacataaattaacaatttgttcctgagatgataccattttaaatattataattataagaaaactaaaataaataaatacatatcaataattataatttataatttacacaaaattaaaatagaaaaaaattacaaagaatatttacaaattaatcaaatacaaaaaaaaaaagaaatgaaataataatacaaaaaaatatacaaaaattcaacaaactttttagatctgctcatggagattcttcaaaaaggcagatcggctcgtaaactcgcagctccgacgagcttcttcacggaggcagaacaacggtggtggcttcgtggctcgagggagttgggtttcagaactcggtgaggccacccgtggcctccattttcgcatacggtgaccggagtagcaccgtcgtgcattgcaaacagagaacgagagaaagggttggtttatttcattatttattattatcaataatattaaaagttatagtttaccgtttaatagagccgttcaccatcccaatgctgcgattgctatgagggtgagagacacgagagagcccagaacatagacaatagggtggagagatagtggcgagattcatggggtttgtcttgggcttggacggcgaaagggaggtctgttgaaggcctaccgccgaaatggccattgggaccttcatctttcctttcgtctgaacaaagaggagaggagggaggcagctagaaaagaaatagggtttgacatctttattattttttttttttttgagttatcgatatttgttcaaaaaaaagttaatgtattaaataggatattaaatgtgagcttcgggaatgcaatggtctctctcttgcagaatttaaatttataaaaaaaattaattaaaaataaaaatctatcacttataaagcttttatttaataatttatttaatttattatgatatggtgacacgctacgcgtgtgagcaaatctatttaccaatgcgttatgcgcgttgctaaaacgtggctttagcgacgcgcacaa

SEQ ID NO: 34919 - DNA, 1203 bp, Cannabis sativa
attgataaaagatgcagagatttcctttggggttcgagtggtaatagaagcaaatttcatctcccctcttggaaaaaagtttgccttcctaagcaacttggaggaatagggttccgtgaaggtaaaaagtgaaacatggccatgatagctaagcatttatgggtgttatctagcaagcaagacaacctttgggtgaagtggatcaattcgatttatctgaaggggcagatatttggcgtttccacttgaaagccgactcgagttgatattttaaagaagttagtgaagattagagatttgtcaaacatgaaaacattgaatcaagttgtgaaaggaggcaaatttacggtgagcaggttttataatacgttgataggggcggttaaagctccctattctgttattgtttggcagaagctcattgtcccaaaacatcgatttatttactggcagattttcaatgaccatctcctaaccagagatcacttaagcagattcttttcaatcccctcgaacttgtgtgtggtttgtgagaatgcccaggaatctcacaatcatttgcttatggaatgcacttttactaagaagctagttaaaagtatagaaagctgggttggtaatctaaattggccgagcaacatttaggatctgcagcgaaagaaatggcaacaaaaactagacctgtctgcagctgtgttgaatgcagttactgctgcaactttgtattgtgtgtggattaacataaatagctactattatgatgttgtttgtaaaactgtgttgtctattaaaaaagaaattaaagctctaattaaggctagagtgttaggaggacactacgctaatgttaagacaaaagatagttatgttttacagctaattagcaagtggtagctgtttggtttgttgctggttgcagttccatcccattttgctttgtattgttcggtctttttgaataaaatttttgtttttgttcaaaaaaaaacaacaaattaataaaagtacaacataaaaagatcgtttttgttataaataaaataaaaaaaatcctaaaaataattcctaaaattttactttttctaattgtggtctaatacttaagaataattagcttttttagtccctgtacttatgacactatactatgatgccccttaatttataagtgtagttaaaaataccccctaaaatatatcagtt

SEQ ID NO: 34920 - DNA, 1159 bp, Cannabis sativa
ccttattgaggtcggtgaaatcgatacacactcgccattttttgtttggcttgggtactagtacgggattagccacccaagtcgggtagaaaacttcaattattaaattgttgttatgcaacttttctacctcttcttttagtgctatggatcgctccttatccaacattcttcttttttgttgaacaggacgaatattaggatcaatatttagggcgtgtgaaattatagaaggattgattccgattatgtcctcatgtgaccatgcaaaaatgtctaggtttgctcttaaaaattttatcaatgctgattttacttcgagtagcaacccttttccaattttgagtttcctggtcggaacatttgggtcgattcaaatctcttcttgttcttccactggcccaacatttgtatttggttccccaagtccgggatccacatcttcatccccaccttgggcagttctctatttggcaatgtctttttcctttcctgaactatgactagaggattcttcctttcgagccttagttagggcaaggttataacattcctgtgcaacttgctgatttcctctcaggcaacagaccccattcttcgttggaaacttaaggcacgaatgaaatatcgacgtaacagcttttaggtcgtataaggctggtcggcccaacatgacattaaaggctgatggaacatccaatatcaaaagtgtgccattaaagttatgctcttcggagctttcccaacagtgagggtagccgaatttgccctagagttgcaacactctggccggagaaaccgtatacgggctgaagacagggggttttatcttttagttggagccccattttttcatatggtgttttgaacaggatatttgcagactaccacataaacacttgaacctaaattcaatgtttatgaataattgtcttttcttaagaaattgttatgattttgtttaataaaagatcttgtgatctgataggagtggagaggtaatttatttatccagttcaaagatcttttacaatgaactctagatcatattcagaatttactaccaccgaatctctataaaacatatttttaataagacatagatataatatttgttgacttcacttttagccaatgacaatgagtcttaattgtaagc

SEQ ID NO: 34921 - DNA, 2068 bp, Cannabis sativa
  modified_base (241)..(243): a, c, t, g, unknown or other
cgaaaaatacgttcaaacagtgtgttgcacgagtgactattttattttatacgcgtgtaaaatagactttttgaacattattttctatattgttaattattctgaatttccaaaaattttgtaggttatcttatatagctataacgtacatgaatataaaaaaaaaaaattaaactaagaagttcttctagataccgaaacaagtcaagggtgcatcagtacattccttttaagggggtgnnntgtagaatcacccaataatattttgcaagttaccataaaaatcctttaagttagtgtttatgtaaaaactccagtggcacattattgactggcatatttcaatgcaatgaattcttttctctctctctctctttttttttcataatacggaattattcttaaaataggtattcaattcacttgactttgaaaataactttttttaatggctaaaatgtaaaataattagatagaaaaatcctttagtttgaaagtaattttttttacttaaatttttataagggagctttttacttatttttacttatttttaaagagttttttattttattttttataagttgttttttgtgttaattaaaggagatgagatttttttttttttgttttggctttgagcgatgataaatgtaatttgaaattgtacattaattttacacattaagatgtataattatttataggataaatacaatattttgaatcacgtgtgccacttgtgaagtcatctggatcatggccatactcaaagattttgacatcactcccaccattcctgcacttctatattgtgaaaacgatgcatccattcacatctttgagaaccccgtttaccacacgccatggcaaaagtgttaaactatgtaagtgttttgattttgtgatctttctcatatttctcgatctatgaattgtgttacggatgctttattagcgtgttggactaggtgtgcaaaggtgcaatcagtgggttgtttaagggatgtggcttccttcgtggctactatatatactttgatatagtttgttttctattttcaataaaagtttcttaattatcaaaaaaaaaaaaaatagaaatgaaaaagacgaagaggaattaagggttaaaagtcgcccctaatattgtgggcaagagaaatctcgcttcttttgcaacaagcagatttaaatattattagaggcgacaaagttacccccaaaactttataaagttgaagaaaaaactcattttctttaggggcgacacctttatgtcgcctctaatactccccatttttagaggtgacgatttgttgcccttaaaatggttgccccttaaaatcaaaattgttatagagtttttaaaacacataaatagagtgtgtaatataacttgaacatgtctataaaaaaaataaagaattgtttggtttcataaattaaaaattattttctctttataaaaatagaaatcaaattttgaaaactaacaaggagcatttgaatttttttaaaaaaaaacttaattaaaacaaaataaaaataaaaataagaaaagatgaaatattttttttttttatttttaaaagcgattttagtttttttgtctaacatatatatatatattattttctcttacatatttgggtctgggtctggggttggggtctagggtccagcattcaggtcttaggttcgggtctaaggtataaggttcaaattcaagttcaagggtagggtcttggtctcggggtgagatcctagttccggggtcagggttgggttcgggtcttgggtctcgagtctcggtgtttgggtttcgagtttgtctcggggtctaggccgaggctaggtttaaaatcagagtctaggtcttggggtctagtgtccaagtctgaggtccaagtcgggtcaggattcgggcccgagtttgggtccaggtccaagcctgggtttgggtcttggtttgggtctctgtggtccggggccaggtcttgggatccaaggttaaggtctggttctaagtcttgggatccaaagttgatgtttgaatccaagtcca

SEQ ID NO: 34922 - DNA, 1293 bp, Cannabis sativa
gagacacttaagcaagcattctatgacgaattctccccatcaatgcacaaactaatcaatcccaaaaatttgttctgcatcatcagaaagaagatgaacctctaaaggattacatgcaacgattcttagaggcagccacatagataagaacactcagtgaagatgccaagttcatagcaatggtagttggactagtagttttgagtccattctggacttaaaactcaagtcagtaaacactatttgagagtttttagatagagctgacggtttcattaagctcgaagaagctgtcaagaaggccaagagagtttctcaaatagaagtaatcgaatacactttttatcctcttcctgaatcccaaacggacattgattaggaatttgaagaagaattaacgtcgaatgcttccattaaaataaaatactcttctatttcccaaagtgagctcgagtagggagacagtgatgatgaatcccctgccatttcttaagatgatcttaagtaagaaagaattgctaaagaatctccccctacttcccaagatgactaaggagatgaaggcagtgacaaagattctccctctgtttctaacaatgatcaagaacaagggagcaacagtgaagatgtgtcctatgaatctcataaagatattgacatagaaagtgatactaaagactcgcaatgagagagaaaggaacttatatcatcacagaatagtttaaactcaagaaaaataggtttgagcatactatgattgcaacttgaatctagtgtcagtaccaaggtactggaatgaaaagcatctgacacgatatcatcaataaagcaactgttccctagatagtttgcttcacattgagattcactttaccttatgcaattgaatcaatcatctcccgaactaaaaagatgcaatgaattcatctataggtcaagaggtacattgccaagttatggcccctacattgctagttgaacagagcatctgtgtagtgaggatcaacttaacttctttaataaaaatgaaaatttacgaatgctatttctttttcattctctctagctacaaggatgatgtaattgaatttaatatctatttgacaaaacattgagtaagtctagttgacacttcattattattaatcaatttcagctcacagacctgacaacgatctcaagcgctgaacaaaacttgtagagttagtcttgagggaactgtaattcttaagtgagctaaacattgccatgttggaaattattttaccaggttcttagatctactcacaagta

SEQ ID NO: 34923 - DNA, 1372 bp, Cannabis sativa
aaactgcggtttaaatccgtaccgtgacaatctaaatcattgtatactgtaatcggggaaatcgtttttgatggtccagttaatccgtaccgtttatcgcgtattggttcgattgcggttcataatagatagttaacggttaaaccggaacggaatgtttataacaaataattaatttatatatatttttttttatatgtgactatatgtataattatatacttttttgtgtgtgaagtttaattttagatttttatgttatgtttgacttttgagaatattttttatgttgttatttatatgttatatatttattacttatcatgttaaatatatattttgaaaaataaaattaaaaacttaataaaaatagtacaattacttaaaaaatataaataattataaattctacttaaactgtagtttcaaatctaaccaaactttcttaatggttaggtttggtttgatttgagaaatttattagtctggtttggtttctaatattcaaaaaaccgttatacgggtttggttcaaaaaatatgaaagttcggatcaaaccaattcgtgaacacctctacttatattatagatcctaggcttatattttttttttcgacgtggtgaataaaatcacatgaattaatgatgcaacaatctacaattggcttattatttatttattttgcatttgctcgtgctaaaaactagttttaagttgattatattaaaaaaaataacaaaaattgagttcatagtctattttgaaaaactcagaatctaaatttttatttaacaaaaataaaaaatttaatctataacttttaggtccaaaatattgtttacttttaaaattttatataatttctattagagttattatacgaaacacatattacaaattacatatacatattaacatcatttttctttttattattacgtgataaataaattgtttagaccatctctaatagcataaaattttagatttggctaaaaaaataagctaatgttatatttggtttaattatataattgtgctccaatatattaagggtaaaataaactttattttaataaaaatattttaaaaaataacaaaaatattaaatttttattgaaaatatataaaaactacattaaacatataaaaaattattaattgtatttttttttttgaataaaaccagtaacttttattaacaaataaaattttccattacaatggattgtacttcagtggaacaatcttccacctaaagcacacgacttgttgagaaataagagtcccttgcaaaacaatgagctactctatttgcagatcgtttaataaaacacaactcaatatgccaaattaagaaggcatagacat

SEQ ID NO: 34924 - DNA, 2894 bp, Cannabis sativa
aataaacaagattatgcatctgttttgtgctatggagaaatgaagaaacagctctttctcattcttgatcaaaaagaggccttttggaaacaaagagctgaacaattttggttgaaagaagggatcataatagcaaatacttccatcgtgcagcaagtaatttgcgtagcttcaatcaaatatcgaagcttaaagatagtgatggcatatggcgtgactgggattcgggtttatccaatgtagtggtggattatttcgacaatttgtttgctacagcaggggcagattgtgatgaaattattcattgtatccatcgaaaagttactccacagatgaatgaagctttgatgcagcttgtttgtgaagatgaagttaaaaaggctgttttcggtatgcatcttgatgaatgtcctggccctgacagtatgacgtcgacgttctatcagaaatgctgggatgtggtgaaaaaggacgttattgaggtggtggagaagttctttcattcaggggagtttaatcctaatggtggtgatgcgaatgtagtgatgattcccaagaagaaagtgcctgaaaacatgggagatttcctattgctttatgtaatgttctttacaaagtcattactaaagtgatggcaaacagaatgaaaagtctcatggataagattgtctctgagtctcaaagcgcttttataccaggaaggcttatttcagacaacatcttagtctcctttgaaattttacactacctgaagcggaaaagaaagggcaaagatggatttatggctttaaagctggacttaagcaaggcttacgatcgaattaaatggaattttttaaagcaaatcatgttgaagctcgattttgcggatgagtgggttcagcttataatgtcatgtgtttcttcaataaaatacaagttcatccatggtggtagagaaatgggacctgttataccttcacgaggcattagacaaggtgaccctttgtctccttatctctttattatttgtgctgagggtttgtctgcacttatcaagaattatgaggacaaaaggtggattcatgttgtaaggttgctaatggtgcgccaagagtgacacacatgttattttccgatgatagctacttgtactgtaaagccactattcaagaagcagaaagaattcgtgagcttcttctcaagtttgaaagagcgtcaggacaaaaagtcaatttggggaaatcgtcaatattttatagcctgaatacagaggtgcattggcaaacaagtataaatgcgttgttgcaaatgaccacagctgatgatagaagcatgtatcttggtcttccgagtaccatgggacgcaacaagtcagcggttttgggttatttgaaggatcgtgtgcgcaagacgctccaaggttgggattcaaaagtattgtcgagagctgggaaagaggttttgattaaggctgtagctcaagcatttcctagctatgcaatgaatgtgtttttgttaccccttgagattagccgtgacattgaaagctcaatggctggtttttggtggaaaggctctaataatggtaataaaggtatttggtggatgtcttgggatagaatgtgccttcctaaggataatggaggtatgggatttcgcaatctccaggacattaatttagctcttttaggaaaacaaggctggcgttttctgtcaaagtcagatgctcttgcaactcggatctttaaagcttgatattttcctaatggaagctatctctcggcttctcttggttctaattcgagttatgtatggagaagtgtttgggaagcacaatctttagtttgaacgggtgtcaaatggtgcattggtgatggttcttcaatcaatattctaaatgagtcgtggcttcctgatccagagtttccctttgtgtcttcgacacatcctaccttagaaaactctaatatatgtaatctcttaaatgtacaaggcagtgactgggatttggaaattttgcatgatttgtttgatgctagagatagacaattgatacttcagattcctcttggaataacacaaacatctgatatggtgtactggtctatggaggctattggtgtatacacggttaagagtggatacaagctgcaacagagattaaaaggcagagatagagaggttaattcaacagctttttggaaagatttatggtctttgaaagtaccttcgaaagtcaaaaatttgatgtggcgtgcttgctcgaattgtctaccaatgctggtacaattggccattaaaaaagtggcggttaacacagtttgtcctctatgtaacagggagagggaatccatttgtcataacttggttttatgtagtgagctgaaacaagtttgggacatagttggaattggaacttcacaagcggctgggggagttttctcgactggtgtgtggatgtttttaaaaataattcagctacaacaaaatgtctaattgcaactgtttgctggtccatttggggagcgcggaatgatttaatttggcaaaaaaaactcgtaaatacttcggccatagtagcttctgctgttagttttcttgatcaatggcgacatgatcaaaatactccaatcgagacttcttggtctggtttacagcaccacgatgggaatgagcattgggtcaaacctcaatacaatagtatcaagataaacgtagatgcggctttattcgaagaccataatcggtttggaatgtcccttgtagtccgtgatcataatggcttccttttgcaaggccgaacgaggttgttctctggtaatgttgctgctggtattgcagaagaaatgggctttcgcgaagctttgagctggatcaagaagcaaccaatctgcccaatttggattgagacc

SEQ ID NO: 34925 - DNA, 2228 bp, Cannabis sativa
  modified_base (1324)..(1333): a, c, t, g, unknown or other
actgtagcgtgccttagcattagggcgttacagcctttatattcgtatccttggccataagccctctattttgtaacactactagtattgacctcatggcattttttatcatggattgtgtgaccgaccaagttttacagattttgccttggtactgtcttccgagggaaccataagacgcatgtggaactaagtgaataacttttaaaaagttaatgtgtgagcaagtggtgcatagatacaataaacagaatataaatatggcaattattcattaattggtcttcgttgctatgaaacttacataaattgaatctacaagcctatattacacaaatttagcttgtatatgtcaagtggctacccatgctcgcctcgtagagtagaggccactttgaagaacagtgggagaccacgcctaggaagggtcgtgggtgctagcgctttttgtactctaatgttgagtagataaaactactaatttgtcatagagttttgtatgctggttatgagtagtatttgcaatggtgctctccattatagtatcttggtaggagaacgagctccatgttcttgttgtaccttcccagcttgtaggctcccttactagttatttatgtaacttgataagtgccttcctagttaagtctaaacactcctgttgttgagtgtttagtatccaggaacactcttcggagcagcatgtctcctatgaagaattttctactcttgacgtctttgttgaagtgccttgcaactttttgctggaaggcttgtagcttttagttggcttgttctttctttcttctacttcgtcaagggactttaccagcagggtgccgtttgtttgttggtcataggttgttcttctgtgagacggtggcactagctctataggcaacatcaccttgtagccataagctagagcaaatagagttcgcctagtggtcatcttctcaattgtcctatgcgaccataggacctctaggagcagtttaggctagtttccttttgcttcttcaaggtgtccttgagggttttgttaactacttctaccttcccatttgcttgaggatgggccacgacaaagaagctcttgatgtttccatgtctgttgcattaatcaatgaatatgtcactgtcgaactgttttccgttgtctgacacaatcttctggtgaatgtcaaactgacatatgatgttcttgataacaaaatcaaggaccttctcggtggtggttgttgccaggggttcagcttcgcccatttggtgaagtagtatactaagacgacaacaaattgcacccctccttttccctttgggnnnnnnnnnnttaggtctatcccccacactacgatgggccaaggagattgcatcatcttgagctcatttggtggagctcttggtatctttgaaaatctctggcacttgtcacattttctgacatacccttgatcattgttggctaaaagtacccgtgtcagagtatctttgtggacgagaatttcccctagcatgattgcttcaaaagccttcatgcattactatcaaaagccgttaagctttggctttggtgacacaactcaagagaggcatagacaaactccatctgtacattatcccatctaggatcaagtacctagcaacttttcatcttagttttctagcctcgtttttgtcatctcgcaaggctccggtttggagataagctacgatatgtgtcatccatgttggagtgtcatccaacatgtcaacttcctccgggacaataatgatgggttcttctaagaaccgtgtgggcactaagtttgctttgtcagctatggtactgctcgctaggtaggcaagtgcatctcctgttgcattttattctttgtggatctgattgattgtgcaacctttaagctgacttaacaagtttttgtcgagcaaatttcgcaacaccaaaaatgaataataataataataagaaattatatgaggaacaattgcgagtattcaacctaaaacggtgagtactcgaattgggaacgtaagtacttagtacaaactagagatatcaagaagacaaaggagtatagtggttcagtcagatcacagtctacttagtccactgttgcaagagtttcgtaggtgtcatttcatggtgcattcattgcattcattgtcaatccgtttatacattgattcacagtaattaaactaaaacgtaaacatcaataaatgaa

SEQ ID NO: 34926 - DNA, 1772 bp, Cannabis sativa
  modified_base (1167)..(1173): a, c, t, g, unknown or other
cctctttcaaccaaaactgattttccctttccttccaaatacttctttttgagtcaaaatctcataatatgtttttttttttttttatggataaaaaacttttggttgctgctgcaacctttgaaaatgctcaattaccagttggttggaatacttatcctctgttttgtgagtgtttgaatatgtttaagtcttttgacaaggttgttgtgtgtcatgtgaatcgtgagaacaatgtaatggctgatgtgcttgctcgttgggcgagagtgcataaggtcgaggccacgggtctcttaagggatgtagccccctcttgtggctactagttgtcttttgctttcataaaacttatgttgctcttcctcatacaacttttgtgaaacaacatcaattttttgacaaagttatctcagagtggtttgtattttatgttgtccttagctaatttttgtgcaataaaaatgatttatattgtcgagtattaacaattttgaaagggaattacacagtggtctatattttatattggcctttgtgattttatatcagtagaattattcatttttctagtaaaataatcaataataagtctataactgtagtagcttacgattatcttaacctcataaaatagtttaaactttcttattgtcatcaatactaccactactgcatatctctatcatatcatttctacaactctttccaatttgatcagtgtctcttttaccaataaggacattattagtttgaaaaccatgagttagcattttatgtaagaattcaagagtagagtgaaaggttctatctaggtatggaaaaatgggtcttttttgccgattggggggctgccgcgaaccaaaacattggagtcgttatccaggtctttgccccagtctggcccagcccactactttttctttcaggttgggtccgacccgcccttgactcaatttttttaggtcagtgtgtaccaaccgtaattcaaatattaaattaaaaaatagatctatcttcttcttcatttgctcaatttcttcatctaacatatgttaggcataaaatattaatgattttgttaagaaattacatttaattctaatataattataatatgtaatatatagagataatttcacaagtacacaaaaataacaaaaaaannnnnnnaatacggtttcacggaattttaaaaatttttacgatttttttattttatttatagaaaatacggtctttttatgttgtactcttgttaatttgttattgattttttgttatctgcatgttattttttgttgttatttaaatgtattttcatgttacttttatgtaactttcttgttttttttcatattgtttctatgaaaactgtaaaaatatatattttttttttaaaatataccttatgtaattatcccatatatataattatattttttgataaaaatgttaggttaaaaaaaattcagggtgggttagacccaactcgattttggcgagttggagttgacctgcactgactcagacctaacccaacttaggaggatcagggttgaccggccttaggcgagccggtactaacctgtcctgattcaaaaagcttaatgggttggagaggggcaggtcgaaaatgggctaggacagctcggtaacgggtcggggccgactcaccccattagatccctatgagtaagggtgggcatcatccaatccaatccaattgaaccgaaccgatccaatccaatccaattacaattggattggat

SEQ ID NO: 34927 - DNA, 1974 bp, Cannabis sativa
tatatacaactgacatttgcaaaaacacagtttttcaagtttaattttaaagagactagtttaaaaaaaaaaaatcataacattttgacgacaaataatttttctaattaatatataatataatgtttttttctattgacaaagacctaccttaatttactactgcacttgccggatttccttttgaatcattatatgagtgagtttatatatataatcaagaattagaatatgtatacattgtatacaattttctaaacatatacttaagtttgacttttttttctttaatggaatcaagtttgaatctcactgtaatattatatacgtgaactaaattttgggctgttttaagtgttgcatggtcaaaatttctggatatgcttatcataataaaacagtattattaactaaattttaatttaaaaatcatccctttaattttataatatggtcaatcatagtgggaagaagtcaaatggttccctaatgacccatgtcacatgtggagacaagttaaagaatccatgcaatgcaaaacaaatcctgtgacatgcatattacatatgtttgtaaaagtattaatttaattttataactaattaaaaattaataatgatcaatgataaaagctcaagtagtataaatattgaaatgaaagtaatgttatgatctagtgattctgtgaaattgtatatcggagctataaggaccaagactgagaggtggccaaaataaagaaaaagaaaatgaggggccaagagtctttggccttgaccaccttctaattgaatcggattgagtaagttttctatgtttaattcttatttagcacttattttaaatggtattatttgtggagtttgttagtgtgaaatttttattttatcctagaacaccaggttaagtttagctgggaggaataaaaatataagaatatgaataagaatgagaatataaattacaatggaataaaataaaatttaaaatgcatacaaaaattgataaaaaaaaaataattaaattttttgtcatgttacattagaatattagaatggtcttttcttttattgaatttcaaaatggaatactcattccaccaaaatgatggaaaggatattctattggaataacatttaaatatactttaaaatccaaccaaataaataaataaaataaaaattattttttttctatttactttttagcggttcacttgaaggtggtgcttttcaaagggtatttttttaaaaaaataaatctttggctcgcatgcatatatgacaatccttagttatatatgattcacaaactattatcaattagtatttatatcaagtatcacaagaagtagtggtatatcattaagttgtgcatttcaatattgaattttctaaataatataaaatactagacattcaacataaaagaggagatatttttataaattaaaaaaatatatataattgtatgaaattttaaatatttttactatttataaatttttatttacaaaaaatacaaattattgatattttcatactttttttgtattgtaattttgttttttttttgttatttatatattgtttttatgttattttttgttatttttatgtaattttttaattattttttttaataaaacattgtaaaattataattaaaaaataaaaacataaaattgaacaaaaaaaattgtaagaatataaaaagaattatttgatcataaaaatgttaaaaaaatttgtcaaaaaaatagattgtgtaaattttcccaaagaaaaaaaaaccaactatatcttagactccgcataggtataatgctaattactaagcatcttagttatcaaataatgatgtttttatttttactattctcatttcttattatttttatttgggtaaatactatttgagatcctgtgttttgcaaaaattattaattgaattctttattttgttaaatgacaa

SEQ ID NO: 34928 - DNA, 1585 bp, Cannabis sativa
tttctttgtcttatttcaattaagttcaagttttgattttgtgattagtttaattttgatttgtgtttcttgaacattgttagtgttgtaacagcttgttttgagggtgaggattcaccacacggagatattttatcattacccttacaatacacattagttgttgtgctaaaaagatgacaaaaaaatacatcacataacaaaataaaaagcaaatgaacacaaaaaaaaaaaaaacaaagattacattaaaaacacctttacattgatttttgctttctaagccctttactaagccaaattttaaactcagactccaattagtgatcaacagactcaccaatcttgtcatccaaggggcacaaaccaccaacatacttaaccactttaaaaagagactcatcaggtgaaacagaagtagaacatgatttggaatcaccaaaagtaagctccatgaatggagacttcaagactgctcttttcttctcatccttcttctgaggacttaataaatgagtctcttgaaaaacaaccatttcaagattattcttttcagaaacctcttcagagccagaaccaacaacaacaggatttgaggaaaccatctgcaaaaaataaaacatgaattttttaattttaaaaaatcaaggcaaaacactaataaaacaacaccacaacaaaacaaaaacaaacaaaaagagactaaagaaaaaaaaacatactatttttttctacagcgtcaacagcagatgcaatagttgcagcaacattaactttgtcatcatcaacaatagggtctgcttgttgagactgacatcaaaaataatagtggaaaaatattaaaacaacacaaaaacctatcatacaacaaaaaacaaaaaagtggaaaataaaaataaataaaagaaagctggttaacatttgcaatagtttccaaatttctagacttcttggcatcatcaatggtggcatctttgtaagtaaaactcattttgccagtatcatcatcatttgaaacaccttcaacaacaacaacagcatcatcattcctcacatctccaattccagcctcaccttgcccaataccaactccagcatcatcgagatcatcatcatcatcactaccatccccataatcatcatcagcaatatcatctcctttgtcatcctcatcttgagcatcattaccttcctttaaaattgactcttcatcatcatcatttttagaagtgcggagagcatcatcagactgagttctagtttgagtatgagcagcatgggagaaatgaaaacaaaaaaaaaaaccaaaattataattcataactaacttaagaaaaatagtaaaaaactattaaaataatataaaaaaaccacaaaaaaaacatgaacatcacctcaataagaatgtccagcttcttgatcatttcagcaaaagaatttataaaaatatgctgctgactaagaacaacagacatattttttttttcaattcctcatactcaagacgggtgacatgctcatgagcattcgataaagatgcactgtaacaccccgatttcccgagatgtcacataggatagtccgt

SEQ ID NO: 34929 - DNA, 1467 bp, Cannabis sativa
caaaaaaggactttacaatttttaatgaccttaaaagttcagggaatatgatttggtacatatcaaagttcaggcggcgaaaatcctaattaacctttaaaatataatataaaaattagcatatataattattaattattaccttaataattacacgatttagtacttacataataattttcaaatacaaaagaggatagtataaaataggtacgaaaattgttataaaattaacaaattatgggaagaacattaacatagatccaaatatgtatgattacttgaaagttgaaaccatattagctcctttgcaatcttaaaaaaatttgacattatttatcattgttaatttatatacgaaatacggtagtaaatgaaaaaaaaaaaaattgatgcatttttatgagcatgtttgaaagttattttgtaattaattatgttgtgtaattactaaagtaataattatactattttaaatacaaaagtatatttgaatgtgcagtaataattacatatattacatatgaattttagtttgtttatttagcaaaatagttattaattaattatacaaaaaataatattatttattaattaatatttaaaatatttttttttaatgattacgttgtaattaaacttaattcttataggtcacaaaaataaagagtgtaatttggatttcttaattacattggattacatagttaacatatgatcaaacaaaatattaaattaataattaccttgaattatacctaaatctaatgacaaattagttttccaaacacattggtaacatacttgccattgttgattatacacgttgactatatggtatatttatttacttattactattaggtaatgggagaaagagtattcattttgatttggttgagtgaagaaagcaaccgttcatttcttttttgaggatgaccaaactaaattgctcatctcctttcacatttactaattagtattacttgtaatttttcttccaaaactcctttaatataacatttaattttgtgtgacgactgatgagtaatgaagaccagcagcacagataaatcttaatttttatatcataaaattatatatgatgatatcattactacaaaagattttatttctgtcggtcttcaaatcagttttttttatgactatcactaataaagttatgtgactatataaaaccaacagaaaaacttaggtattttcgacagttttaaacagtggtgagacattcctgacatgttattatagtcacttaaaaattgacaagattttttaattgggtatccctaatggtttaaaaccgtcgagtatactatagctgacagtttaaaatcgttagctatagtatacccgacgattttaaactgttggggatacccaatctaaataaaaaaaactccaaaattattttcatttcatatcatttctgtaatgaccgctctagta

SEQ ID NO: 34930 - DNA, 2088 bp, Cannabis sativa
aaattttattaaatctaaaatttcctgtgggctaaattttaaatctaataaaattatatgaactgtatgaaagatttaatgaaatatttgatttagaaaaacgacgaataaaatctatctcaattaaaatttgtgataatactattaaattaaatcctcataacttcatgtggggtaaattaagagaatttaacttaatatattatcttaattaattataaaaatataatacaattcctgtggggtataattactacctatataattaattacaagttatatccattaaagtgaattttaattaatatataattttatataattaaagatactgtggctacttcctaattatttaaaattatattttcacttagacattaagtattgagctctacctaaaagtaatttcgttattaacataatagacaatcactaaaattaatgctcctagtgtagtcatccgaagatcattaaaaaccgttctagatatgagtatttatccaagttcatattttcttatatcaaaccacaaaattacttatgttttattcatattttattcattttaaaaaaaatttatgaatattcaacttatcttaatgtttgaatatttctaaatatatctagcaccataaaaagaatttacgtataacatttaaatcatacaaatctaaattaattgtactaataataaatttaccaaataaatacaaattaatacaattattgtatgataattaattaaatgtaaattcctaaaatttagacaataaattacataaatttggtaatatataatgaaatgaataattataaagattagtacaattgttacatgcctaaataatcatgtaataaattagcatattaaatttttttccacttttaatttatactaaataacatataaattctaagtatatgtattaaataaaaaaatggaaaataaataaatgtaatttattgactaaataaatccaaaataggaaaataattaatattctaaataaataaaaaatttataaaatttttgaattttcctttttttttttgaaaatgacactgcgagtaacaacaagtcatttttttaactgaagggatgcctcacacgacgaaaaacgacatggaaaatgacacctcgtgtggaacaaacgatggttgccacaaaaataaaaaacgacacgtcatttgggttcttcttcaacctccaaccggatcaaatttgacccattttcagccacgtgggtccaatggacctaacccaaatccgatcggaattttttattctgacgaccaaaatagcccaaatcaattctaaatgaatttaaatgcataaattaagacatttaaatatatttcatgcattgaaaatacgtaaaacaaagactttaaaattactaaaaaaatttaggtccgaatgaatttcccaaattttttttgagattactttgtttttctgaagagtttttcatgcttaaaacgatctataatattatatgaatgtattgaagcatatagatatagaaataaacataaaaaaaactcaaataagaacaaataaactgaaaactaaactgttcttgtttatatatacacccatataatgtatataccgcataaaaatattataaatatatgaaaaagagtattataaaaattatcatgcaataaaatcatataatcaatgtataatatatataaacatattaaatgaaatatatatatataaataatcgtgattattaaaatatgaaagtatatatataaaacatataaatgaagaacaccgtatacgtatatatatgaaaaaaattcaaataaaaataaggtagagataaaaaccgctttgataccaactattagactataatataatatgaacaagaaaacattaataaacaatatgtaatgtagaataaactgtaaacatatcaaaattgtatatgtaatgaaaggatcaaaatagctccagctattgatatttgaacttcaatccctgcgatagcttcggtatgggaaattgagcttcttcgctctctcagctctctttagatagaattttgatgaatagaatagaatgagtgaaga

SEQ ID NO: 34931 - DNA, 2173 bp, Cannabis sativa
  modified_base (754)..(756): a, c, t, g, unknown or other
aagctaggattgatggctgggaataattccatccactcaatatctcctttcctgcggccaaactctttagcagatacaaacttttttgcattagcattctccacctgaatgttctgtttgatcgttggtttccacggctccttcactacattcgcccacgatcgctgattcaataatcttctattgtttgtctctgctttctgctgaagcctattcccgttaacaatagcttgctctctcttcatagtgctgttgagacaccttaaaaaatcagaccaccccttcgccttctcttcttcaggtatgatgactgttttcatcacgttgttcttaagcactgaaattttcaaaaaacatccttttgtattcgaaaagcactccacgagatagcaaccagaactatttcgaaacgatcttttgaagctgactcttcgcctttcctctttctgctggacttccttcaaggtctcgatgatccaatccacaacatcaatccttatagcaacttcatacccaaaatgtctagttctttcacaaatgcggacagagccgccatcggacgtcaaagtaatcatgaacaccttgtgtttggtgtggaaactccaatattttcggagattctgattataagtcgaagcagtattatttttccatcaaaaccagtggggtagtgaccttttttcttcccaaaaccagtggggtttcggtgcattccatggacagaagggccatggaaccccctcgtgtgcatggnnnagttctcaatcagaggagagagaaaatttattgacatatcaggacctattaactgtgtaaaaagagacttgtagactctgtaaaagtatcataagagatcatctgtatagagaggtttgactgcctttaatcagtctaaatgttcagttgtaattcttgattgttctctcctttagaacaagttatcaataaaagagaaagaggactttcagtaacagatctgtttagctctaacaactctgttgtgtgtgtaaagaaaactttttttttttttttttctgaaaaagaagtcacttgtcttagattgacccctcccaaattttattcgggtcttgcttatggaggatgaaaattgtggttacaacacaagcataagacacaaaaataataaataaatacaaacatgaatcttaattacagctgactatgttttcctagtgtaaaatgagactccattctctagtcaaatcttgaaatgctaacctttcaaaccattcgcttaaataagcaggtggccacccagaatttaatcttttcctaaaccacttcagccccattttgaactcttgcaaaggtcctctcatttctttccagccaaccaccccaaaatatagccaaaaactgctgctgtccacaattgtttggttctccaccctcctttcagcttgcacatgatcagctggctacatgtatgatcataccaattggttggtgttatttgtagatgctgtgtacgtgacaatcacagaaggatgccacgtacagatcatgcatggttagtatatatcttccgtccttcggtgtcacggaaggtgctatataccagaagttattcggaggctctccctgtcagcaaaggcagaaagaactctgagattctcattaataaactattattgagaaggatcaaaagttatgggtgttccaggaggttagcaggttagtctggttcgggaaagctctggctagatgttcttggaacttattcgggtgtcttatccggaactcaaggcgacggttgcattccttcttgacaccaaatcagattttgtcacctacgttagaccttggtagtgcgtgtacgtgcttctgcaactctcttttgtccaacagcttgtatagacaccaaattatcaactttgcaaggtaaaacctttgggctacacgtgtctttcgccccacgaatttgattgcagtagccacacaccacacgatgaggagacaccttatcaaccaacagttggatcgccaggttgagttatcagccattgttacccgttgaatatgaaaccctaggtcggtgaagggtatgttctcatccatacatgtgcttataaatacccttatttttcatgtgcaaagagtgaacatttttgttggaatatattttaccaggatctagatttttttttttttt

SEQ ID NO: 34932 - DNA, 1464 bp, Cannabis sativa
aatttgttgaaagaaaatttaaaagtaatttatactacatgtttttatttaaattcaatgactaattaaaatttagattttatatattgtgttatgtttaaaatattaacatacactatatcgacgaaactaaactaaaattacagttgtactaatttcataggtactgctaaaaatatcattagatttatgttggttacaaactcaaaatgttaggttcctatgtcacaattcttcctataatatattgaaaatgtacataatgactaagacttttttttttcatcattgccttaattacaaatttgtaatgaagattttagatagtaatttttttttatataacacatagtaattgtttagtatagtattgtattatatcatattatattaaattgtgcttgtatatattatagattgtaaatactattttggattgtgtgttttgtaaaaattattgattgaatttttctgttttgttaaatgataaaatgaactatatattttttaaaattgtacaaataagatcatgaactgattttttatcaaaataaaatttaataataatctgatatgttgtgacaaaatttgttatatttttatctatctgtttgtgttagaaattatcttaacgttagttatattaaaaataaaattgttgaaaattgagctcaatatcttacttttaccattttaaaaaatatagagtctattttgtcatttaacaaaataaaaagtccatttaataacttttgtaaaacataaagtctaaaataatatttagcttatattatatgctaatacaagttaatattaagtgtagtacctactatataaaaatataatatataatacaatttaatataatattatattaactataccatgcaaatacaacgtataatagtgtactaaactattgcatttttttcttaaaaaaaaaaaagaaaaaaagaaaagtataatgtattttttcctttttgagaattgatcaagttcaataaattctttgagtatatagtcaaacacgtcgaaaaaatctcatcatcatcgtgtcggttcatatatattcccagcctctagaattactttcaatacattccacaaattttcatagttaaattgattataatgaaatttaaatttaactagctagaaaacccaccaataaaatttggactcaatctatatctttatttggtcaaactggtctgatcaataaatattgctggaatggaatactttcatattgtatagcgatacagctgtgattctgctctaaaaagtaaaaagtagttgttaaaagatcacactttgtgtaaaaatatattaagagagaacaaaactaaatttatatttttcatacattatttcaacaacggtagagagatttttcttttttctttttttttttttaaaaaaaatggtagtaattaagaaagcgttttcttaattagtgccttt

SEQ ID NO: 34933 - DNA, 2686 bp, Cannabis sativa
  modified_base (367)..(372): a, c, t, g, unknown or other
aaaaatcttgtgtgtttttacttttctacattgtttgtttttttggttttattctgtagttacagaataactatttcagttcatatttattattatccaattaattaattaattaattaaatagtattattaaaatatgaaatttcatatataataacaaacaaataaaaaaaatacgctaataaaattatatgtcatatcaacaaaaataaaataaaaatggaacttaaatattattttttaaaaaataatatatcgtataacaaaaaatacatataccattcaccaaaacatatatactaataataataattatatatattactaatatatatatgttcactaactaaattatataccacaattnnnnnntatatatatatatatcatgacaacgaaatcatataccaccactgtatattttataaaatagaaactaattaaatattattaaaaataaataaaacactatccaactaaaaaatataaaaaataataattatatatagcatgccaataaaattgtatacatacatgtattatactaacaaaattatataccactattatacataacaaaataaagaataaatatcatttaagaataataaaataccatacaacaaaatagaattacattgtacaacaaaatctagctttaaaatagaaatttttttaacaaaattaattataccataatctttgaataatttacttctaattcaaataatatgacccaactcacagtgagttaaaaagcccaaaacattgttcccactttttcctttctcacttctccggtgtatctctcgtattcatcaccgtcagaatttccattcgaaagtttcgcgcgtcgcagtgaatttcggagctcaccaccatcaagggaacttaaccctagtctcgtcgatgaaaggaagacggtccaaggattgaagaaacccctaggtgaagctctacaaactcctctgtgctaagccaggttcttcattggggagccacgacagaatttagttcccaagctcacgtgttggcatttcatagatctctattgagaacgaactttgtagagagtgagagtagattgctaatcgatctggttggtcaaatataggtaagagttccaattatccaactctctttgctgagttataattttaaaaaaaatagttgaatcattagtctaattttaggccgttggaattgaaatttagtattttggaaagatacataaaatcatcatgagtcattgttagttattgattatttaggtcgttgaactaattagtctgtgtagtttaataattatgtaaatgggtttgtagagccacgaaaagaggatctatgggtgagaatggaaaatataccaagagaatggctattatggagaaatttctatagttaaaaccctcgaaattttgagggaagccatgatccatcaattgcagagatgtggcttaagttaattaaggagaaatttgatatcttggatgtgcctccaaattatagaatgcaattcgccatgtttttttttttcgaggggaatgctgaggagtggtggtgggacttgacaaaagatgatcatgacgtggggaacatgaaatgggattaatttgagcagtttttttaggagaagtttgttaatgttgatgatggtgatttctcaaagatttcagatgtttgtcttgatgagattcttggtccattcaagtgttcaaatcataagaacaaaaatagaaataggaggatgcctaggaaaaaccagaggcagctgaaacgctcacaggtttatgacaactctaatgagggaaagcgacaagataacttcgataattcggttcaaaataaaaggttcaaacatgcaaagttcaactacaaaggatctggaacagaatttcaatggtgtcaaatgtagtagggctcatatggggagtgctgggtttataccattgcttgcttcctgtgcaggcaagaaggacacctagcatggagttgcacacagtacaaacaggaggaaccaaagcagaacattttatttaagggcgaggtgttctcattgatttaaatcgaggctgaagttagctagactgtaataatttaggtcagaaatctattgctagaatttcatgttcaattttaattgattctgctgctgcactcttatgaattcctctaggactgttaagagtatggctccaatatagagttatcagatctgtgattgtgccttttgttttggttggaacaaacatgttcatcgaaaactaaggaaaaatgatgggaaccactggaaggggtctctccctttgataaactccaacataattattagaactcttcttgctagatcatcaataataacactgttcaaataataataaaaaaacaaacatttaggaaaacatttagatgagtctaacacgctaaaaaaagtactctaaaggtgatattgcgggggacactcaagctttgactatgacctgtgcatcagagagaatggcaaagttgttccagtgtctggcctgagcccactctaatgtcagttttgatagccagtaactctccctctaaaggtgaagaagctttaccacaaagatgttatatgcaactatggtaggagtggtgtacaacatttagattaataggaatatgtgtattttgagttgaaatctttatctctagatag

SEQ ID NO: 34934 - DNA, 2545 bp, Cannabis sativa
aggatctagatttactgacatatatgtttgatttaccatgtagtagacttaccttttttaaaatctgtgaacaactctaggcgagctttacacatagctttaaatgcaatgtcatctagctaagcatacaaaccagttgacttctccttttcatttacaagttctttatcagtctcttcaatcttattctgtaaagttttaagcttttcaacgaccctcttgttttcctcctgaagctttttgttagacttcttaagggcagtgctctccttgtcaagctatttgcgatctcgacaaataaaaatcacatcggtaagagactgtcaggaacaaacaaaagttagaacaaataaaaacctcaacaagaaagaagctttaaaaagatacttacttgatattggtttttgaagtgacaacacccttcaaagatgcaaaagtgcttgaaggtcccgtaattgatgattgccccttggaaccagttttttgagtcgtggccttcttggctcttgccaaaatattagaagaggatggcattatgaaagacatcctcttagtgtattggtctgctagagttcaatcttcctctgttaaatgagtaacaatagaaaacttagccccagtcaactctaaagttcgcttcaataggtaaacaaagattcgaccagacagtcgaataaggaaattaccttctttccgccccttaactttgctccaaagaaaacttgaagccaaatctttttcgttcaaaaatattttccaccacctatcctcctgagagattgcaaaaatctctcgcaactttcgcttgttttgggatgacaaagcaggaacggtccttggttctccacctacaacagagaaatgcaaacaaattagaaacacaagaatcacatacaaaatgtaagatgccagaaaatataatggcctaatgtgtggcacccacctaataccctccaactagtatggaacctatcagctccatgtgtgaacattccttctccatggaagaaacaataaaattctttccaatcccgatttgtggattttggttttcaaatcaaaaactggtcctcatttcgacttacaaaactatacctccccttttctttatcatgttcttttacgatgtaaagagcacgaaattctactaagtcaacacttatctcaaataactcaaagaacctttcaatactaaaaagcaatctccaagaaataggcattagttggctaggagcgatttgataccaattgaggatcgataaaacaaaaggtggaaaaagaaacctgaagcctcgaaaaaaggtatgcgaatacatgccacaccaatcaggaacatcccagtctattctttcctccctcctaagtagcctcattttcatattacggggaatgccataagccgatctcatttgagctaggagtggaaccgtcaatttagagccaagattaatgcataatatactctgtgatttgcctaggaaactcggtccatcatcctcattcactaattgagctaacccaattactgggacttcttctatgtctaccgctaacccaattgcatcatggtcatctacatcctgaccataatactcttctgcgacggtgacaggagcgagagacgaggcatccagaacctctcaatcaaaatcgccatccatgtccgtaaggaccacaaaatgccaaccattgctatcaatatcggaatgtatcgatctagcaaccatatactagggacaaagcgtaaggggtacccactttctttctactactcaacataagtaaaaatactattagaaaatatggtatctactagggatgccgacacaaagataaccctccttcaacattctatggtcccaagatagatacatagcttaggatctacacttttttgctactcaacaatcctaaaatggatgcagaacacaatatggacactctttgttactcaacagttcaagcatagaaacaagcatctaaaaatacattcccacatttctctagaattttctaaacgcccaatccaaaattcctagcccaagcccacaaacatataaaaatttgagaaaattacactacatatctcttttaacttgatgcgtttaatttttatcctctttcaaaatatcttatatttacctcttttttcaatcattctacaaagtttactcctattacttcatgatagttttcattcttttctaatcaaaatgttgccccaaactttctcacaaatctacacatccatctacaaagaacacaaatttattatgtttgaaattatgtcttagttatgtgagtgtgtgaggataatttgggtacaatactcataaaaagaggtatatttgaattaaattttatttggaggtaaatttgtttaatgtataacaaaagagggtattcttcaacttctccctaaaaattctcctatcacctttttataaatcaaaaagtcgttttcctcaaaacaaaaataaaattcacccctatatatatgcatatatatatgggtatgctcttaatgggtattaccaatgtatgg

SEQ ID NO: 34935 - DNA, 2449 bp, Cannabis sativa
  modified_base (69)..(78): a, c, t, g, unknown or other
tgtaaagtccatgaaaatccccatgagcacattgttatacccgaaatttggctagcacttcagaggagnnnnnnnnnnaaactgggaagaatacgaatcaacaaatgtaatgataattatatttaaaaatagaataactcattaaatgtagaattgacagagtatatttacaacccactgactgtaaggtcttacagatatacaaactgttgcctcgcgcattaacgagaaaccatgcgacactaaatgtgcaaggcgaggcatcaacctcacactatgcgcatgaaggacgtagacgagacatgatgactgttaagacactcagcgtataatcacattatacaaactaagtataacagtcgagtaaatctaaacaactaatagcaaggcatccatctcgctataggaagactcgctcatggtaccttcactaatcagctccaaacatctttcaatgagattcacagctccgtcgagtcagctctctcatatagaagctaacattcaaatgatgttgattgcaaaagttgaccttgtcaccaagaactgcgattgtcaaacggagcgttatgtcttcaagcgcataattgatgaggtttacattatcaacctcagaaagacatgggaaaagttctagctcactaccagggttattgttgctatgttcccagggagacatcccagaacaatatgtgttacaacatatttaatacatgtttacattgacccagtaaaatgggaccaatcacagttgtgtgattttcaaatattaaccgcatttactttacgtgggatgtaatccaatcccacgattttaggggattgttgttataaaatatcagtcaaatctgtaattaactgccctcctatctaattatacataggagcagtttacattgaaaaagggacaaaaaattcattagagaaaaagccctagaactacatcagaaatctaaataagattgactcgtggactatgcaaaattttaactgtaaaaccacgtaaaaacctctgtgttcttattttttctttactgcttttgttttctgtgcaaatctatcacaatttaggctcaaatatagttaacaaaaatttgcgttaacaatttggtactttcattgagagccttcgtgaaaaaaccctccttatatacgtataaaaaaacaattttctccatggctggcaacggagaaaacgtcaacactcctcatgaagaaaccactcaccgtcctggaaaagagccaatgggctcccagaggcctcccgattgacgatctaaacggaccacttgttcaaggagaactcaacctaaagttggcccaagcacgcagaccactcgttccaggaggacccaacctgagggtggcccacgtacacgaaccacacgtacaaggagaacccagaatctgggaacaaggtatgatgaacatgaaatgagcattggtagagcccatcccagtctagttggtgaggatggcgcctacgatccaacaagatacacgccgatcgttgagttggaaaacagccaacttagacgctgcctggagggggcaaaccggcagaacgtcgagttggaacgtgagacagtcgctggcagagtggcataggagaataatacccaaaatcaacctgaccctagagttagaagaccatgaggcagacctcgcggctctcaaactaggagggaagagacagctcaagagaaccctcagaatgctcagaaagaacaacctggggaaactgagggtccccctgacaacgagtaacctggggaaactgaggttccctctaaaaatgaacagccaaatgatcatccagaattatctcatagaaatgagaataggaggcgaccagaaaccagggaacaggaaattccttgtggaaacgagggaaatcatgggacacaacctagaacacataggtcaccagcgaggaactgccaaaattcttcccaaacccatagggaaggggcacatacgaacccttgtggggggcacacgatgaaccacacccaagggagaagaacggggcgtgaagaggcgagtgtcacctcagggcgcacaagaacccacaaccaatcaacgcaaggaggagaaagtacttgttgcaacaatgataaagaaagcacaggcacgagtaagactgcaagtcactcaaggacgaggtccataagtaggacacagtccgtgagtagaacgagatccattagcaattataaccaaccagatctgcgagaacacttgaaccagaaaaacctgatattcgccaataactcggtccaaagcaagggtatacaatccaattgcgaatagatgagttggaggataagttcaggaggtatcaagtcggggagcaaggaaaacaatctggatatgactcagatgaagaactcgagccataccatcgagatatcatgaatatcctttcccctagggatttaaaaacccc

SEQ ID NO: 34936 - DNA, 2075 bp, Cannabis sativa
aatctatttctttattaataattgaatagaaaaaattacattgaaatatagttttatttagggcacaaagtccaacagaaatgttatatagttttagaatgaattattccctttctttagatgataatattgatagatttaatgagattattgtaggattggttaatataaaccacaaagttgatgaagaaatccaggccatcatcttggtgagatcacttccaattgcatatcaagaagtcaaggtagccatcaagtatggcagagacgtgattgcattggaggatgttcttgccgcacttaagtcgaaagatttcaaattacagttggagaaggaatccaagaaagaagaaatgtatttggtaagagaaagatcacccaagaaagtaagttcgaagagtaaacaccatcactctcaatcaagatcaaagtctagagagaaggaaacaaggaagtgttacttttgtggtaagtctggacacttgcaaagattttgcaagaagtacaaggagcaaaaaggcttcaacaaatatcacaatagagataggaaggacatccggcatcatcaccatgggaaggactctgctgtaatcgtagaaaatagtgatgactgctccatagatggagagttgttctttatctcagagtcatctatgaacaaggagtggattctcgattctggatgcacttatcacatgtgttctagtcgagagttattttttgatgataaatcaattgatggaggtaaagttctaataggaaatgatcattcttgcagggtcattggaaccgggaaggttgccatcaaacagtatgatggtagaatcaaggtgttaataaacgtaaggaacatctcagagcttagacgaaacctcatatccctaggcgtgcttgaagatgaaggatacagatacaagtccatgcacagaagcttgaggatcaccaaagtttctttggtaatgatggaaggtgaaaagatcaatggtttatatgttctccaaggagaaactgtcccagctggagaggcaagtatggtgaaagggctagaatcaaatatgaagttgtggcatcacagacttagacatataagtgaacagggcctcaaagaattgcacaaaaaaggtataattgaaaatttaaattcttgtgtgttactattttgtgaagcttgtgttttagaaaaacaacataagctgaaatttattccggcaaggcacacaaccaaaaagatatttgaatatgtgcatgctgatctttaggggccatacaaggtgcctactcattctagtaagtaatattttctttcaatagttgataattatagtaggtatgtttggacctatttgctattaaccaagattgagtgcctggagaagtttagaagttggaaatctcaggtgaaaaaccaaatagatcttaagattaagaaccttaggaacgataatgcattggagtttattaactccgaatttgacaagatgtgtcaagaatttggaatccctaggcatagaaccgtagtgaagaccccggagcaaaatggcgttgctgaaaggatgaatcgcaccttgttgaacaaagttagatgtctattattcaattatggatttgaaaaaccattttgaagggaagctctagcaacaacaacctccctataaataggagcccaaacagagttataggctttaaaatcccttatgaaatgtggtacaacagaacccccaacctaatgcatttaagaacattagggtgtacaacatatgtacaccaatctattgacaagctggaacctagagtcgtgaagggaactataacaccctaaataattaggcgcgctacccaagatacttaagaaatcttaatcccctaaacgggattactaataaaattagcgcggaaattaaactttaataacaaacggaatgaaaataaacttgtaataattaaaactttacaaattaaaagttacaaaagtcgggatcccaaaaatatttataaaactttattacaagtcctttttccattagccgacctaagcggcaaaatagagtcacaaaatacaacattggtagacccca

SEQ ID NO: 34937 - DNA, 2257 bp, Cannabis sativa
  modified_base (1821)..(1821): a, c, t, g, unknown or other
  modified_base (1900)..(1901): a, c, t, g, unknown or other
ttttcttatatataattgatatttacaaaaacacggtttttcagtaagcattatgtaatgaaaattaaagaaaatcgatcttaaaatagaagaaaaaatcattaaataaagtcttaatatagaaatttattagaaaaactaaaaagagtatagtgaaacttcttcttcctaatcttccatcatcggctgctcagctgcttgaatggtaaattgattgtactttgaactcatcgttcgttttggatctacatacaactgaattcatcattttttggctgataatttctccgtagttttttggacaaataacctatatttctgtaaaaataattattaatatttattttatgatgattaagataagattcattatacttttatttacaaaatgtataaattttatatatttatctttttatatttacctcatccgaatatgactttaattgaactgcagtacatgaaaatatgttttctgcaacatctccaaacatcacagtatctagtaactcagtaccatcgtcaagttgtacatatgtccttgcactaataatttatacagaatatataagggttggtatgaatgtcaattaagttcaaatgtcaatttagatataatgtgtttaccgtggtttaggaagacatctttttccgcaatttggattctcacaatctatttcttccttatcgttgtagaacataagtttcgtattacatcaatcacatgacatgtaataaaaattatggttgatgttttcaatatgattttaacttcaatccaatagtatgctttctgcagaaaaaataaactatatatgttaaaaaagttcttatattaagtttatagaagaattaatgaaattaaggagatttgagatagaaaatgaaaatgataagagttatatataagactctcatgttagctctacatgatcgatcatctgactcagacttcaatgactcccttttgacaaacagatattttctttcacttaaaagaaggtataatcagttatatatatatacatatatatgtgttaactatatgattgtctagctaactatagaattatatatatctagctagctataatataggttcttatattgagtttacagaagaattaaggagatttgagactagaaaataaaaatgataagtgttatatataagactcactctcatcctagctctatataattaatcaatcatctgactcagacttcagtgacttcctttcgacaaatagatgttttctttcacttaaaagaaggtaaaatcaattttatatatataccttatcaattcttctcctaggtacaatgtgttaactatagaattataaatatctaactagacataatataggttcttatattgagtttacagaagaattaataaaattaaggagattcgagacagaaaatgaaaatgataagagatgtatataaaaactctcatgctagctctacatgatcgatcatctgactcagacttcagtgactcccttttgacataaaagatattttctttcacttaaaagaatgtaaaatcaattttatatatgcactcttaatgagtattacccatgaatgggtaatattaaaatattttgagtttttatgattaatttttctatttaattaaaaatatttcttatttttacattatatggactgggattggtctatcagcagaaaaaaaaattagcaaaaaagtgattaaaaaaattgaatttgacttaaatattttttttttcatgtaaacatattttaatatagtgtaaaaagagatatatttttatattttctttaattaantagctaaattaagcatagaaatttgaatttctcttttattattcgctatcggattaaaatctaatagtttaatattttnnaaattaatatttatagttaattttatttattactcattaatgggtaatacccattaagaagtattacatcatatatatgtgtcacatgttagagaagaagggacggacccaacccatttatatataaattaattatatctttttcatctcgtaactactaactaattaacctatcataaaaattgaaatgtggttgatgatcacatgatcaaaataaaattacagtgacaaagttatccatgctctttctgggtggtgggaagttgatcaggaccggccctaggcataggcgggctaggcccgtgcctagggcccacactttccgggggcccgaaataaaaaaaaataaaaaaatt

SEQ ID NO: 34938 - DNA, 8022 bp, Cannabis sativa
  modified_base (579)..(586): a, c, t, g, unknown or other
  modified_base (7919)..(7930): a, c, t, g, unknown or other
aactaaaagaaaactactcagaacaagatattataatgataatcataataaatagtaagagtttaaggagaagaaaagaactatgatgaagaacactttgaagctgcgatcatcgtctcttccttgctctctctaagtttctatctcaatttggtagctctggggttctgaaattcgcagcctaaaaggtcctatttatagtgcttgaaaagatagatgaatcctcttagaattaggattttttttcaaaaaaaaaattataagtacgacgctactaattagtattttgcccataacttcttcaatacaactcagaattggaggattcaagatgttttaaaaatctaagaacgagatttgaaactttcatgttgagctccaagtctagatcttcctctaaagtcatcaaaattttcaattaagtttcactttgtaaaatcgagcttgccgacttctactattttctaccaaaatatgctaacatccctccaaatgactataactgaataattagtctttaaaatatccaaaacaattaaaatcacactaatcaataatttaaagaatcaatttaagaannnnnnnncataaattgatcatatttataagagaaacatggattcattaaaatctaaatcacgactcaactagtattccctttatactcgtcttttcctaaaattgtattattatttttacttcctatcttttaactttcttgattctctatgtgttgcgaggaacactctatctctctctacacttccagattttgatctctagctttgcaagtcaattgggaaagaaggttttgtacccttttaaacgttttgagatggcgacaccaagtctaacggtctgaactagtgagagtaatgacatctaccagctcagcttgttctttaatttgtttctattttagtttaactgaatttgctgttgagttatttgtaagggagagaaatattcttagagtattaattgtatttacagttgtgatttgtaaggggatttaaccaaaaatttccacctcaatcctcttacagatcacaacctaggatagtacagtttcttcctggggtctttttccactcctgtaacggtcatcctcaattactgatccctagtaagtttaacaatgtttgaacttgtttagggatacaactttagtacccacatctattgggttttcttctgtagagactttctatattaggacttcttcttatgtgaccttttctctaatgaaatggtatttaatttccacatgtttggttccgtatttaatttccacatgtttccccttagatagcttcaattcatctagtagtccttttattcatattccttcctttattgcctctgtaactgtcacatacttagatttagtagtagatataatgccactactagttgtaactgtactcttcggcttacacaactcctaccaattaggtagaaataagccgatgtaaactttctagaatctctatctcctacataatctgcatcactatacccctccatgcatgttgcattagatgtctcagtgaagattaatctagtgtcttgattccccaataggtaactaagtacccatttcatagcactctggtgttctttcccaggattagacatgtatctacttagaacacttaaagcataggcaaggtctgacctattgcataccattagatacataactgacccaacaaattttgagtatggcacattactcatagcttctatctttgctagtgtcgtgggacactagtccttgcttagttggtattggtttttaattggttgttttgtgatcttggcttccttcatagaaaatttatttagaattttccttatgtagtctttttgtgttagggttagggtccctttatttttgtcccttttgatgttgatacccagtatcttagtttgtttccctagatccttcatttaaaaccctaatttcaatcatcccttcatcgggtttactttaaccgtttttctgctcatgatgagcatgtcttccacatagagtaacaagtagatagcttcctctatcttagtgcctttgaagtatagaaagttgtcatagtaactcctagagaaccatttctttgtcataaaggtgtcaaaccttttactccattatctaggtgaccgtttgagtccatatagagatttgaccagtttatagaccattcttttactgcctttttcaatataccccttaggttttccatgtagatgtcctcatctagttccccatgcagaaaagttgttgtgacatccatttgatctacctctaggttgtattgaacagccaaggataacattatccttgtagtcttatacttgaccaccagagagaatattttagtgaagtcaattccctctttttgtgtaaatcccttagcaactaatcttgctttaaacttgattggtttagagttgtcccttccttctttatgtttaaacaaccatttgcaagacattatgctcttgccctcaggtcttgggaccacttttcaggtcttgtttttccttaaagaactcatttcctcatccatagctctgttctagtacttgcatccttcccttgaatagctttttcataggtttttagtatcgttttgtttaagttggtagcacttagaaaagcataagcaagaatctcttcccatggattatagataaatttctgtgttggcttagatgtcctcttggccatgtcccttgtcaactagtaattttgtagattctcatcctcctattgtggttcctgatggatatcctcttcttgatcttgggtagggtgttctatgccttattgttcaggttccacctgaactgggtccacctgatctgggtccacctaaactaggtcaagtgtgatctgcatgggttacatattgatagtagtaccttcactattactttctaaggaagcaacagtacttgaatctttgttagaaatacatggaaaaatatcttccttaaaaataacatctccactagtaatagttgagtccaggattctcctttacccacgatctattcccttttgtaccatctggatagcttagggacacacatttcaatgctcttggctctagctttcccacactttgatgtgcataacctgcacatataaatacctttagattagataagtctggtggcttatctaaccagacttcttttggggttttaaggtcaatggcactggagagaaatctgttgagtatattagctgttgttaaaattgcttctttccagaagcctttgtctatctagcttgcattaataagcatcacaattttttcattaaagtcttgttcatcctcttttccatcccattttgttggggtgtgagctttgttgtcttgtgatggtttacccctatctttttgctctaacccatgacctgttctcatatttttaagtcttagatttgtcaattttctagagttttcaattccacaaatttattaaaaatatcattcttttgttaaagtaaatatacccaaactttgtagaatgagcatcatctataaatagaaaataggaacttccaccatgtgtaggggttctctctacatcccaaagacctgagtggatatactcaagtatttgtttagttttgtgaattccagttttaaatttaagcctatgatattttcctaggatgcatgattcataaaaatcaattttacttacattgtctttacctaacaagtttttccactcatgatctataatcacttgtcactaatgtgacaaaatctcttgtgccacgggactgccttctagtcctcagattgcagtgttgttacactatgtaacaggctctccttgtaggtagtagagtccttcatgcttttggccttcgattttagtcatggagcctttgtttagctttatagtacctaattcaactttacttacaatacctaggccctctagcacacttaaagatattaagtttctagaaaaattaggcatatacctcacacttgttagtgtttgatttctatttgacgatctgtcttcaccgttagatttagttcgtcaagaagaacaacctccactaagccatttatttacagttcattacttttgttaatgacgtttttgtaactctgcccatttttggtaactttctagtgatatcgtatatagttttgataagttgttggcacgtgtgtgatctacccgttgaggtggccaatttgatatatactactactatttttggctatgtttctggtacactgatttttaccaccacagattgtctttgttcatcgcttaggtgaggttacttcaaacttcaaatatagtcatgttgtatgttgttggactcagtttcaagagtacattacaatgatgataataattatttaatttgagaatgtaggaaaaagtaacttttaggagtgactaaactatttgaacttaagaatcagaggcttaggagcatctcttttggagaaagattgatgatcctaatgaggtagggaatcaacttgattattggacttgatttgatatgtgctgaatagcattagacatattccaatttttataatttataagatattttaaaaatttaaaacttaatctgcatatttttcaggattgttccggggcactgagtggcaaatacatttttgcacaaatatttatgcaagttatgatattggatttattcaaaatacaattgttatgttgtcgtattttttaaaataaaagggaatatgttcttttattattctatttgtctgtttttcgttatactgatgagagccatgttgatcatgatttgtgcatattgttgtttcatgatttagtctatgtgtcttcataggtagatcaggtgtgcactcacctataggtgaaagacctagaatctgtacatgaagtgaattgaatataagccccaatattatggtggttatcaagtgagactaccaagtttttggatgtcattttcacctaggggtctagtggacggtgtgatatgcatgggtagtttttctcttgtgattatttgtggtctctctattttgctcgtacatgatgatgatgggatgttttattttaaaagctaaccatgcatagatttttattagactactattcttttgatattagttgtttttttattgggctttataagctcaccccctatatttcccttccaagaactcagttagtacttgtggatgtgagagaatcatggatggagaacggtgtgattatcttagtcctatcttagttattaaatttttctcttaaagattgattatatacctagctaattgataatggatggtctgtatcactctaattgccgtggaatggttaggaatgagaaataatgaatgcatagtattattttagtgcttcacaaattattaaatctaatcatttggtgactacataactgtggggatattattattttatagatatatatatcaacaagtggtactattttattataatcattctctatttattatagaaattattctataattttaatatgtattatgtataactttttaatataaattaagggatcatttgtaagtattattttctaacaagggttaaagagtgacctttgaccatccaagttatggatatatgatatatcacatatctgccacaacctactgctcgggtcttgacacaaaaaatgtaacctgagtcaatgatccagtcatctttcaaagatgatgctgccaaatagatttccccatcactatcacagccactaaagtagttggcaacctgtttgtccttgcgtttatttgagtgatgattcgatctctgagtatttgaattgtgtcctccatttctgtacttgtttaattgttttcgaaaataacaatcctttatcacgtgtccttgctttccacagtagaagcatccatcagggtctttaggttcttgtaatctgcctctaatctttttgttatatccttttgtaggccccctgccttggctttttcctcaattagggttaggatttttgcctttgtacttgccttgaccaaagtgcaattcagccctgaacttctaggtttttcatttctcatttccatatcttttgacattaaggcaaaaatcacttcatccagagtgattgatgttcttccatacttgatggatgtctttaactccctataggagtctactaaagcattcagcatcatgatggcctggttctcatcaattaaggcctcattttcccccgaatttgctaattcaatatgaattctcagaaatttatcgaagttctagtcaagacactagaatggactcatcttgaatctgaatattctttctttcaagaatatcttatttgtaaaggatttctgttgaatttcttcctctaatttcttccatattttagttggagttttttctttatcaaccaatcggattatggagtctaatagcttaaaaattataatcccaatggctctctcgaggatctcttcccgttggagcttgttagtatcaccagaccactgaatggggtcttcgagtacctaaacaacttttgttgagcaagtatggatctaatctttcttctatataggtcttgtagtctcctattccatcaaatttatcaatgtcaatttgaacattacacatgattaaaagaaaaattaacagagattgagttttagtagtttcaataggatcattcaaaatagcatccataaatttcctagtatcaaatactatcacttgaggatcaacttcctcttgtcttgctaggtttcttggttaatctttcttgttgatttcttgttcatgatactttgtattttacttcctcactgtaacttctgtgtctgttgtattttgtagctaaaccaagctctgctacctttacctttaagcacctacactaataaacaatcactaaagtgagtctccatggtcaaaactgacctttccttatgtttattgaataaacacttttatcctcacccaaaacgatacagttttggttttactcaaaaagttaaccctaaatgaatcactctagaatattcaacaaatcaatcctcacaattcgaaaaaccctagcagataaacattctagaattctaagagaaacataacttagatattcacacacaaagcactgatcttcaagatctagatcgatcttgaagagtcacacaataatcacaaatagaaagaaaatgaaagaacaacactggattttcttgaggttcaccacaaatattagggttacatacccgtgagctctcccaggaagataaagaagctctctgtactatcaaagatcgatccaggtacaacaatagaatccaagtcataactcgactggtattccctttaaactcttcttctttcttatagatgtattattatttttacttcttctcttttaacttttctcttctctttgtgttgcgaggaacattctatctctctctacacttccaggtctggatctctagcttcgcaactcagctaggaaatagggtttcgtactcttttaaaggcttcgagatggcaacactaggtttaacagtctgggctggtgagagtaactgtatctgccagctcagcttgttctttactttgtttctgttttaatttaattgaatatgttgttgagttaattgtaagggatagaaatatgcttaaaatatttattgtacttatagttgtggtttataaggggatttaactaacattatgtaaggataatatatttttaattgctcttctgtttttatttaatgcatgcttgcttgcaccttctttttagaaaagcatgttatctaaattggttcaaaatcttgaattcgatttgagtttagtttataattctgtatatattaagggtgtgtttggaagtnnnnnnnnnnnnactaggtagggtaattactagggtagtaattacacgttttagtaattacactatattttaaaatgcacggtgtgtttggatatgaggtggta

SEQ ID NO: 34939 - DNA, 1807 bp, Cannabis sativa
  modified_base (1480)..(1486): a, c, t, g, unknown or other
tgtaaagaatgctattaattatgtgaaaaccaagctccattttgattcgggcttagaaatgcctagggttggtagaagcgggggcttacttttgttatggactaatgatgtaaaaatcactctatgttctcaatctataagtcattttgattgttatgtgttgtgtgccattactaatgtttcgtttcacctcacttgcttttacggctctcccgtcgactctcttaaacctcacacttggaaaatcctgaaaaggatcggtcgggataatcctcgtgacccttggcttctcattggtgattttaatgctttcctcttctcccatgacaaaaaagggggtaatcctgacaggggcccttcttcggattttagacagttattggactcctttaatctttccctgattgaccccgtggggccctctctcacctggaacaacaatgtggcccacccaaaaaatatccaagagcggttggactgggggatcatcaacagtccttgggtaaatctttttcctgatgccgctcttaaccacttgggtttctttgggtctgaccacagagccttggaattagtcacatctaccattccgggaactgggtcaaggaatcatagtaagtggtttcattttgagaatgtatggctccaggacccgaactgggatagaattttcgatcagtcttggactaaacccttaacagcggaggaagctatccctaatctcatcgctacccaatccttgtgcgctcaaaagctcaacaattggaatcacaaaaaaaatttcaatttcaaaaagcaaatcagtaagctggagaaagagctagaattagcccggtccacccctatttgggacaaccgtactatagcaactataaaagatcttcaatcccggttcgatgctttactctacaaggaagaagcttactggaaacagtgggctcgtacccaatggttggctcaaggggataagaacacgaagttcttccaccgatttgcctcccaaaggaaaaaaacgaacaaaattcatcaactccatacgacaaatggtggcatggtctctgacgaggaaggaattattcgagaaattgagtctcacttcaatcagctcttcacctcctcaaaccccaccgattctgaagtgaatattgctttggaaggcatcatttgctctctctcggactctgacaaatccctcttaagtgagggtttttcccaggacgaaattgagaaagcattctttcagcttcctcttgataaagcccctggcccggatggcttcaactctcacttctacaaagccaactggcatgccgttaggaaagaagtgcttgaagccgcctccagcttcctcaatggaaatgcgaatgtggcccccctgaataacacccttatcacgctcattcccaaagtccatcagtctaagtacatctctgagtttcggcctatcagtttctgtaatatcatatataaaatcatttcnnnnnnnatcgccaataggctgaaacttgttctgaataccctaatctcacctcaccaaagcgctttcctcccgggccgactcatttctgacaacatcattatagcccaggaagttgcgcattccatcaagcttaagacgcgggggaaaaaagggatggatggcgatcaagcttgacatggctaaagccttcaaccgtgtggagtggcctttcatagtcgctattctcagaaaattccaattccccccaggtttgtccatctgatttatgcctgcatctccactgcctccttccaattcaacctaaatggcaaagtcttaggcagtgtc

SEQ ID NO: 34940 - DNA, 1307 bp, Cannabis sativa
taattaatgacatttgtatgaagcttgatgaaaagattcaattataattttgttaagttttttccttagtttataaatacatagtttagctaagttagaatagtataaaataagtatataagctttaatttatttttgtcctttagataattattatgtaaagatcttaaaagtacttttaatgtgtttgaatatcattaaaaagaaaatcttttgatattaaattaaaaattatgtaaattattttgattttaaaaataatttatcaaaatttttttgagagaagctacaaatcttagtttcttccaaaatgacttttaaacttttttataagaaatattttttattttttatccaaatacatctaaaatgactttttttaattctaaaagctaatctttagtaaacaacaaatgacttttgtttttggtttgattattaatgattgtaaaatcttactgttagttttacacaatgttagtcttcgttttgttagacgatcagctaatcgagtcgctcactttgttgctagacggtctcggtttttctgattgtaacattcatcggaatgttgttcctaatgatcttcaaatcctcttgtatgatgaatgctaaatttcaatgaagttgatattttatgttaaaaaagaaaattaaaagctaaaaaaaaattatagaaactgaccaaacgggagcaattatctcaccaaattattatataaaattgttgatcatatgatccgcttagtattgcactactaatttttattattatctcaatataacaatcattaagtactcataaatttcattattgattttctttcatttaattatctcaatttactatgctagtgttttataaatttctaacaaatgaaaaattcatcaaattcttttaaaatctatttggcttaatacagtttctatatatataatatatcagtgatcaacttggagaagtttgttttataaaatattcagttctttaatttcaacccgaatattgtataaaggaagagatattctcttaattatatgaatgaggagctagaagaagaatattctaatattacgcatgaatcatgatagagattgaagagcctacactctctaagaatcaggaataagaatataaataacaacgttatgatgagactgcaaaatttttttaatcagaaaaaacttagcaggaatttttagcttatctgatcttcattcaaaatgtgagccacaagaaagtgacagcacaagcattttagtttatcacaggataatcaatgaataagtatgcaaataataataat

SEQ ID NO: 34941 - DNA, 7298 bp, Cannabis sativa
gactatgaaattcagtaaatggatgttaaaacagctagccttcctacatggtatccttgaagagaaaatctatatgaggcaacctgagggttttgaaaatggtgatccagataaagtttgcctattgcagaagtccctttatggcctaaaactggcacctagacaatggaacatcagatttgatgaatttatggcaagaaccaaattcaacaagagcagctttgatccttgcatctactcaaatgataagttgttcatcttattgtatgtagatgacatacttgtggtggggaaaagcatgacataaatataggttataaaggatctcgtgagcaatgaatttgaaataaaagatttgggtgatgctaagaagatccttagtgtagaaatcataagaaatagacctgagaagatatgtctatcacataagtattatttggaaaaggttttgagcaaattcaacatgagcagtggccaaaccagtcactattcctatgactgctcacttcaaactctcaaaagatcaatcacctcaaacaaaagatgaaagaaaggttatggacagtgtgccatatgcaagtgcagtgggaagcctgatgtatgtcatggtttgtacaaagccagatcaggcactttccataaacatcacaagcaagtttatatctaaccctggagaataacactgctggaaagagctctaaatggatgataatgaggtatgttaaaggaacccttgacaccggtttagcttactatgctagctgcaacttactatgctagatcacttacaggttatgttttcacagctcaaggtggatgcataagttggaaatcaaacctgtaaaaggtagtagctatgccttccatcgaagcagagtatatggaagccactaaagcaatcaaagaagccatatgggtgaagggtttaactaaggaacttggcttcaattcagaatacatcacagtgtactatgacaatcaaagtgccttaaatttgactaaaaatctcatgtttcatgagaggccaaaacacattaacatcaagatgcctttcatccgagacatcattggcagaaataaagtgcaagtaagcaaagtgaacactaaggacaatccaactgacatgttcaccaaagaggttcctattatcaagcttaggcattgcctaaggctgctaagtattaacaccagtagctaatgcccttaagggctcttgaagcagtctattctttatcggtttagcttcactaacttcaactaaaggtggatttgtaatgttagctaaagttagttaagtctagctagtattcagttacaacaagtaaaatccttaaaagcttcaatctcgatagttaagtcagttggggacaatcctgtctttccaacactcttggacaatgcctttaaataccaacctctgctacagataaaaacaactttcgtgaacttcttcttcctcctctccaaaattctctttgtacaaaaataaaagctataaaactcgatcctattgtgagtttatagttgttggtgatcattaccattgtaacaccaagtgtgaatcataaatattgaagctaaagcctgttctatttgaggagtacacagttgccactgccaagcaactgatcgaacctcattaaattggtgtgatttgatttctgttttgcattttaagttttttcattctcttaattagttagttcaatttattgcactaattttcatatcttgattgtttttcgaggcgattaaaacaccacagactctttaaattgttatttgaaaattgtttcagctagttattatcacaacatttagtaacatataacttaaagatctgaatatatagtatgagggtttgttttcttaatattattgttggattcctggacaataatttagtaaagtttggtttgctcaaacttgtaatatttctctctcataataaagttaggtattttcaattttatggtcattgtaatatataggaggccaagaagcatatgagggttttatgttgagtgatatgttgtaaaaagctaatttttttcctcatcaaaagacaaagtacaattattttaattttggggaagattgtgattgattaaatgatcatcttaacgtcctactagcttagattatctctaatggttacactaatttggtataaaatcttttacttttagtacgccaacttcaataattcgtaccaaatatctcactaaataaatatattttaagtattttatattaataacccaaaatagctacattataatataattatagcatgactagtaataagaatttaaaatcttaaataacttagtaaaataaaataattgttaaatcaataagacattacatttttttttttaaaaaaaaaaaaaaacttaactaaaatcacacttaatatttattaaattattattttgctcattttaattcatgttgtttttattttatttagtattagtacttttgtcattattatttttctaaaattttctaatattctaagttctttataagtttttattattctctaaataattctagagttatcttcttaagttaagtagttctaatattctagagtttcttgacttccgcagtttcttcctccatagtcagttgtacacgatcagtcaacaactttgaatcagcttcaatgacaattcctccgtgatctcgcactatccaaccaatcccaagactatcattgtaatttgtaacaaaagaagcattcacattgatctaaatcatattattactaggtaaaatccaatgtatcaatcaaaatgcactcaaaactagcaaaatgtctgaaatgggacaatcataatcaaaaatcattcatatcctttttgtctctatgctgtttcattgaatttaactctcaaaaaggatacagtaaaacattgtaccatctttaatcacttcataatcaaaatacattagtcaaaatgacacacttacacattgtatagtaccatttctttgtgattttttggcattttgcttttgtaacttaagggacatatataatataaagatagatataagaaagatgtaatcaaatcttaaggctcctttgcattacagcatgagatcaggtgcagctaacctgggatcaagaaaaagtcacatcagaaagaaatcaaaagactcctttgagtgtcaataagaaaaacatgcaattattttttcttagatgaaaactaaaatgtatttagaaaataaattgaaatacaacagtaggtagcaaccaaattagatggccagcattacagattttgccacctgtaaaacaagattcattgtaatatcaacctaaatgagatgtacataattgcatgtcatctttggttaaaaggggtctctaattgaagcatgtcatcttcattcttgagctgaaaatctcagcacaattacaaactagctttaaattcaatactctcaaaaactgcattcactgaataaactgttccaatattcaacacaattatatcccatatgaaacctcatcttgccattcaacctcatcatcatctctctcttatggcccactaggcaaggaagaggttttcccattcacctagctagttggacaagattatgtccttagctagatttggcacatttacatgttacaatagatgcctgtttgataagacaatagttgactggtcccattttcttattcaaagtgctcctatcctaactcaccagtcagtttcataactcattctcacaacatacacaactcattgcccgtagatttcggtttggccagtgttccatcatatggtaatgcctttatctcatcccggaccccagtacttcattcaaggggacttgtgtgcaaaggttaactcaccaaaccaatagagactatttcttggtttgaaaaagctcaagatctaaaaactactgctttattgtaatcttcaagcttccttaccccaggtcatgctcctcggactgaaaaagaagaagaagacttattcatgttggaacatgtattaacaaaggacataaagcagaactctccaaataatgcagaagccataaagctaatgaaataatgtacaaataaactagatgagagagataatgtcttacatttactatctccaaagaatgtccaaaaaatgaaggctaagagtaagaggtttcttatgctcaaaataatccatgtcaactttacacagactcttgattctgaggtgatctgcatccacgctctacgaaccataacataaggttgtctgcctcttttaaatttccttctgacatcagtcttttactcaacttctcacaaaatttcaaatcgggtatcatattccgattgaacatcctattggccactctataagctgacataggaaaccctctgctcaaaaagctatccataagaatgtggcatgtattagcatcaatttttgaagctgttctcaaaaccttagtcaagagtttttcagcctcttcaaggtttccgaaactacataacttctcaatgacttgattatacacagtcctgcttttctgccttacaagcattttttctaataatttcaacaaatcatcaaccctgccaatctgacaataccaatgaataactgttctgtatgttacaggagtaggatctacaccttttccgagcatctttgctataagcgtagacatctcttctattctaccttttctccccaatgcattgactagcgctgtataggtgactgcatcagggtgtttgttgctaagatacatgtcgtcaagcaacgatagagcagcttccaagtcatccttttgacaatatccttgaataagagtagtaaaatttacaacattaacagcacaccctttttgcagacacccctccatgaacttcttagcttcatttgtttttccctctcggcatagagattgaatcattaaatttatttcaactgagtttggaaaaaatccctttctaatcatctcttcaacaagatcacaggcctcaaccaatttcccttccctacgaaaaccatgcatcacaacactataagttatagcatttggagtccaccaatcttcctcactcatattcagcatctctcttgcctctaatgtcttgccactttgacaaagcccgtttaataaggatgtataggatacagtatttggtttacaaccatgcttgtacatctgttgaagcattgttttagcttgatccagctttccttccctacaaaacccattaagaacagaggtgtatgttacaacatcgggaatgcaatcttttgagaacatctcattcacaatttctttcgccatgtcagtgttacgttccttgcagaatgaatgaactattgcagtatacccaaccttatcaacatggaatccctttgtttcagcttcccttaaaaattcaagggcctcatttccatggccatgttttgagagcatatggataaggttgttataagtaacctggtctgcaaccaatcccgcatcgttcattttctcaatcagccctctaacttctttgatccttttttctttgcaaagaaaacccatcacagaatagtaactaattttatctgggctgcaatccttaagtggcattttagctatcagctttaaggcatcatcaatccgatgcacattacaatatccttttatcaaacaattgtaggtgacaacatttggcctaattccgacaatttccatacgttccataaacttcaatgccttttctaacctatttcccataactagaacatggactgcagtgttacatactgacagattaggctctatccctgctttctgcatcaaagtcaacattctcagtgaattcctcaacttgcctgccctactatatgaaaccatcacaagaccaaaagcttcaggtgtacgctgtactctccggcgagccattagcttcaggaccctcttagcaccctgacacaacttagtcttgctaagaatttcaagcatcgcataatacactatcgggtcatgttgataccgccattgccgatcagcccaataaaacaatttcaaagcaattcgttcatcttcaaaagaacgcagaacagtacaaacctgcctaggcttgaggctccttaacaagtgtcttaattctccttcaagctttgagttccaagtcgacctaagatcaattaacctacaaacttctctcaccaaagggtgtttggattcatcatcctcatcaccttcaactctacaaacattttcttcatgtgcattattattattaccagtcaacttcaactccatataatcctcattaccatcactctcctctccttcttctacttcatcatcgctaccatcagactcgtcaaaattaaagttttgattgttttcagaatcgcctctggaacatccaaatgcaccaaaatcctcagaactctcacgacccatttccctaaatctttcatacccaccattggcattatcatgttctccataattcggtctacttctggttccaaatgtagtattgtaacacatcctttgcagataatataccatgctgcaaaagacaaaaatcctttcagcgtaagaatgaaagtatatctaacatttatcaaaatgaaaaacatcataccaagagctgttttagttatttgagtgttactaatatgtgttctagtaggctcaagtgaggcattcaaattcaaagagcttcggtacagccagaagaaggatcaacattgaattagctgactttataggagtttgaagatttgttttttccaattattattcttctattctctctctctctctctcctactttgctctgcatcactactaatttatatcataggaacaatgcagtaagcaagctcaagtacttaaaatacttaacccctcaaaaccatatttagttatcaaatctctagagcttcttttagcaaaagcatgttacttattcacttccccttgactactataacattcccaattcatgtttaacatttcctaattttcttatgattccatagtgctcaaataattaaatattttcaagttaaaagaggaaaagagcaaagagtaaacgaaaaaaggaaaagctttgaatgaacctttgtacctacaatgttgatcatatgtatatgtcattttcatggttacaccactcactagctgtttggctagagatgctactactacctacagagtaaaagacaaagataacataaagattgtcaaaacaatcatgattcatgaaaaaggtaagcatttgtgttattcataagaaaatcaaaaaggaa

SEQ ID NO: 34942 - DNA, 1795 bp, Cannabis sativa
  modified_base (1752)..(1770): a, c, t, g, unknown or other
cgtggtagagtaaaatatcaagaattctgtttttggtactacaagctatttagaatttttcagaaatttactgaaataatattgtaactataacgaacaccgctatcaaaatatttattttaaaaaatatttaaacacgtattttcgacacaaaacttacctaaaaagttgtaataagagattagaattagcaatcattattttttattgcttaacttttttcgactggtttaaggattgaattggattaaattatgatttgtttgattttagaatgattatattttgaaatattaaataaataaagataaattaaattaggtgttgtttggtaatacttttgtttcttaattttttaattacaaaaggaaagtaaattttttttgtaaattatgtttttcaaaaacaaaaaatgcattctgtaaccaattttattttttaattttaaaaacagaaaataaaagtgtgttctgtaaagttcattttgatttttattttttgattttatttaagtaggtttggggtcgaattcgaattcggatcagaagtcgggttcaatgccagggccgtgagggatttggatctaggtctagttggagtctaaaatattgattaagaaaaaaaactgtttaaaagaatactgaaagtgacttttttttgtttataaattttgattctcaatttaaaaagtaaaaagtaaaaatagatttatagaacatgtttttgaaaaaaaaaaatcacttttctaattataaaaataaaaaactgattaaaaaagtgtgaacaaacgccaccttaaaatatacttcattaattttctaatatatagaattttatttttctcgctatagtgagctggaatgctaggagtttgaatagtgatgaagcactgcgacatgcaaaattgctggtaaaacaacacaaaccagatgtgttcttttctatgaaaacaaaactaccggaatgtaaattagattttatcaacttctttgttttgagtttggttatgaagtaccaaacaattggtcttagtaggggtttaatgcatttataaaaagagacaatggaaatttttaatttaaatatgttggaatatattttattactaggatctagatttattatagatttattaacaagtatgtttattaacattttaaatatcaattttgaaaacaatagaatttaaacacatataaagtttgagcaatcttatattgattgcagcagaatataatgactcctcatactcaaatctctaatccttgttcctttctatcgtagagtattataaagatctgagcccgagtatcattcaggagtttggattcttcacagtcttacacactatgattgaatactagacttgttatgggtaggcatgcactcactcactaatggcttaaaaatttatgaataacactatgagctttcaaaaatagaagaagaagaaagaagaaggaggtctcaaaactctagttgtctgatagaatgtaaactaggtttaaagcattagttaaataatgagatcatcctattctttttatacaatttaacttagggttaggattgaattaaatagaatacaaatgataaaataatagcaaattaaaccctatagtggccgaccatgagatgggtcccactaattatatttctgccatttttttcaaccatttatctattatttcacaaatgtcataatttctaatttaatcctattaattctaaaaatatttatttaataattannnnnnnnnnnnnnnnnnnattatcatttatattatttattaat

SEQ ID NO: 34943 - DNA, 2009 bp, Cannabis sativa
  modified_base (192)..(197): a, c, t, g, unknown or other
  modified_base (1531)..(1533): a, c, t, g, unknown or other
agcaaacctggacgttttcgcctggtcacatgaagattctcggaatagatccttttgtaatttcacacgtcctcaatattgatcctaacctttgaccagttatacaaaagtaaaggctattggacaaagagcgagcactagccctaaaggaagaagtagagaagctacacaacaataatttcataattgaannnnnntacccagcttgggttgcaaatcccatactggtaccccagccgaacaagaaatggcgtgtatatattgatttcacagacctcaacaaagcatgcctcaaagactattttccacttccaagaatcgatcagctcgtggatggaacaacatggcatgaaatattaagcttgatggatgcttactcggggtacaatcaaatcaaaatgcatttaccagatcaagaatatacaagtttccaaacagtcatgggtctatattgctacaaagtcatgccatttaatctaaaaaatgctggagccagataccaaagattggtaaacaaaatgtttaaagaccagatcgggcgaaacatggaagtgtatgtggatgacatgctcgtcaaatccaggaaggttgaggggcacatagatgatctggactaatgcttcaaagtcctcaggaaatacaacatgaaactaaatcccttaaagtgctcctttagagtcagcttgagaaattttctgggtttcattgtcaatgcccgaggaatcgaagcaaatccagagaaaattcaagccctcttggatatgaaatcgccattaagaaccaaggaagtgcaaagtttgactggtcgaatcgccgcactcagcaaatttgtttcaaagtcaacagacaagtgtgttctgtttttcaacatcctgcggggaaataagcaattcgaatggatggaggaatgtgaaaaagcttttcagaagctaaaaatgcaactcgcaaagcctcccatactctcaaaacctttggaaggagaagaacttgggatatacttggctgtcacatagcacgttgtgagtgtcgtgctgatcacagaagaaaacaacatacaacacccggtctattacatcagtaaaagactcattgaggccaaaggctagtacccattgatagaagaacttgcttactgcctaaatctagcaacaagaaagttaaggccctattttcaagctcatcctgtttgggtgtatactaaccaaccgttacgccaaatattgcaaaatttggacgcctctggatggttactcaagtgggcagtggagctgggtcagtacgaaattaccttccaacaacgaacagtaatcaaaggccaggccctagcagactttgtggtagaatgcacaggcaaagaagaaaccataccagaaagtaatcgtgagccagtacaaacgcctcagccaagtaacattgaagacaagctgacttggaaactacacgtggacgggtcggctacagatcaactatttggtgcaggagtcgcccttgtcatgcctgggggcaacacctgcacgctgcagtcaagttnnnattcaaggcatctaataacaaagctgagtatgaaagccgaacacattgaaatctcgagtgattcacagttggtggtaaatcacgtatctggagaatacgaggctcgaggagaaaagatgataacatatctgagcaaaatacatgacctgctcgcacaattcaaaagctacggtctcaaacaaattccaagggaggaaaacacgactgcggacacgttagcttgattggcaagcagcaacgtaagtgataaagcgaacttggttcctatccagttcctcgaagagcctagcattactggcacagaagagatcgaaatgattgatacttccccaaactggatgacagcgatagcgacctacctaaacactagggaactcccagataattgaaatgaagctcgaaagatgaggaggaaggtcgcacaatatatcatagtagagggatttatgtgtagaagaggattctttattccattg

SEQ ID NO: 34944 - DNA, 1116 bp, Cannabis sativa
  modified_base (47)..(72): a, c, t, g, unknown or other
tagttcagggggcattttcaattaccttaaaagttcaaggggcatgnnnnnnnnnnnnnnnnnnnnnnnnnngcaaaaatcctaattagccataatgtaatgcttattgcattgaatattgcaatgatgattacatactaaaaccaatgtaatcctcattacattacactctattagaaagaaaaaaataatattttaataaaaatatagtaaaataagtccgtctatattatccttttttttaaatatttaataattttataataaaagcaatagggttattttagtcaatacatattttattctattacattcacatactaaatcaaacacaataattttttaactacaatgttcattctaattacaaaccaaacattgtaatcaattcttattaccattcttattccattatattaccattactattaccataataccattatcattacattacatcaaaccaaacaccacctccattagaatatgaatcactaattatattgagtaataaagcaaaaaaaattatccaccaagctatattttaataaaacaattcaaatattaatgtgaccttcaacaaaaagctaacaatatgcacaatattgactcaaatttgtatgttttatatgtctagagtttttaattatgggtaataattaacattaaaaaaaaaatacatgtaatatattaaaggactgagcacaactcatcttttggcattgtagttaaggatgatgaggacatctgaccttgccatcaataatagattatgagaatatgcgaactcataagaattagaaatatgacccttaaaaaatcgtgttcttataaatgcaatatttattaaatttcaataattgaaaatacgactgttacgatctgtagtaaaagaatagaaatttattgttgcaaaacatagatttaaaataataaaacagaaataacagtgcagaaaataaaaacttaacacaagagaattatacgtagtatcggtgttctttcaaacattcctaattcacaggatcacgcccaaagaatgaaatcaattagtaaagtctcaaataattacaaatataattgacttaaacaagtttagacttcataaagagaatt

SEQ ID NO: 34945 - DNA, 3124 bp, Cannabis sativa
  modified_base (26)..(45): a, c, t, g, unknown or other
atattaggatgttaaaaacatacttnnnnnnnnnnnnnnnnnnnngtaaaatatattccaacacaatgctctttcccttgcctaaactctagtcggaagtactttccttcttgaccttagttagtgcgaggttgtagcattcccgcacaattccttgatttcctctaagacatcccaccccattctttattgggaacttgatgcacgtgtggaaaattgatgtaacagcttttaagtcatatagggcttatttgcctaacatgacattaaaagctgaagggacatcaattataaggaattgtgtcgtcacagttattctcctcggagcttgtccaatagtgaggggcaggtggatttgtcccagaggtgcaacgctttggttagagaaactgtatacgatctgggtgcaggggatcagatctttaagttgcacttctctaagttgttttaaacagaatgtttgaggaggctccattttctatcatagttcgtgccattatcttatttgtaatttgcacttctacgaccaggggatcgttgtgtgggaaatggacgtgactggcatctatttcactgaatgttatcgttggctcccctacccgtggtatttttcagttttctctcttccacaaccaagactttttcattttgttcatactgtaaggctagggcatacttttctcgagctttgctcaagtctctagcaagatgcgaaccccaataatgacctgtaaatgcttactggtggaggcatcaattggttctaattattgtctgctttggcggccctttggttcttgtcgaccttgacatacttctataaatgttgattattctttctaatcaaaaacttaatttcccgcttcagattattacatttgtttgtgtcgtggccgtagtctgcatgaaaacgacagaagttagatgtatatctcttacttacatcctttttcatgggagatggtctcctatagggcaccatagactgagttgtcgcatagattgtccctaggtcgtctgtcagaactgagaaggcaataaattttgaggcattttccctaggatgatgttcggcattaccagtgaatttatccttcgttctattaccttgcttgttaccgttgttatacctcttcccatttaaatttgagctgctagggtattgtggatctgaatagatgttcctgtcgaggtgatatgttgctggtttttcttttgtccaacagtatccacacgccgaacagcctcctcaagctaaatgaacccatctgctcgatcaagaaatttagccattgaccccacagtcagccttgtgatgtcctttaatagctctcttagtggctcaatgccccccgagtattgcggccaaccttccttcttcagtcaaccccttaacttttgtagcttcagtcataaatctgttgatataagctctaagggggtcccttggcatttgctttacttcgaccaggtcttcaagggtgcaagggaagttgacaagagaaggaaaattgtgcacggatctccgatgagaaggcattccatgaggtaaaccttcctagaggcaatttaaaataccattgatgggcagcctctacgagtgtggtaggatctggtcgtttatcgcttggcccataggtcggacctacggccgtggattggacgactgaccactgtgagtttgtatagtatgcccaactgtatacccttatgaacttcctaaggtaatattggatgaagtagccggttgttgatttgtgaattggtaggcccttcttattagtacggtggcctgcctcgtgtgatcatcaatggctgctggctaagccctcagagtttccatctctcggttcctccattctataaattgacatctttgttcgtcaaatgcaaggtttatgactgcatggagatcctcctaatcatggtgcaaagcgttattatgaccttgcatgagcccaagggctgctcaaaggttttgcatttcagtgtgatctccaactagcctctgagcattagtggtagacgagacattagtgttgggagtgaattgatcggttgctgaactggtgattccagtctcttgtacgcctggtgtgatctcagccagaggggaagtcactccatggcccacagtaggtggttgtgtattaacctactcgaggtttgtccctggtggtcctctcgtgtttccaggagtttgcacgttaggatctgccaccatcgggtcgctctgatcagcaaggcctctacgagtttatacaaccatcctattttcctgtcaaaacttaagacgaagaacttgtgtttttgctctcaatgaaagaaacaaaacgttgacctcgctttaagccaacgacagtgagtctaataataagcgtttgaataatataattaaaagagaacaaaaaaaattaagtaaaataaacactagtttttaaagatgttcggacccgtgagtggggtaatagcctactccccttgtatggtattggcttaagaaaaggaacaaagtgttcttcccctttgaaagctcttccaactgatctctttgagtaactctcttacatcactatttctctctagaatctctttctctctgaagcaattctttcgatccctttcatagtcaggctaggtcactatttataggggctaaatgcgtgagtgatggtttcccctttgcttattatgcatcaaataagaaattacaatgcttacataattgcaagatatgaaataggaattttaaataggttgccctatttctttgacttaatcccacaattatagggattctctttgtgtccacacataacaagatcattctgaaataattatctcttgtaagttgcttggcataacaggcttctacctggtcggatgtcttctctacagctttgctcgggtaattgagaattatagatgctgacaaattatgtgcaggctgctagggacatttacctccgcacaggtatcaaaaatataggacacatattgctcggtcctctcgccacgtcaatgtgcgaaaaactggataacataaggttttttacaactttaaatttgtttatttcattgttttaggaaaatcctttttaggatattagattataaaatataa

SEQ ID NO: 34946 - DNA, 1454 bp, Cannabis sativa
aagcattactctgattagtcaatttaatcaaaacccatgtttctcttaatgaatcaagatttaatgaagcaaaattggaataagacataatattaataattgctcctatatctatcatgcaatgatctaacctagttttaccaattaagcattgaattgtacttgttttagggaacgactttctttggagaacaacgaaaacattctcccccacacttattttctcaccttcattaaactttttttcatttggacacaactccttaagaatgttagcacaatgaggcttttctttgattacctcaagacgtgaaattttcacctcaattttggaaagatttttaggaatctccttgatgggttcctctttttttggattttttcaatctacttggaaaaagtggaggagtgacataagttggtacaattggtttgtatggctttttcagtgatggtggaccaactaaagtaggagattcaacctttaatggagatgatccttcaagggatgaatttttgactccatgacatgggattaaatcattaacttctaggtgtgatggtaattcaagttgtgtacccctttggatagtgatgctactaacattctccattggattactctccttttgtgaaggcatagtgtttgaacattgaatttcatattcactcataggtgttttcatgtgctccaaaaaattctctatattttgtaatgatatttcggtgctctgtataattttctaaaagttttactaaaactacatagtattttgttcaatctgcaacttattagctgctaacatttcaatcagcttagaaatagttgccttttcattatattgcaacatgagtaggttgttgaaattgtgcattattctattcaatctaaatagtagaagccaccaaagtgttgagcagatcagtaagagaatgatcttgattttgtggtgctataggaggatagtaagaagttggtttaacatattgattgatcccattgtaggaagtactagaataatccccccattgttgattgtatgtgtaagtgtcgtagtagggatcatattaatacacttgttgcgagatataatatggatcaacgtatttttgattgtacatcgccatgtttctgaagaaagatttaaaaattaaaaccacaacttgaagaacaaattagtaacaagaaaaatatataaacaataaagagtaataaattaaataaaatagtccccagcaacggtgccaaaaaatttatgtgtgtcgtaaaccacaacaaatttactaattatttttatttctacattaccaattacttcagtataatggtaaatacaggtcgatcccatgagaactattattaatttattattcaaaaattagtgacaagaactatagaatgagagttttgattatgagaataaaatagcataaataaaaaaaaaattaaatgt

SEQ ID NO: 34947 - DNA, 2287 bp, Cannabis sativa
  modified_base (28)..(45): a, c, t, g, unknown or other
  modified_base (243)..(244): a, c, t, g, unknown or other
attgcataaaatacaattcaatataatnnnnnnnnnnnnnnnnnnatacggcgttccaaacgagccctggtattctataatgcacacttatcgatacaaataattttttagtcaattttttttttcattatagttatctaaaatattctgtcaaattttaagaaatttagaaaagtttaatagccgaaaactgtgttcaaacagtgtgttgcacgcgagactattttattttatacgcgtgtnnaatagactgtttgaatattattttctatattataaattattccaaatttttcaaaattttgtaggatatcttaaataattataacatacatgaatatgaaaagaaattagactagaaaattcttctggatgccaaaacaagtagagggtgcattagtacattccttttaagagggtgcattctagaatcacccaaaaatatatattttaaggtgtttacgatgcacttcctaaataaaggtgcaacgatgcatcccctattatttctttagttcatttttttcacatcatagtaatttaaaataacttgcgaaaatttgaataattcgtaataatttacaatataaaatatagtattaaaacagtttattttacacgcgtgtaatagactgttaactgttttaaccttgtattccgcgtgttaaatttttttaaaattttcacaattttacaggatgtcttaaataattataacgtacatgactatgaaaaaaatagactaaaaattatcttgaatatggatgcatagatgtactatttttagggggtgcacaataaaatttttagtattttatatgaaataaaatttattaaaatagagtgtttattaggtgcaaataaaaggaaaaattacattgtatatctatttttttttattttaatttttacctttattttcatattctttaagatatacctacttttgcaaatgatattactgttatactccttaaattaatataaattatgtactagatttaaatagaaagtgagggtatatttgacaatctactcacaaaaataattacattttaataaaatataatataagaatatttttaatttatagattaaaaaaaagttatttctaaacttatcccaataaaacttggaactccccaacaaagaccctaagcccagctgcccaagagttacactggtacgttttcttacattctcttctattatatacccatcttgctaaagtggcaacaccttgcgtttgggttaggcccatttccagatagagaattggacagatcaaagcccatttatctatatatgtctataagtatgatctaagaaataagaatggatgataagtatgacaaaatttggtcttttgtagcttttgtagttttagtttttttgacaagttattttatctgaaaagatttataatccttaactcataatcatgtaacaaccaaaatctatgctcaaatattaaatgataaaataataataaaatagttaaatattgagaaaataaattaattataataatataatgtgattatcgtatatatatatatatatataaaaattaaaatgtgacaacttatttaccatctaaaacttttattttgatattgttatataaaatggattgtgttacatataaagtattactaggtaatgtgttatacataatttttctaccttacatgtattaaacaggttgattagttcaggactctaaacaaatgatgcatcatgtaaagttttggtttttaaattttgtaaaccacaaaaataaaatgtgtttgtttactacttttgttttgtttttattttgaaaaaaaataatatagtgttagactatgaaaatactataagagcttattagtaatttgtaaagggtatgaaagtctataaatatgtaattgtgtagctattgtgaaatatgaaatgaaaaaaagagaattttgattcaattggagtttgacactgactcaaagaatacattttaagagatttgtcttgtctaaaagaagactactatttaacaattacatatttatagactttcacatattttataaattactaataaatctttatagtattttcataatctaacaaaaagtaacattatgaaagatacaaaatagacaatgattaaaaagagcctgtttgaataaattaaaataatatatttttcaataaacattcacttttttcaattaaaagaataaagaaaagtaagtaattttaacagaatgcaccaaaagaaactataaattttaaattttatttgaaa

SEQ ID NO: 34948 - DNA, 1050 bp, Cannabis sativa
tttttattattcaataagttaaatgtatatatataataatctataaattttaatgcattaccatttcaaaaaaaataaatcaaataaaatacattaatatataataatatgtaaattaaatatctttatttttaatataatttattgtttttttctttttacttgttatttatttgaaagagcacatatataagtttttttttttatttatttaataataaattatacacacaaccacattgtatataataattcaagataattatttttgacaactctattaatatctttatatattaaaagtgtctatctaacgacaattcttggtttaacagaatattttcttattatgttaaaatttaacgatacactttaacatcaatgttacctccaaaaaaatattaaaattaaaacgatagtaaacctaatttcctaaaaaattgtaattttttttattattttttatgaaattataagtttgatggtgatgatgaaactaattccactaaaaaagtttctcacccctcagtacccgcaagacccatttagatcggttgcctcggcacttgcttgtgaatttgaagaagtcatcgtctgcctcggcaattgctatcagcgccgtagttatctcctcttgaatttcacacaatgatgagaatcgtccctgaagttcctccttcagccgaccgctcttctctaaccagactatgagttcggtctgaatctctctgaggtgtttgttcaatggacgagcatcagatttgagtaggttttgaagagtgttagtatcattagagtcttacttcattgaaatcattatctattccactggtgaccttatgaatcgcctcaagatcggcaaatatgggttcttggctctgcttggacttatggtttgcactatctcatttggggtctctgttctgctttcttaaactcattatctcttctttttatgttttatttttcttgtttttatctgaatggtatgtttttttttgtttgggtcagcaataagaaaagaagggattttattttcatagaataaat

SEQ ID NO: 34949 - DNA, 1878 bp, Cannabis sativa
  modified_base (48)..(62): a, c, t, g, unknown or other
ttcattagagaaaaagccctagaattgtatcagaaatctaataagatnnnnnnnnnnnnnnngcagaattttaactgcaaaaccacctaaaaaacttcatgttcttattttttccttcactgcttttattttctgtgcaaatccatcacgatttaggctttaatacagttaacgaaaatctgtgttaacagtttggtgctttcattgaaagccttcgtgaaaaaagctcagaaaaaatcctcctgatatatataagaaaactttctccatggttgaaatcagagaaaacgttgacactcctcatgaaaaaaccactcaccatcctggaaaagagccaatgggctctcgaaagcctcccaactcacaatctacacggaccactcgttctaggaggacccaacctgagggtggcccaagatacacggaccactcgttccaggaggacccaacctgagggtggctcaagtacacggaccacttgttccagaggacccaacctgagggttggcccaagtacaccacgaaccccacacgttcaaggaggacccagaatctgggaacagtgtatgaagaaccttaaatgaacattggcagagcccaacccaggcaaactgatgagcatggtgcctacgatcccacaagatacgtgccaatcgtcgagttggaaaaccgccaactcagacgttgcttggaggaggcaacccaacagaatgctgagttggaacatgaggcactcgcggccagggcagcacagaagaataacacacaaattaaccttatcctggagtgagaagaccacgaggtagacctcgcggctcacgaaccaggaggcaggagatagctcaggagagccctcagaacgctcaggaagaataacctggggaaactgaggttccccttgaaatgaacaaccaaatgatcaaccagagccttctcacagaaatgagaaaagaaggcgaccagaaactagggaataggaaatccctcatggaaacgagggaaatcctgggacacaacctggaatacattggtcaccaatgaggcaccgccaacgttcttcccaaaccaatagggaaggggcacgtacaaaccccagtagggggcacacaacgaaccacacccaatggagaagagcgggatgtgaacaggcgagtgttacctcggggcacacaagaacccacagccgatcaacgcgaagaggagaaagtactcatcgcaacaatgatcgagaaagcacaggcacgagtaaaactgcaagtcactcaaggacaaggtccatgagcaggacgaggtccatgagtaggacaaagtctgtgagtagaacgaggtcagctagcaattataaccaaccagatctgtgagaacacttgaaccagaaaaaacttgatctttgccaacaactcggtccaaagcaaggggatccaatccaaatgcgaataggtgagttggaggataagttcagaagatatcaagtcggggagcaaggaaaacaatatggatatgactcagatgaggaactcgagccataccatctaaacatcatgcatactccttttccctggggattcgaaaacccccacgtctcgtcatatgatgggaccactgatccaatctcgcatttgaataatttcaatactataatgcgagctagcaatgttacaaacaatctatgttgtattttgtttcccacctgcccagttggagtagcaagcagctggttcaataagtttactcatcatttcatcacttcttgggaacagttgtctaaggacttcaaaaagtagttccaagttgcgagggataggcgacccgaagcgtcctcactcaccaacataaagcaacagcctggcgagatgcttaaggcatacttaagtcgtt

SEQ ID NO: 34950 - DNA, 3049 bp, Cannabis sativa
  modified_base (167)..(170): a, c, t, g, unknown or other
aataaaaaaaaatagaaaattttacataattgaccaaaattaaaaaaaaaaaaaattatactttaacgcaaacaaaaattatttttacactttgaattttttttatttacaaaactatctcaccagtaaaaataataaattgtttttttttgttgttttataatttnnnnatagttatattatagttgtcatgaagttgttttactagttctttttggttattttatagtgtatttatagttgatttctcgttgttttttagtttcttttttttttactttttgctgaccaaagtgtatttttttaattttaaaattttacaagtgtatttttataaataaaaactttaggccgtaaatttgtaaataaatataaaaaatggtatttatgaaaaaaaataaaaataaaagtaaaaattatatttgttttgagaaatgataaagggcacccatagtgactagcacccttacgaggtataatattgctataagtgcaatttaatatcacaccttacttattttattttaattaaaatataaaaaatcgctaactaattatataacgtcatcccatagtaatactagacactttagtgtcgcataccaatactcatttgttttgatatgttgtcaagttattcaataaaaaatcaaaattattgattattcgagtttatgttcaatattttccttactctttgttaaataaaattcattaccctttaagcttaatgttcctaacacattttttttttaaaaaaaaaaataatttttgtgtggtacaaaaatatagataatacaatatatctggtcctccatacaagaatttgatggatggtgattgaagtgattgaattaatataattaatatataatttatataattttaataattttaaaaattttaaaaataataataatagtaataataaattgtaattaggtaataaggacatatagaatcacaagtagaatgtgacccatcctaacctccaatggtcccaagttcccaacccaacccctcttttctcccatgactcttcatcatctattctataccctataatcctttataccctatataatatgctttggagttcgcattatcattttcttttttaatgtgtgattatgctccttaattaaaatctaatctctttaattagcttgattaaggaggtttggatggatagtgatggtgatgtattgttttgcttgatggttatgttagcttttgtcaaagaaaaaagtgacttttttaataatggagggtcccaaaacccatccttaagcacaagcattagcgattaagcaaagattaagactaatgatgcaaagagataagagaaggaaaggaaagtcttagtagtgtgagtggtggtagggcaaaggggtaggatgcccttatcaactcaattcattttcccactttctttttatttatttatttgtttatttttaatattatttgcatttttcaaattttaaagttcccattgccattagtaatattttataattagttaacttatactagattagatatcaaagaaagttttgaccaaccatagagacatctccaagtccaatatctcgaaaataattctatacaacaaaaccatattggtttataaaaatgaaagactttttttaattaaattaaaaaaggaaaataatgaatgaaagtaatatagtttttatagccaagatggtcccaaaaaccgcgtttaataccaaattgttcatattcacaaagggaagagtctaaaatggacaaatgctattcatattttaggattaaggcattggaagtattctcatctccaaaacaagaacttgaaaaccttagtatagtaaataaataattaattactcactccattccacataacaaaaaataaaaatattaccaatatttattatcatcaaatatacataatcccgttgattaagatataaaggatatgacccccccacttttaattaattaaataattactaattcattaataataatggcttaaaaaccatactaagagaggttaagggtcaatggttgtatattataggatatctaaaagggaaccctttctcttttttttttctctctctttctctctctcctcaccgttctctttctcttcttctcactcatcatcacagagtcttaacggagaagttgagctgaccgttcatcctcttaacggcgtaacggagttttcaaacccgaaacgccgttttcttaactcattcggtcacgtgccatccaaaccattaattataataatattttaatttttttataatattagtagtaataatctcatctattttttctttttaatggctttggagctcagcttacctacgaaccccgttgacaccgaggctgacggtgtcactaacggcgtcgaagcccggccttcctccactgacggcggagatgacggaagcagagcccccagactcccccgctggactcgccaagaaattctcgtcctcatacaggggaagcgggtcgccgagagcaaagtccgcagaatccgaactgccggaaccgctttcgggtcgggccaggtggagccgaagtgggcttcggtttcttcgtattgcaggatgcacggggtcaaccggggccccgttcagtgccggaaacggtggagcaatttggccggcgattataagaagattaaggagtgggaattgcagaggaaagacgcgtcggactctttctgggctatgaggaacgacttgagacgcgagaggaagttaccgggttttttcgataaggaggtttacgatattttggatgccgggtcgggtagcggaatcggtcagcaaacctctctggttgtggctccgccgccggcggaggaggtagagaaggacgccaccgctgaggagccggaggaaaacacagtcatgttcgatagtcgccgaggggttacagctgaggatggcatgttctcggatttcgagcaggaggaatccggtcggagctcggagaaggaagcagaagcgacgatggcggcggccaaggaagcccctcc

SEQ ID NO: 34951 - DNA, 973 bp, Cannabis sativa
tttaatatctgaaatcgggtcgggcccgacccgaactaatatacaccaggtcggtccgggctgggttgggagtccgataaaagcctaaattgccaattttcgtttgggaaatttataaaaatattgaaatttaggttaacttttacaaaaatactgtcactcagaaaagttttcaaaaatactgtgtttttgtaaaacaccagtaaaacacaatacagaacaactcaaaacaacagtagaacaattaaaaaacatcatttaaacaccagtgaaaacttaacacaatatactgcagtatgaaacttataaaaaaacacagtaaaaaaataaaaaataccgtttggtaatatttttataaaaaaataacaaaaattaatataccatctaaatttccctttccgtttcccattgttttcattaattccttaaatatagtaatatgaccctttaatatttattatttataagtataataatgaaaaaataaatgtttgcgctcacaatgcaataacatgatataatggtgatgagatagggagataatcaagtggccaccatggtgtgtccattatcttttaatttattattcaaatgcattaaacatttgtctatgccctaattataattgtgtatttattttcctattctatatatctatatatagagaccaaaatgtgaaattacattttaattttaaaatacaatgactaatgactaataaatagcattagcacatcagtggttaataacaatgatttactatcttcgcccgtgactatttttgccaaggaaaaagaagagaacaacaacactaccacatcagttttgggccaagaatactctgagcaccttgatgaaaaaagagctcttttaaaattttttcaagctcaagaaggataccttcatgagttggcggaatttgcttctcatggcccaatcaatagaaaaacgggtttttgtgatattggggttc

SEQ ID NO: 34952 - DNA, 1252 bp, Cannabis sativa
tatgcactcaaacaatcaatacactacaccttcacaccccgccctttttaacatttctcttttttttttttagataaatgttaaaaggtattagtggtgcctaatatttttttatgtgttaatattagtattggtctaattaattatttgatttaatataataatttttaagaagtatcgctaaccaatggtaagacaacatatataaacgtgctaagtaccattaatacccaataacaatgctcttttttaaatgtcttcctctatatattttaatgaagagtaaataggggcaaaacgcttttatattttaatttttatgcacatgtaatttttatcttttttattgtggtaaaatatctttaagtttatttttctttgcaaatttcagacgtcatttaaatattacttttaaatagcaagtagatgactattgtgtacatctgacctatgtatatgtgaaagtaaaacttcgaagccaatacaataataatctagttagtatttaacaataatatctagttgtaatagagtgtctcacattgataatgtgttgaaattaaatatcatatataagatgcatggactactcctctcattgttaattggttttcggtccaaaaagatgagccaaaagagtcacttgtgattcgagtatagtgagccaaaagaaccacttgtgatcgagtcgtgcaagattggtgagcaaaaaaaaaaaatatagacactatcttgagggggaatattaaagagtcccacattgataatgtgttgaaattaaataccatatataagatgcatgagctactcttcttattaccaattagttttgagataaaatttcatgattctcatcaatctcaaatttaaaattctgtacaactatattttatatatatatattttttttttggttatttttatgtttttttttttaaaataatcccaatttataattgtatttaactttcttttttacctactttgggggaataaaatcctttcttttcaccttttattattactctagtctagactagtgtctaaagctttagcatttctctttaattataggaattttaactacgtaatttttgataaatataatgattgaaatcaaagcatcaaataataaaccctcttgtttaaaaaagcattgggtttgaatgattacactttgactcgtattgaagtttttcaaaaataaacttgcctaacaatttttgtttttagtctttaattgacaagtgaa

SEQ ID NO: 34953 - DNA, 3108 bp, Cannabis sativa
tcctatagctatactttgagttttcccagctcataaatttccattttgtatggagccttcaaaattgaagaactcttggagctaacttgattatgaactccacatcaatgtctgaggatatccccgggagatcttttagaaagtccttttggaactcacagactatgtgcatatttttcattgttagttgtgtctccactgcttggtgcaccacattggccaacaatgcttaccttctttaggtggttagtctttaagtatgagattaaagaagttcataagactatcttaactcctgtgaaagtaaactggtctctggcctttgttaccaaaagtgatcaaatacttttagcaatttatgaatggatatccaatccatatcgagcccagcatcatgatccttcatttccagctttatcaagttattcgccggttgtctgttattgagttccatatatcccaatatgggtgctacaatcctttgtcgttccttcccctccaatggattagagcctccttcaaatttcggtggtttctattttttaattctatcatatggtggctcaaagcgatgtgttggctgttgagttgaattccccgtgctttattgcttattacaacataacttttcatcctgagcttggagtcgttccctaagcttggcgttctctttcaccaactacttgcaaaaacaagcgtcctctcaacttagcttatgcattattatgtacttacgcgagtgcctcttccataacagtgcaactcgttggccttgtcctctaccatgactagcttagcctcatagttcgtctccttcttaaactccttgtaggtgttaaagctcctccttcttgattgtttctattgagccaacttgatcgtctaaacagcaccgcctcttaatatttagtactaattattctaaaataaaagtcttaagaaaccaacctaactatttgaataatttataatattcctaatagataaaatcaactaattattttaatataaagaaaagtttctccctattaacatagcatgatagttcaccaaataatttctatatattctattcttttaccaagataaaataactaaataactaagtatcactaaataaatacaaaaaaaaattattatacccaaaattcagctaccatctcagtggaggacacgtgttaagataaagggaatacagattgatgatgtcacttttaatggaataactcattaattgcgtaagtagcagagtatattcataactcgctgactgtaaagttttatgcgagaaaaaaatatacaaactgtttcttagtatattaacgagaaaccatatgtcgttgaatgtatatagcaaggcatcaagtacattacatctgggaagacgaaagcgatgcatatcgactgtggaaacacttagtgtataacgtacaaactaagtataacagtcaggttggctcgagacccgataagcgaggtgcctatctcgctatgggaaagttcattcctataactttccccaattaacttcagacatcttctcagtgaggcttacaatcctgacaagtcaaaagctaacattcaaatgagcctcaaagaaactctttgttaataagaactgcgatcgtcacaaatgcggcattaagctttcaaacaaaggagcgacaaggcgtactttgtcgacctcggaaggataagaaaaaaaggcttcagctcgctatcacggtcactggaactaagctcctgtcgagacattccagaacactacaattaaagacgtgtttaaatacacgatcattttaacctagtaaaagcgagagaatcacagttgtgcgattttcaagtaataaccgcaattatactacgtgatatgtaatcaaaccccatgattttagggggaagaatgttgtaatgattacagtcaactttgtaattaactgcccactatgtgattataaatagtggcaagtaagatcaaaagggggacgaaaaaatcatacaaaaaagggcctaaaaaactatcagaattctgaataagattgactcttggactatgcagaattttaactgcaaaaccacgtaaaaatccattgtgttcatatctcttattttactgctttaatttttttttttgtgaaattatcattgtgaggctcaaattttggttaacgaaaatctgcgttaacagtttggtgctctcattaagagcctctgtgaaaaatctcagaagaaaccctactttattttgaagaaaaaccacctccttcatggctgaaaacctagaaaatgttaataccccgcatgaggaaactcatcatcgtcttgggaaagagcccatgggctctagaaggtctactaacccacagtccagacggaccacccgttccacaaggactcaacttgagggtggccctagcactcggaccacacgttcccggaggacccaacctgacattggtcctagtacgctaacaacgtgctcgaggagaactcagtgtgggaatggctagaaccctgggacgagggatgaagagcccaatcgtgaaggtacccagcctatgggagaggatactcatgaaatggaaaactgctgccttagacaccgtctggaagaggcacagcgacggaacgctgaattagagcgtgacgcagctacaactagagcagcacaggggactaatgctcaaaatcaacctgaacatggggtgagaagaccaagagccaggcctcttggctcacgaaccaggagacaggaaaatgcccgagaagaacaacctagggaaaatgagataccccctgaaaattagaatgatcaccctctcacaaaaatgagaatgggaggcaaccagatcctgatgaacgagaaattgatcatgaaactctacccatatttttaggactctgtttgatttttttttaacatatgcatttggaaaattttaaatcaaagacaaaaaaagttgtacaagttttatgatgtcgagcttcttagtaaaataatgagcaagacaaggtgatagccatcaatcaattttcaatatggttaaacactatgactcaaaaaggatattattttttatacatttgaacatagggtaagaactacac

SEQ ID NO: 34954 - DNA, 1161 bp, Cannabis sativa
gtcatttatttttaatatcaaataattatataggaaaaatatgtagtaaaactcctagaaaggcatttcagtagacttttatttgttttgacatttagtaaaaaaattattaagttcatttttttttcatgatcatgtatgttgttatttagaattatttataaattatcaaaaaactctaaataatttacagtgccaaaaataatattcgatcttttttattttcttaatgtgccaatagttatttaccacacgtacgtataagaaaaataattgcatgtgcaccaaactatttgaaccttatttgttcagcattgcaaactatcaaaaaagttaaaaaaaatttatagtagtcctaaatagctacatagtacacgattatgaaaaaaatagactaaaatattctcttaaatgccaaactagatagagggtctactgaaactgtttattagaaagagggttgtaatgacctcatacttataatatagattagtagacaattaatattaattaattatattatgtgatgtggaccctatttttaagaaataggtatttaaattatagttttttaattttggagattttattaaattgtaggtgtattatatatgatacacatgaattttgatatttttatgatttatgtccgataaaggtagaaatgcaacggtttggccattagagtaacataggtatgatttagtatcttttatttagcgggtaaaaatattggacatatgaaatatcgagattatacggggcagtggtttttgaccattttacccctaggcatttagtttgcttgagtactgagtaaagtgagggcaattcagtaatttccttaaattttatgtgatgcttgtgagtgggatttctagagattactatagtaatataagctgatatattctatagtgttattttaatttttacactatgatgtggcacctaactgaatgacacgtgtctcacatttcttaacctgggcggatggttctatgcctagcaggccacacagattgacatgaagctcaaagtcatacacacatagcaggatgtctgagcaaagtcattgatggacatccgaccatcacgatcgcgtgatcaactcgcatgtaccaactagggggtgcgagttggcaattttagaaataaaca

SEQ ID NO: 34955 - DNA, 1550 bp, Cannabis sativa
  modified_base (26)..(43): a, c, t, g, unknown or other
aagttcttatttaggatgttaataannnnnnnnnnnnnnnnnnctaagatcttggtaaaataatttcaaacaatgactagcaatgtttgcccaaaatttctgcacattagactattgcacctctcttaatagaagatcatgaaccacttgaaggtagaatttacacaaaaaaatgtctaaaaatttaccaaatttggtagcatgaaacaaagccttgacattttctgaaagagtaacattaagcttctcaatgacattgtaagtgcatgcaactccaggccactttcgatttatggtgatcaaattcagggtacttgtattcccattctataaattaaataataaaaatatcaaaataaaagtaaatggtaaatacgttgtaaacaaactacaatacaactattaacaaataataccataccaaacctaaacctaaaacaatagaattactcattacaaaataaaatctaaaatgaatagaaaaaaatacaacaacgaacaactatttatgtcgaaaaactaaaaaataatctaaatctaacaatattctaaatcagtaaacctaccaccaatattacaacaaaataaatataatatataaatccttagaatcaaaagcacatgtaaaaatactaaaatgaacagagacaatttttaaattaggaaaaaatagaaaaaaaattgagacgaaactttaagaatttcatcgacattcttcttctcttttttaacttttggtatagaactcttattaccttcgttcatcttcacttttttctttaaaggacaaccttcatattttgttactagttcaacaaaatcttcgtcggagtcatcatcttccacaataatccgtttatcttaattttttttttttttttgccaaagatttcacacccattactatagatttagaacttttataaataggcttcttcatagtggattttttcacagatggagatggagatggagatggagcgggtgacaactattaattatatagaatttgataggaaaaaaattgaatgaaaaaacgtgggctggagcttcaatggaagttagagatcacaggggagcaattttttggagagaaatattattttgatcgtggtgaaatgatttaaaatgaaactgaaaataaaaaaaatgaaaagaagaattgaaataaactagaaaaaaggtatagaaaagagaggaaaaaaatagttgagtttcattgttcttgtcattgtagaacaatgtcatcaatacttctatgatttatgtgtgtaacatgtattttggtaaataaaacaataaaatgggtataaaagttttttaccattgtgaaggtaaaattgtaataaaagttggattttgtattcttcatgtaaaactttcacaattaaattaattattttttttttgttgtaaaaagttatatatatatttttaaaaaagaaatgtcacatgggtgtggtcttatttgagcaacactattgatgaaattgatattataggaacttggaccaaattgtacatgtgataagatcactccactaagcaac

SEQ ID NO: 34956 - DNA, 1727 bp, Cannabis sativa
  modified_base (88)..(104): a, c, t, g, unknown or other
caaccaatgtaaggtttctcttaccttttatgtgtttattttatatcgttttagaagtgcatgtttaggatgttaaaaatatacttgnnnnnnnnnnnnnnnnntggtaaaatatattccaacaaccataactagggggaataaatgtaagaagtaacatttgtctttgtaatggccaggtttttggcaatgtgaacacatgggacgaggtttcttggatcttgaattttgatttgctgaaggagcagcatgatcagggattgaagttgatggtgtggaagagttagcagtagtaagagtggaaatggatcgatttcctaaagttctttgacgttcttggtgaacaatcattgagaaagctttgttgagagggggacagggatcaaggagaggatttgatcacgtacaacatgataggattcattgagacctttaagaaattggagttcttggtcatggttgaggtgatcttgatgttggtttgctgttgcacaggtgcaggggatcttgggcctcaattggttaatttcatcctaaattgcagtgagtttggtgaagtaagaactcacagaattgtctccttgatgtagatacgtgagagtttcattgatctcaaaaattcgaagtccattgacttgactgaatcaattgtgtagcatggtccacatctcaacagcagtgttgaggtacattatactgctcttaatctaaggggaaacagagtgtaaaatccaagacataaccatttggttacatctattccaagaacttgaaagagaatccttatggagggttgaggtaaagtaccttcaagaaatggagtcttgttgcgagctctaatggataatctgaaatcttgttgccatggttgaaagtttttgtcattgagaactggggagcaagtgccagtcttggatgatcagtagaacttagatagttgtggctgcgaatgtcttcatatgcaggcatgtcgttctagttcgagtttgtgattggagcttgtttgggaactccatggatgttgtcagcgaaagcatgagatggtggaggagcatttgtagcagtggcatcaatcataggattagtggttgtagcagaagctgtggctcgcattctcaccattgttgtgaagctttgaagcttggagtttaatggtttatttcttctgataccatacaagatcaaagatgagagagagaaaagtggttttactctttattgatctgaaattgaattgtccttgtttacaatattgaagccttaaatatgcaaaaaaaaaaaaaaaaaataggagacagaacaagaaagtaaataatagaaataactaacttgagctgaacaatcctaactaaataatcggtttttacgctttcttgcatacattggatgatttaggtttcttctcttaccacttttggctttagatatttggcctggaatagctattttatcaccaccatttgagctactcttgggagggactgatggtggttttattcaacttgtgaaagtttaaaactatcaaatttgattatgttacatattacttggaagttgaaacacacagaaatgtatatggatatgcacttcaaagatcatttaattgaacttagaattgaatcgcactatactgcccttggcactccacagaaaaatggagttgcagaaagaagaaattgcacacttttagaaatggttaggtctatgctgagctattcaactctatc

SEQ ID NO: 34957 - DNA, 1647 bp, Cannabis sativa
  modified_base (1495)..(1520): a, c, t, g, unknown or other
agtaacaatagtcattctaagtgaaaaatgaaaaaatttatcttgtcaaatacaattgatggtagcagtaaatcctgaacacaagctacttcaaataattaataacttaaatcactcaataactttataactctattaacaaaggggtgcactgatgcacctttacctatttcggcatctagaaaaaaatattagtctatttttttttcatatttatttacgttatagttatttaaaatatcttataaaactttgagaaattcagaataatttacaatataaaaagtagtattcaaacaattaatttcacacgcgtataaaataaaatagtcacgagtgcaacacacttttcgaacaatatttcgaagtgttaaattttttcaaatttcttaaaaaatttgcaggatgtcttaaatagctataacgtacatgaccataagaaaaaatttgactaaaaaattatttcggatgctaaaacagattaaggtgtatcaatgcatccttttaaagggggtgcactgtagaatttttcactaatatttttgaagagagtaaaaatatttgggtgattctacaatgcacccccttaaaagaggtacactgatgcactgttacctatttcgacatccagaaaattttttagtcaaaatttttcatgttattttacgttatagttatttaagatatcctacaaaattttgagaaattcggaatactttacaatatagaaagtagtgttcaaaaaatgatctatttcacatgcgcacgtataaaataaaatagtcacgcgcgaaataaactttttgaatcctatttttgtttggcatgttaaatttttttaaatttcttaaaatttagcaggatgtcttaaatagatataacgtacatgaccatgagaaaaaatttctctaaaaaattatttcaaaaactaaaacagataggggtgcatcaatgtatctatatttaaagggactgcattgtagaattttttaaaatattattataatataggacaattctacttgcacccctttaaaatagatatattgatacacctttatctgttttggcatccgaaataatatttcttcagtcagattattcttatgatggtcatgtacgttatagctatttaagacattctataaaattttaagaaatttagaaaaatttaacatgtcgaaaataaggttcaaaaagtgtgttgcactcgtgattattttattttatacgcgtgtaaaatagattgtttgaatactgttttttatattgtaaattatttcgaatttcttaaaattttataggatatcttaaataactataacgtgtataaaaaaaatagactaattttttttaaatgccaaaataagtaaggatgtatcagtacactccttttaagagggtgttttgtagaatcactctataatatataaaattaaaaaagaagataactgacattaattaaaataactgtcaataataataataataatannnnnnnnnnnnnnnnnnnnnnnnnnaataataataataataatgcagcccttaaaagggatgtactgatgtactctctacttgtttcagaattttttagtctaattttttttttcatattcatgtacattatagatatttaagatatcctac

SEQ ID NO: 34958 - DNA, 4630 bp, Cannabis sativa
ccccaatttacccgccagcaactcagccgttatgactgaaacaaagcctgacttaaacttcacctcagctgcaaccaacttaccctctgcatttcgaatcacagcagccagactatacccctgtaagttagaaacaactgaagcatcacaatttaccatgaatgtacctgcagtaggagctgtccagcttcgtttcccatggattgtctgctggtttttggtgtttatatccctctgcagcaggctttttgtgtagtcaattgcccaaggaatccaactctcgaaatctgtttttttattttgaaagattcgttggtttctctggttccaaaccagccagctcagaccaagaaaaatttcaaattcctctgtagagcatttcgttttcatgtaaataaaaaactccagcagatcagtcataaattctatatccttagggaacaaatgccaaaaaccagcagtttgccaaacaacctttagtctaggacatttccataaagcatggccaatagtctcttctctattccaacaacccgaacagatgctatcaagttgaattcctctcttaaccaactcactcttagaggggagccagttatgacaaactctccaaacaaaattcttcattttgggggttatggaagattgccataccgacttccaccaacctctagcaattgatttgtttgaagtctccgctttttgcttctccgtttggatgagattatagccacttgccaccgtataatctccgttcattgtatagtgccacatgagagcatcttcccctctgtctcttctcgtttgaatcccaacaacccaaggaatgtcgtctttgtgcatgatcttttcaagagactctatcctccaattacccgagtcatcaaggagagtgttgacataagtattaggcgaaaccaaagcaggggttcgaagagtaaacggagctcctctaggaatccaacgatcctcatttactcttactctactcccttcttccacacgccaccgagagcccttttgaattagctcacggccccagagaattccacgccaaacagtagaacacccattcccagttccagccgagagaaaatctgtattcggatagtagagggctttcaaaacttgtgctaacaggctctccggattagaaacaatcttccaaccttgctttgctaggagggcttggttaaactcctccaagtttctgaatcccatacccccagcccctttgtctatgctcaatttctcccagctacccaatggatttgatgttttgttgttgttgatccccaccagaatcttgcaatgagcgaatgaatctcacaaatcagccctttagtcattctaaaacagctcattatgtagacggggatcgcttggatgattgacttgattaacacctcacgacccgcttgggaaaaaagacccatcttccacccttggagtttctcccaaactttgtttcggattataccaaacacttcttttttatttcttccaacaaaggcggggaggccaaggtacttcgaatgattttctattaaagtgacccctattgaatttgcaagtcgttgtccttccgcatgactaatctttctaccaacacataaacttgatttattgaagtttatgcattgaccagacatagcagaatattggcgaagaacttcctttagagctgccccttcttcggctgtggcatctaaaaatataagactatcatccgcatagagtaaatgagttaatcttttttccattgtcccaaaccgaagaccatggatcttattagctcggctagcttcattgagtaaacaagacaacccttcggagcaaatgagaaacaaaaaaggagaaagaggatctccttggcgcaatcctctcttcggaacaatatgtatgaccccgagcctccccgtttatttaaaagaattgaaaaggtcaccgttgtaacacatcccatcactttggcaatccatcgatcatcgtatccaagacatttcatcatttcggctagaaaatcccattccacccggtcataggcctttgacatatctagcttaagggccattttcttcccatttccaaagcgacccttcttcaagcaatgaagactctcgaaaccaaggatggcattatcttggatttgtctcccctttatgaatgcactttggttctcggaaatcaccttgtccatgcttaatttcattctattagctaggcacttggatatcactttgtaaattacattacaaaggctcaaaggtctataatcacctaccattgtcggctccttcacctttggaataaggcataaaagagtgtcattaagaatactacagtccttgtttttgttcaacacatccaagcacatagtcataacctcttgacccacttccttccaatgattatggtagaacaaccctggaagaccgtctttccccggagctttaaggggatggatttgatctatagcctctttgacttcctcgattgtaaaatctgccataagattttcattgtcttgcattgacatctggttgggaacacaccgagagaggaagtctctcatttgggggataggatctgaagttttgaacaggtccgaatagtatttcaccaaaattgcctctatttcgtggtcctccttgcaccatcttctatgatcatcaaataacccctttatcatatttttcttctttcgttgggaggctttatgatgaaaatacttagtattgcgatccccatgagcaagccaaagagcccggcttcgctgtttccacattatttcatctttggtctcagccacattcaactcaccttctattcttcttctagtcttccaatccgccgccctagaagacttagagaggttgtttagctcctctttaagtcttttagttctagctctaagatccgcctttttgtccttgttgcaatccttaagagtctccccacaaagattaatgcgaccccgaagaccatgcggggagccccaattagtattatcaaaccaaaccgattctacaatccgaccacattcttcctcttccccccaagcttgttcatagtggaatcgagatctccaagtaggcattctatttgcacggtccatggcaaggctaaatttaagtaacatgggacggtggtccgaactccaccatggaagaagagttaccgaagattcacaaaaatacttgaaccaagtcgggttagccaaaactctatccaacttctcaaaaaccaggttatcttgacgcccattgcaccaagtgaactcacccccgttcattgtaatctccttgaaattgcaataagaaatggctcttcgaaagtcacgtaaaagtgcttcatttttcacacagccccctttcttttctttagccttaattatctcattaaaatcaccgccacacacccaggcaccttgaagcatatcccgcagtctctcaagaaggagccaagagtctttcctacctcccggatccggacttccataaaaccccgtaaacctccaagaaaaacccaatccattttccaccattgcatcaatgtgagaaactgtgaatgattttacattcacttcaaacggctctttccacaaaagagcaagaccaccactcttccctttggccgccaccacaaaacaaccatcaaaacccagcaccactcggattctttccatcgccacatcattaagtctagtttcggataagaaaatcatctcgggatgataatctttcacatgggaacaaagggctttcaatgtccaagggttcccaagcccttggacattccaaattaagatactcattgcgctcggcgacccggttccaccgagttcgccgctgtcatgttcaccccagagtccaaatccaaagatctagaaatgtcccctgcaacgttgtttatttccccctgaactgaactttctgccaagtcttcattgcttgctattataggagctttgagttaggtatccacctttttgtttctctttgccacaacccttttctttcttccacccttctgacttaaaacctcacccctaactcctttcccatagtgatcgagatgtcaatccattctcccccctctttagttaagtgcatccccgaatccacaatctccccattgccttctctatgtaatcgtttaccaggttcactgcccatcccttcttccttgttcagcacctcccaaaaatccgcccgtcttttcaaaccagagccactctctttcccaaagtctttctctactcgtttatccttaaaactgcctaataagttactgaaatcaaaaggaatagatagtttagaagtcgatacctttgtgttaaacgagttccgattggtgatgttcggaatttgatcgatcttctggacttccccaatggagatgccttcaagggtctttttgcactcatcacctcctacaacccgatatgtagacctgtttcgaaaaacttcattcccccctcctctgtaattgcctttctctcttttagccccattggtttgtcctcaaccttcatccacgccccataggccagtgaactacatccattgccatccgaaatagttacaggatgcttctcacaggacctaaagtcgtgtcctattcgtcc

SEQ ID NO: 34959 - DNA, 2094 bp, Cannabis sativa
taataatctagctatggcttattctatatcactaagtcaaacttgtttaaaaatgagaaaaactctctcgtatataagctaaatcaagacctttgctcggtcaaatagcttattttttgagttccaacttaatcttcccaatagcttcaggatgtgtctccaagcaactaatcccaacttagatgatttatggttcaacaattaatacatattttgaattattctccccttctattagtttataacttatcatcataatcatcactactcctaaaaaaataatgtcacacatattaataatatccatttattctaatcaaataggacttataatctatgcatagtcttggacgaattatctacatggctcaaaacttggatcattataccacttactaatatatattttaaacaataaaaatactatagtctaatttctccaatacataactatatttatctttaaaaataagataataataattataatactcattcctgtcaagacttatacaaattttgtataattcttaaaattaatactttgctcaagaagttaatttattctatgtaattactatttgcacatccatattttcagactagcataatgaaaaataataacggaatattttaattatttcaaagtaataatcctaactcacataattctattaattcatttacctgacacattattacataattatgacaatacacatttagaataatgactctatttcacaatatttaatcttagagtaataaccttagtccacaataaacatatttagagtaacaaccctaattcacaacttatttacttaggatggtaaccctaattcacaatttctcaataacaattcaaataatatataattgtgtcaccacattatactctatgtgcttagttcattggcttacctgatttccaatgtatgaggaaaaatctcaatccacgggtgatcttgaccaagtgtcgatattcatagtcgtaatttctcaggttttacacaatgagattaatctcaaatcatattttataaatatttacaattaagactccaatactagatcgaataatagaggtcgaaacaaacttttcaatgatatatagaacgtccaaaacaagttcggagtgaaaagttatgcacaaaaaatagcaaaaaaattaaactgccattgctatctggtcgcgaccagattaaagcccatcgcgaccagagcctgaactggggctaaccctttctggttttgagcctaatcgcggccaccataatctggtcgcgacgaatgggcttaaatacccagaaatatcaactttttggatttttgaattctgaaaacccaattcaataccaaatctaccaaaacttggcaattgcttcccaaaccaattaacttaaagtgtttctcaagtatttcatacaacaaataacatgtttaaactcacaaacacctcacaaagctcaaattgcaaaaattcatgctttataaactcaaaacaatcacaagttgattttcatgcttaacaaactcagttcaaagctaaaattatcatagacaatcgagaaagcgacaacaactcactaaaaatcaaacctaaaatccagattcaaaactaaacaacaataatctaaggtttcttagcttttgaacacaagagcactataaaaaatctaaacaagattataactccataatcaacatgcaactacacaatttgaacatcaaatttccaaaattaatttagaattaaatataataaaaactaggttgctacctcaaatgctctttcctcaaagtcctaacaccaaaaccaccaaaattccttcaatttcttcaagattcaacaaagattggtatagtgattgagggagaaagggggtcgattttgagggataaaaccataaatgaaagcttttgttttctaatttaacaacaaaatatttaatccaattttaataaaataggtcaaatgaccaatttgtctttatggcataaaagtccacataaaaatattcaagagcatttctatcattttaaaatgtcacatataaaatcatttattctcatgcatatcataatttatca

SEQ ID NO: 34960 - DNA, 1388 bp, Cannabis sativa
atatatatttaattaatatttataaaattaaaaaatttatttttaaaaaaatttacaatatacatttttaaaaataatgtaccaatatacttttatttatttcggcactccatagatttttttagtttatttttttatttagttgtgtatattatagttatttaagacatctcgtaaaattttgagaaatttagaaaaatttaacacgctgaaagtaatgcatttctttaaaagtggcacactgatatactcctacctatttcagcattcgagaaacttgtttagttttttttttttttttcatgttcgtgtacattataattatttgagacattttttaaaatttcaaaaaattttaaaaaaatttaatatgctgaaaataaaatttagtattattatttttaatctaattagtaagtttatttaataataattgtggtgatttttgttagttaatatgatattatttttttttattagaaaattaatataataataaggaatttttttagtataatttttggtgttgttggttggagtaaaaatatttttttacgccaaatttggcaatagtgtaacaccaaatttagtgtgtgcttggagatgctcttaacagaatattctttattaattttataatatatatagttaaaaataaaaattatatagatatattatataaaaaaaattaatttaaatttaaaatacttaaaatattttaatttttgagtggcttggtagcaggttttggcctataaattttaaaggatggcgatgttggctagcctggaagtcaacgagtaggaagcagaggattaatgttgctatttggagtttccaagataggtagtttgtggcagtcagtctaatggcattatggatggtgagggaggtatatggtttggtagggtcggcggtgttgggtatttgagaaggagattgggtagggtaagccatggaagttgaacaagtgaaggaatatggcagtggaagtaggatcgaatggtagctctgataccatgtaaaaaaggtatatttgatatgtgtttcattgagtattttacagcaaatgaatagtggtacaaggaagttattttgtacaagtaatttctagaattaaggagaataaaatcagaaaaatatgtacaagatatcaatagaataatatccctaaaataacaaaagaaattgaggtaaaggaagaaaggattgacttagaagatgtcaattcttatcacatgatacgtgtcacctaaagaaaaatgtcacatcatctggacaggattcaggataacataactatagttgcttgagtaataaaaggaatggttaaagaggtagacaatgtatgtgtggaactaaactccatagtagttgtggcatttgga

SEQ ID NO: 34961 - DNA, 1783 bp, Cannabis sativa
ttattttactttaataatgattattaattatagaaagagaataattactaaaaggtaccactggtgcctagtattctctttggtgtcatactactattgatgcaattaagtagtagatctcatataacttaataacataacttttttactgaatatcgctaaccaatcttaaggtgccacctatggaagatgttaagcaatattggtgcacaatatcaatactcttataaaaaaaatcactaggatgtcactaaagttataaatacattgagaattttttgatacgacatgaaaccggcacaagcctgaaaggtacgagcacgatccgacatgaaaaatatgagtttaggtacgacacacaacaatattgcaaattaacacgtcaggatacgactaaaatagacttaagcacaacacgacatgataagcttgaaagcacgtcacgtaagcatgaataaactagcccaaaaatacaacacattaaaaaatttataataataataataatcgacatattgggtgaaactcattggtttaagcagtcaatattgggagaccaattgtcttagtgctctagtaagtacaattgggactccaattatggttgataacataacaaaggaaagaacacaaataaaatttgctagggtccttgtagatgtggagatacaagatgagctaccatcggttcccattcaatatgaatgcctcctaacaaaaggcctaattgtggcggctacggtcatagggtggatttatgaaaagctggtcagaattggcaaccgaaagtcaccaaaaatgattcgattgctcctgctgcagaggataaaatcactatagccacataggcaattgagaaatatccttcgctagctcctgcaattactgaaataggaactacctcttcaattccttttcaggaaaagagttcaactccagtaaaaggaaggagttagtttagtattgattggtaatgttctggaggtgattaactctacaataggtagcataaaagtggaacaggccaaatttgaggaggacaaagagggacagtgggtaatccgaaagagaaaaagggaaagaattctaaaaaggttggctaagcagcaggaaaataagtttagtgtgctataagaatctttaattcatcatggagaactgcaacatactgagctggaacattagaggtttcaatcagagaaataaataggatatcgtgaaaggagattatgactaaaaacaaagtgagaattggtgttattttggaaactaaagtaagaggtggcaaagtaaaagaaataatgggctctacctttttaagatgggaggattacacaaacccaataatagaaggtagaattttaatcatttggctcgataaatttgtaactatagaaatcctagaagagaacactcagttagttcactgaagagttagaatgaaacgaatgcttaaagaattgtgcctagcagttgtctatgtgagtaagatgcagtctgagagacaagatttatggcgaaggttggctggtttatatatgccagttaagccttggcacctttgtggggactttaacacagttttcaatgatggaaacagaattggagggaagtcaattagctctggggaaatttggctggctaacaattggatgacatcgggcctagaagatgagaggaagaggagtgactccaagtatactgttaggctatttttagcctatgttttggatccgatttatgtgcatttttagctgtgttgggacggaattacgcttgtttt

SEQ ID NO: 34962 - DNA, 1427 bp, Cannabis sativa
  modified_base (658)..(664): a, c, t, g, unknown or other
tcgacggagcagtagatctcattgaaagatgtctggagcttattagtgaaggtaccatgagtatgccttcctatagcgagatggatacctcgctatttgttatttgaattcgttcaaatgttacgcttagtttgtataatgtatattatacgctaagtgttccaacagttttcatgtctcgtcttcatctctttatacatagcgaggttggtgtctcgctttgtattactgatgtcgtccttatgatcgtgtcttcatatacgaaatagtttctcgtcaatatgtgaattaatagtttgtatatccgtatctcgcttaagactttatagtcaacgagttatagatatactctatcagctccacatttaatgagttattccattttaatatcttctaatataattttcattatattcgttgattcgtattctcccaggttgacacgtgtcatcctctaaagtgtcagccgaatttcgagtataacaatatatcatatatggatgctatataaaaatcattatttctatacatatatattcccataaatatatatattatatctcatcatataatatatacatataactcacatatattacatgttatatgtatatatatcactcatatacgctaacatgttataatctcaattataatnnnnnnnatcactatatataataatatatataatacacatatatatagctcatacatattatatattttcacatatatccttgaatgttaccaatcataaattagacacttatagtattaattgggtgatttggaggagttttgagctattagaaaggctcccaaacattcaaaacgcatgcagttgtatgatgaaaaaaacagtaactagttactaattaccgtttctccaaagtgttccaaattactttcccttaattttgaaccatttatataccttatatatatatatatatgaataaatcaagttttcaaaaaaacttatattttttctcaatatagttatcattcattcacatttatagacaattagtatcatcttttattaatataagagtaataatgtggcgaggagagttacacaatttatcatcatcatttctcaagaatttacaacttatttttatgatcattatcaacacatttgtaacttcataatgcatgttacaatttaaaaaaattaataatttatcacacttaattatttaatttaaatattatattatataaataacataatactagccccatcctatagattctaaccacaacatgggcaaacctcaacccacacctttgttaggaatatatagtccacacactataataaattgcctatcaaggaaaaattgaaacatgatttaaggaacatttgtatgaggcgtcgcgaaccacactcccacatagttggacaccgtacaaacacaaag

SEQ ID NO: 34963 - DNA, 2020 bp, Cannabis sativa
tgatttatatatttcttaagtgttttataaatcctaacataatattctatagtttttaattaacacaattattacttaatatactagcttgatttctttcaaaaaaaataatatactagctttatgtttggtaattggtaggaggagagagtagaatccatggggagttttttttttttaataatcaattttattattgagagagtcaaataatggttattaaacaaggtagaatttcttcccacctaaaaatcttgtttttaatctgtagtgcatatcatactcatcatgctacgatattatcattttgcataacatgttgaagacatacactcagaaagatagataataagaacctaaaagatctaacaacagtctcactcagagacaccctcggaaaaagaatggatagaaatcaaaatacctttaaaatcactccctaaacaagaaacaaaaacctagcgacgaacaattctagacgggtcgaaggagatggtctaagctgaaggtgaggagcttgtgctcatgagaaataacatcgatggagagtctttatcctttgtgttatttgatagttgttgagtaaataaatattgaaaaatttacataatagattaaaatttttaaaaaatatataaaagatatattaatacgatttttttttttttattttcacacttaataattttataatttatttatagttgttatgatgttatatatttttatggttactttttgttggtttataaattatttataattaccgtgatgttgatttgtcgttgtgttttagttgttttcttgctttttctgataaaatatatttttataattttacaactttacaaatatatatttgtaaataaaaattttaagtggtagaaattataaataaaataaaaaattggtatttctaaaatttcccataaatattaaaattataattttattatttttacatttatatattattttgaaaagatagaaaagacattttgtttaactttttgtttgtcttttttttttttttttttggaattctcccattttggagggataaaaaattaacactatgtttggtaggagggggagatgggtggatagagaggggtggagggagagtgatggaaggggagactaaatcacttgtttggaaagagggagaggagggagaggagagatagagggagacattctccctccaaaccctcaaaatgaaatccttccaaatttggaaggattgtaaaaaaaggcaaaatacattttgcaaaatacaataactacccttaaaaaataataaaattttatttttaaaatgacaattttgtaattttactaattaattttttctacatccttctcacacctcacacctaataccaaataatacaaaggagattaacaatcctctccatccctcttacttcccatcctctctaacctctccatccatcccactctctcactccataccaaataaaggatttaatcaatccctttattctcctccatcactctctccactctaccaaacttatctgagtatagctgttatttcaatatatattccaactttttttaaggaaaaaaaaaaaaaacaaacttgaatgccacgggttgaaaatgataggagcaagggaaaagcatttatcaatattaatcttcccatatattcctttaaaattaaaagtgataattattattcccattcagaattatgattgataaaagttctcgcaattgctttgctagtacattctaaacaagtgagtgtaatgtgggacctatttaaaattgcatttttttttttatttgaaatagttctattacatttttatttttcaaagttctataatatttttatttttaaaaaatattgtatataaatacaataataataataaaaagttatagcctgctatatatttatttatttactttttggaagctatatttttagagttatcaaacaaagatatatgtagaaaatttatataggttgacatttatatatagt

SEQ ID NO: 34964 - DNA, 2002 bp, Cannabis sativa
  modified_base (842)..(855): a, c, t, g, unknown or other
aaatgagtttagcagattttgatattatactgggaatggatttcttgtccaagtactcacccaatattgataagaggaagatggtaatgttccaaccaaaaggtgaagaaccttttatttttgttggatcggttcaaggatctcggatcccagtaatttcagtacgaacagccagggaattgttacgagatggatgtctgggctttttggctgtggtattggataccactcaacatgagtctttttggccagaggacatcaagatagttcgggaattcctagatgtttttcctgatgaacttctgggtttactattggaaagggaaattgattttgttatttatttagcacctggagtagaaccggtttctaaggccccttacagaatggctccagcagaacttaaagaactaaaaattcaacttcaggggttgcttgacatagggtttttcacggcctagtgtgtcacccggggagctcctgtactatttcttaaaaaaaaaaagatgggtctttgcgtatgtgcattgactattgggaattgaataaactgacaaataggaataagtatccttcacctagggtcgatgatatttttgatcaacttcaggggaagatggtcttttcaaatattggtctccgattgggctatcattagttgagaatccgagaggaggacattccaaagacgactttttgcactaggtatgggcattatgaatttttggttatgtcttttggactaaccaatgctctcacatcttttatggacttgatgaataggatattcaaggatttcctcaatatttgtattattatatttatcgacgacatccttgtgnnnnnnnnnnnnnnagaggagcatgagcaacatctcctgatggttttacaccggcttcaagaacataagttgtacgccatattcaagaagtgagagttttgcatatcttaagtgtcctttcttagacacattgttaggaaagattgaatcaaagtagatccaggaaagatagaatctgtcagggattggccgagaccgaaaacagctacagaagttagaagtttcttaggtctggctggttattatcgtcagttcttggaagggttctctaaaatttcaacacccttgaccgagcttactagaaagaatcagtgttttgtgtggacggataagtgtgaagcaagttttcaggagctgaaaaaggggttaatcatagctccagtgttagccctaccttctgataaagagaagttcgtggtttattgtgatgcatccagaaagggtctggggtgtatactagtgcaggatgatcaggttattgcccatgcttctcgttagttgaaggattatgagcagcgatacccgagtcatgatctagaactcgccacggtagtatttgctttgaagtttttggggcattatctctagagagagatgtgaaatttatactaaccataagagcctcaaatatttctttactcagaaagacctaaatatgagacagaggcgttggttagagttttttaaggattacaattgtgagatcctttaccatcctgggaaggccaatgtagtggctgatggcttgagcacgaatgatcctgggcaggtaactagtatgattcgatttcacctcggttagtagagaacatggtcagatcaagcatcaagtttgttgtgggcaaacttcataacttgatgctacaatctgatttgttagaacaaattaaagctactcagttaactgatcaagaattagtgaagaacaaggaagaggtttcagctggtcaagccaaatattttacagtgtcagatggtgggatgctgttatttaagactagggtttgtgttccaagtagtgtagaacttaggaatgaaattcttgaagaggctcataccactccatactccttacatcttgacaccaccaagatgtaactattgggttttatgccctaaataaaactctttacaatctcattagttatcaatataagaaat

SEQ ID NO: 34965 - DNA, 1739 bp, Cannabis sativa
  modified_base (55)..(63): a, c, t, g, unknown or other
cactctttccctacacgacgctcttccgatctaagtaaatctgattatattgaannnnnnnnnatttagggcataaaacccagcactgacatcatctcttactccttacagatcaatctgaacttcgaagtaagggatgtgtgataacggatcttccttcctggtgtgccagaaagggttcttgaattttggagggattggtagattcttgattcatttagagaatggtgatcgtcgttctcaaacaactttgaggttgtgatccctttcactaaggctgctaggttgtcaaactctgccatgttgacaccatggatggtggtttgcatctcagttggagcctctgttacccgattggggtctcctctaaaagctcccacttccaccaactgtcttttggttaaagtgttgtgcaggttttttgctcttccaagtcaattatggactcttgtagactttggtcatgtcgttatctcttaaccacggggtcgtgaaggcagcactagtgatgtttctgaaatgaacatcggatcatcttgggatgatgcactggggagcattcatttggagtgttgtagtggttacttccctcaaagtagtcttcagctggatcacagtgtagagagaatttaactggtcactcaaattcaactcttgaccatgtactcgagggaagtactcatactgctagccatcggggccacatgcaaagtaacaacacaactcatcaatttcatctcagaagtgttaacgcaaatttttgttaactaataaataagcattttttgtgatgaatatactcaaaaaaaaataaatgaacaacaataactctaataatagtaataaatagcaagaggatttttaacgtgattttgaagttaatttttcatagtccacgagtccatcttatttagggatttgtaaattggatacaaaatacaataaataaattatacagaatgaaagactggtataattctctctcttcctcaaattggttgtcctatgttaccctggaatttgtccctatttataggagtttagggtgactgttattcccttagaatcttatcacttgtaaccgttcgagaaatgtagataatccccacattcatatttacatcacatgggataatggcaaataacttctcataactgcttttttaactttatttataagcagttatgctgactatgcttcatccttctcccaatgtgaccattctccttaagatgctttatcataaatcaacatctaagtatacgtcaagtagtgcttctcgcattctttcattaatgttaagtgatgcatatgcgagacgcttatcacaatatgacaattacgaggtgaaccatgctaaagatgttctcttatctcttcaacatactcacgagtatgtgggtcaatgagctggaagctctttacgataattcattatctaccctttctaaacattatcattatgtcgtgtattctgtaaatcccaagatggggcttctgtgttctttgttcatctccctagtcttatcagttagtagttattattcatagctcgcctttgtctttaagaaagtgagtttgaatattcctaccaattgtgcttcctgaggcaatttgtctgaacatatttattattgcacaattcggactggttaacattccagcttcattacacgtgtcagcaacatattggtacttaaaatatgggtataataggaagtatttttgagtatggagc

SEQ ID NO: 34966 - DNA, 5743 bp, Cannabis sativa
cttggtcacgaataatggcataaactctatgtttaacattgttgccctcatctctaagaacgttctcagtttgcgttcttcgttaataacttctggcggaaccgtttgtcccttcatgtacaaggaacaaatctcacactttaaatcatataccaaaggatcaacctccaactcttcatataaaatttggcgcatttgttgtacggttgtgtcagttctaactgtcaacgtcaagctgccttttgctttttaaacccaattataaccctcaacacaccaaacaccatcgtacgatacagcaagaaatgatgtggatcctgcaatttcaaacaaaaaaaggtgagtgcagaaaaaaaaaatatatcgacatcccatcgatacccatcgacattatgtcgataaaaacatcaacagtaagggtgacagttctcatcgataaaccatcgacacactatcgacattacatcgataacaacatcaacaataagggtgacaattctcatcgccaaactgtcgacatactatcgatatagactccacaatgcactttgcatgtcagacacgtgtacaatggaaattaatctatacaactatcgacattgtattgatattctcttgacaaatacacattgcatgtgtttcacttgtatagttacacatttaatgttaataaatttttcctacatttccaacaactattcccaaccgccacattgcatgtcagacacgtgtactatcgataagctatcgacataacatcgacatcatattgataatatgtatgccgatttttttgttttgtgtgttattaacaaattatcgacatagtatcgataagctatcgacaactacacacttcatgcgttgcacttgtacagttacacatttaatggccattaatttttcttacattcccaacatgtatactgttctataaaagcaaatctctttctaattcataagtgctcttgtcttctacttctcttatacttaaaaattaaaggcaaatttctcttattcttaagttctaaatatgtctactagagagaacaagggcaaattctcaattctaactcctgaagagctcaagcaggagatgttggcatagttactcctcaaatgcaaaaagttctagacgactatagaagttttgaaaaagaacaaaatcataatgagttaaggttgatacaacttgaagcacaatttagcacaactggtgtatgactggctccaccaccagggttccccgaagggtgtcatcgttgcagattaggcatctttaatggtaaaccggtgaagcctggatctttatgcaagtattgcaagtctcacccacaagccaaacaattttaatttgttattttatggtttgtggtgagttttatttaatgtttgttttttttaatgaactttttaatattttaatgtttgttatggttgttatgaactttctatggggaaatttctatggttgttatgttattttatgctttatagttttttcaatttttatcttaaagtccacaatatatcgacattccatcgatatattgtcgacactgttggtcgacttaatgtcgacaacttctcaaataacttatgtatgttaattttctttttaatcgacatgatatcgacaaacgatcgacaacatgtcgatgatggtcatccctgacctttcttagcatgatatcgacatagcatcgatattctattgataaactgtcgataaaatctggaaaacctagatttcgatagaaaaccagatttgccagatctctaccatttcagaccaaaaaataccagttccaacaaatacaacacatataacgaaagcaaactacataaagtctaacaaaatgcttaaaacacaacttacccattataatggtgtaagattcttgaggatattggtgtgtgctccagtttttcaccaccgcccaccgagaaacaatcattcgacagggaagagagagagggacgagagagagggaagtttttttagttttttctagagagagagtggtgcacgagagggaagagagaggaagagagagggaagttttttcagtttttaccaattttatttttttaaaaaaaaaggtaaaatgggaagttcatgtaatcaatgcaattaatttgtacaaattagtggagggtctaaaatttgatattgggggttttattaggggaaaaagtgaaatttcccttacatattactaaattaaatatttttattataaaaattaatatatatttatatatatgaatggaattgattttttattctatctcattatttttattatctaattattatcttgtattgtaaagataatttatcatatcttatattagtttttttaatgtcttatattatcggtgtatcaataacatatatttatataaatttatatttatttatgcatatttatgaaattttaatttgtgccatcgttttatatataatattatttattatcaaaatattttctatgcattgtattaaatttttgttaatatatatttgctattatttttgtatgctagttagttgagtttgtatatttttgatattgttatttttataagagtaataaaaaagtatttttctcctacttccactcaattaggtaaaatttatgataagtctaatgctactccaatccttatccctaactattttcatccctactagcacaaaccccatggagcttaagtcacccaaaaaagaaggtgatgatgaaacacccactaccaagaaaaagccaagtagacactctgctgtttgtgattattttacaaaaattgagggaggaatctaaataatcctaggtgcaaatgtaattataacgagaaacactatgtttgtcatagtactacactaggaacaagtaatatgtggagtcatttgaaaaatcaatgtaagaaatatacatttagggtacctgataagaaacaaaagttattgaattttcaaaatggtaatgagggtggtggaaatttgttggttgaggcctttaataaggagaattgtcgaaatactctagcaaagatgggagtgttagatgaacatgcatttaaagttgtagaaggtgaaggctttaaacatctcatgaaagtggtgcaatctagatttattcttcctagcagaatgacaattactagatatatatatataccaactttatttagatgaaaaattaaaattaaaagaggagttgattaaggtgagtcaaagagtgtgtttaacaattgattgttggacatccatccaacaaatttcttatatgtgtctaacaacacactacattgatagtgattaatgtttgaaaaaatgaatcataagtttttgtcaaatttcaaaccataaaagagataccattggtaagacgattgaatcgtgtttattggttgggaaatagagaaggtgtttttcgtgactgtgaacaatgcattagcgaatgatgtatctgttagttttgttaagaggagagtcaatgcatgaatatggtctgttcttgatggtgattttatgcattttagatattgtgctcacatagtgaattttattgtgaatgagggcctaaaagatttgcatgattcaattgttgttatttgtaatgttgtgaggtacatttggtcatctcctgcacgattagaaaaaaatcaaagcttgtgcggagagagaaaagattgattataaagggtgtttagttgtaaatgtgcctacaaggtggaactcaacttttatgatgctagatgttgctattatctttgatatgagaatgcattttcaaggtgtgaggaggaagatgatgtattcttgagttacttcaatgaaaatgaaagtgggaagaagaaagttagacctcctactagtactgattaggagagtgttaagatatttatcaagtttatatgcttttattgtgaagtcacactaaagtttagtgataccttacttgttacatcaaacactttttattatgaaatttatgaaattcacactcaattgtctgatttggcctcaagtgatgaacatttgttatctgttatggcagtcaatatgaaaagaaagtataacaaatattaagggatataaaaatatcaatgttatgccgtttgttgctgtcgtgcttgatgctaggtataagatgaagtatcttaaatattattttgagagtgtttataatactgaaattgttgcaaagattgtgctaaaggtggagcaaacccttcaacatttgtatacttgctatagtatggacaataaatctaagattaacgatgagaaagacaatggtagtgtatcaccaccaaagagtaagatcaagcaaatttaaaaaagaaattattatctctatatttgcaacaagaagtgatgaagtgtttgactgggaaggtgaatgatattgagaggtgtttgagagatgagattgttaatccaatgacttcttcatttgatgtccttactttgtggaaggataatgctaggaggtataatattttgtcattgactgcaagagatgtccttactatttttatttttttactgtggcctctaaatctgcttttagtactagcgatcgtattttagattcatttagttgagtccaaaaacggtagaggcaatagtttgtcaaaattagttaaaggcatcacgtgaaggcattcaagttgagaaatatttggatgacactcaaacttatgactttcttgaacaaggtaaatatattactctactttttaatttattttcaattatattttaataagtttttttttagataattcaaataaatgaaacacaacatcaaaggagatgcaaaaaattgaaactctgattgttgactaaggaatgaaaaggtatacaaagttatatacttagtgttattatttttttatttttattatgcataaattacttaattttatatttttcttaaattcgcatgtaagtcatcttcttgagtggatgaatcacaaagctagttttatttatcttttcaactttatttttcctttaaaactttataattcttattgtgaacaactttttttttagacttgagaactttaacattcgtcatttatatttttagtttatggttaactacaaataatgttggagtaaacctccacttacactgataatagaactaattacaagggcagaagtgtaaatacaagcaaatccctattttggccttcggcctctaaaaaccctaacaaaagttagttagaatggattaggttataatccacacctaactaacttctgtaactaacaaattacaggtaaaaggcagaaccctagatctatatatacctgcatcaaaagcacaaccagagatagttgagagacactcttcaagatccaggtgttgaaagcttgaagaagaaggagttgatagtctcacatgcacaagaaaacaaacagagagttagatattgtgagagagagggattaaacacttaatatgtattaaaaataagagattaccagtcgagaaattacctgtgacttggaatcttgatctttgtacttctgaacaccatttgatagtggaatcgagctctcaaatctgaggagcagctcaaacggagacgtaaccaatttattggtgaacttcgggaaaaaattctgatgttttctaatcctatttttctttctgtttgtgtgtgtgtgtttggagatagatcagatcgtgttggatctgatcttgtatttgtgtttgat

SEQ ID NO: 34967 - DNA, 3168 bp, Cannabis sativa
tgatggtgagttattcactgagttatgcaaaaagaacaaaattattaagagcttctcgtcagtcccaaggcctcaggcaaatggacaagtagaagttgttaagaaaaccttgaaggatactatcagaaaggagttggacgctgcaaagggtagatgtgtagatgaactaccacaagtgctttgggctcacaaactgagaaaatagcaacagggcatactccattctcgttggcatttggctcagaagcaatgctgctagtagaagtcaatattgtgacccacagacgagatttttataataaagaagaaaaccaagaactcttgaaattttccttggatttacttgaagagaaacttactgagtcgcaaattactaatgcagcctatcaactccgagttacgagttatttcaataagaaagtaaagaaaaggctctttaatgtcggtaatttggtgctaaggcgagtatttacaaatacgagagatgcatctgtaggagtatttaacccaaactagtagtgtccttatgtgatcgaggcactagttgatttggggtttataaattagctcggcttaacggtgcgctaataaagaaccactggaacgtggagcatttgcgaccctactaccagtaaactaatgttgtaatctctccttctgatgtaatattttaaaattttaattattaataaaattgaagtatttttgaagtaattacaaagttttattcattaaaattacttgaggggaatatatatgtgtatgatcaactagaatttatctaaaaatacataatatatggcaaacccactccatttttaaaaaattttatggacgacgcaaagtcaaaaatagcatttgtaaatgagagttaactcataaaaaacaacactaagctacatgtgaagttggatatttaacggctcgtattttataggaatgtattaaacgaggtaccaagatgccttgaaaaaatacataacctaaggtgtgaatagaaggcttaactattcatacaagcaataaaaatatacgaagtaatctaaagtatgtttaagtttgcttaagtcagattataactctttacgcgaagtaaaactaataaactgctcacgaatagaagacatggcagatcataactgctcgcatacatagtagattattaactacttaagcaatatcaaaaggaaaaataaggacagtggaaatgcttacttcaagtactttaaatttgataaaagtatgattgcttaagttgtcaataaaaacgcaaataagcacatatattaagttcaaatgtaaaagtacgaggcagaaaataaaagataaaataaaagtaaagttagccgtccaacaatgcgaacttgtctctacaaaaaaaatgccacaaggggcaaaccattgtctcgaccatatggccattttcctaaataaaaaaaatataaaatggttaaaaaccaagtctacatagtaggagacttggatggttcttcttcttctcccccagcctcggcctcctcctttgcctttttagcttgctcgtagtaggcaaggacgtccttcatgccctttcccaagaagctcaagtccatttctggattcgccatccaagctcggtagatggagcgcttggcaatagcgttgcatcgctccttggtgttgacctcagccccctcgagctttatgatagctacattgagttcttcctggaatttttggcacagctcggacttgtccttggcctccttctgagtttcctcaagttcagctttgttaaccctcttcacctcctcggtctctttgtttaaacgatagatcttcgactgagcctcgttccattccctagcaatgacctcacgttgccttatggtcctttgaagctcgccctccaattgttccatcctatccagaccccgatgttgggagacaaaggagatgaaagtttgctaaaaaactaatgaatgaaaaggcataagtattttttagggttattggaatagaaaggaaaaacgaggaggaaaaagaaactaaccgagagactaaaggcgacgctcctttcaagcatctcgtttagactgccattattgattagatcccaatcattaggcaaaaaggatcggagatggcgccagcactctgcaacgtattgcgcggagtgttccgagccagcgctcccagtctcaatgggcaaagtctcaggtacttggctcgaagaagctgcaacttgacttgttttaggaacgggctcttcggtatgtgcgagggtaagaggatgagtttgaacttggttctcaggagccttgaggtctatggtctgcgaggctcgcttcttgttgattgttgtcttcctgggccttttaaggggctccacattgacatatgacgaggtttctgaggcagttaaccttttctttccctttttgcttgaagagtggaggaggtcctctagatccatatctgcgagacaaaacaatgtgttaacacttgtttcaaagcaaataaaggggaaaatgggaaattatttcccacttaaaggatttaccataatcataagaagaagaggaaggaggactatagtattcgctaaattctttagatcatgtgatcctgaatatgtcataggagttaattagttctaaatcccaactcaaatctatatgacctgacctatccagcatagtcccatactgctcgacaatcccatagtaggagctagtacagctaatctgatcgtggaattctgggtaccaactatcgaacctatgtgttatgaaatctttgagaaaggggttccatgtgaaaaaattgtactggctatctctaaaagacactaatttactatgctcggccctaagcactgtggatgaccatacacattgattacctcgggatacttcttttttagctttccgagggactacattttggagataatgcacctgggctacgtagtcctgggattcctcgtcggctaggaacgaaacttgctgccacgacgtatacttgggatatttataataactagtatactcgttctcagcgaggaggcccacggacctcaggttggcctagtttaaaagaaagtcggatgatcggagaccaaagggaagaccccgtaggagcctgcatcgcttgaccatctcaggagtaggatttggtcttttcgag

SEQ ID NO: 34968 - DNA, 1836 bp, Cannabis sativa
  modified_base (468)..(474): a, c, t, g, unknown or other
aattaacatatacatattaattgttataaaattataggtcctaattcatatacaattgtcaatctaataccacatgttagaaaaataaataataaacgcaagatcaatttgtatataatatagaacacaataacaatagataataattaggtatgcgtagctgatagattcataacaattaccacaatttgatagtacaatactattcattaatgacatgtttacttaaagggaataggaatcaatggtatggtattgattctcgtacaattgtttactaaattttggaaagaaagaaaatagtatgacccacacaaattatggagaaaacaaatttatttttatagggaatacctttccctttcctcttaatttatttttattttaattttattaattaaaaatgaaaaagacaaatatgtcttttaaaaatctataaacagaaaataattaaatgttctaataatnnnnnnnttgtcaaattaaagtatttcgattacatttcctagttatgtaaataaaataatatgattctagttttatttctagagagtttagtaaacaacataataaaatattgttttcgattattttctattttaaaccgattcatttttcccattaattattttgattctaattacagtttagtaaacgcgccataagtcttcctctctgggtctctaaatcaaaagtaattttatttatctgattatcaaaagtataaaattgtaatgaggcaatatgcattatagaattagggaggaaacttagctacataacccaagttagaataggcttgctcaaaggtttcagtcaactagaaaaaactcacacttctgcttcacctatactttacacacatatatgttaagcccattaactatgatcaccaacaatatgagctaacacaacaaaaacctatctaatcaacttaattttttaataaaatcaataaaagttattataagcccaaataaaaagcctaacagttgtcacatgtcctcctctgtactttactatatacttgatattgatatatatatgaataaagtatattttgaatatttcttaaaaaaaaaatatcataattatatatattacataaatacttaaaaaaaataaaaataaaaaataaaaaatattaatataaatattttatcaaaagtattaaaattaaaaattaaaattatttgaatttaagtatgtaaaattaataaaaatgttaatattaagagtggtgactaatgttgctaaaaagtaaaaatttggagatcaatttaggaaaaataaaatttgggattaatttgaaaaccaatttatcaaaaaaaaaaaaaatagagactaactttttaaaacttatataatttaaaaacatgttatacaaataaatttgtattattgcgagttgacaaaaaaataaaaataaaaaacagttttaagtaaaacactaaaccggtaacacagcaaaacaatgtgctggtatattaacgaaataaatgaccaaacaaagtgtttggatacgtatgtatgtatattcaatataaatataaaatatctggcttgatgttgtttaaccttaagctacattaaaaattaaaatataatcagcttcaaattatattccaaaacttaaaaattcaatataatttttatatatatatatataacaattcaatataaaatattaagaagattatttgacctttcaaagaaaaaaatagaggttactttttattaatgaaaatagtcaaaagaaaaaaaaaaatcatctattagcactttttaatatttttttgttaaattaataagtaaatattattttgtaatgacaat

SEQ ID NO: 34969 - DNA, 1584 bp, Cannabis sativa
  modified_base (1244)..(1246): a, c, t, g, unknown or other
ttctctttctttagatgataatattgataaatttaatgaaataattgttggtttagctaacattgatcataaggtagacgaagaaagtcaagcaatcatattgctcacatcatagccaatggcatatcaagaagttaaagcagcaattaaatatggaagggatgtgatctcgttggagggtgttcatgcgacattaaaatcaaaggactttgaattgcaactcgagaaggagactaggaaagatgaagcttatcttgcaagagaaagaagtcgaaagtgaggatcatcaaggaatagccagtcaccatcaagatcgaagtcaaaaataaaaaacaatcgataatgttatcaatgtggaaagattggccacattaaaagattttgcagtcaattgaagacgcattatggtttcaaatccaactatgatgacaaaagatgcaacggaagaaaccagaaccagtacttaaaattaaatgatcatggaaatcaaagaaaagactctgcagttgtggctgagagcagtggaaatggaagttcagatggggaattattttttatttcaaaaaatagtttcagtaaagagtggatccttgattcaggatgcacttatcatatgtgtcccaacttagaatctttctttgattattaagaaactaataacggtggtagagtactaatgggtaatgatgtttcttgcagggttattggttatggcaaggtggctataaggcaattcaatggtgaagtgaagattttgcataatgtgaggcacattccagaattgaggaggaatctgatatcacttagaagcttggaagatgaaggttatggctataagtccttgaatgggagcctaaggatcacaaaaggtttaatgcttgtgatgaaaggaaagagagtacatgggttgtatgtactcgagggtgaaattgtacttgtggccgaggcagatacagtaaaaggcttagaaagtgatatgcagctatggaatcaaaggctcggacatatgagtgaacaaggcatgagggaattacataagaagggagtcactgtaaagcttcagacatgtgcattaccattctatgagacttgtgtttatggtaagcaacacaagatcaaatttacaacagcaactcacaacacaaagggagtcttagattatgtgcatgttgacctttgggggccaagtagaatcccaacacattcaagtaaacactacttcctatctattgttgatgattttnnnagatgtgtttggacctatttacttaaaaccaaagatgagtgagaaaaatttaagatatgaaaagctttggtggaaaacaaaacaaatttaaaggttaagacacttagaaccgataatggtatataattcatcaacactgagtttgataggttgtgtaatgagcatgggataactaggcataggacagttgtgaaaactccacacagaatggagttgctgagaatatgaatagaacccttttgaacaaagttagatatttacttcttagttcggggttgggaaagcctcattggggagaggccttagctactgcctgttaccttgttaatagaagtcct

SEQ ID NO: 34970 - DNA, 2941 bp, Cannabis sativa
acattccccacaagagctggatgccgagactcaatgaagggattcaactcatcagctagccaaggatccatcaaaatgtttgttgtagagccatcccccaccatctttcgaacccatgctcgaaccaattcctgggcttcaaggacactcctccaaatataacttggattagatccaagtgtagccgaaaggaaagagcctgtagagaagtatcgggctttaaagattttccccatcaagctatcgccacatgtgagaagcctccacatttgctttgccaacaaagcaagattaaagtccctaaaattccgaaatcccattccaccattagctttgtgagccgaaagcttatcccaattcatccaatgaatacccttcttagaagaagatctccactagaattgactaatagctcgctcaataacattgcagattccaacagggataaggaagacattcattgtgtaagcaggaagagctcgaaaaactgacttaataagcacttctttaccagctctagcgagaaacttgttgtcccaagtttgaattcgtttatgcaccttatccttcacataactaaagacaacatttttatttcttcctaccgtacttggtagacccaagtattgctattctcagccgcctctgaatacccattctagcacaaatgatttgccttgttgctgaagaggtattagtactaaaaaacactgaagacttttcaaagttcacttgctgaccagtagccatagaaaacagttgaagtagttgaagcacacgagtgacttccccatttgtagccttacagtagaggaagctatcttcagcaaataacatatgagacaccaacagtgcaccattagcaactttgattccatgaatccacttcttctcttcaaaccttctgatgacagcagaaaaacattcagcacacacaaggaacaaataaggagagataggatctccttgtcgaagccctctacttggaacaatcggccccaaagtatggccagttgttacaatctgataatgcactgatgataaacaaccgaaaataagtcgaacccatttatcagcaaaactcattcatctcaacatagcacacaagaaacgccaatctactcgtcataggctttacttaaatccaatttcagcgccatgtatccatctttgccaacttgctttctcttcaaatagtacaaaacttcaaaggaaaccatgatattatctgtaattaatcttccaggaatgaacgcactttgattcaaagatataatcttagataataatcccttcattctgttagccagaactttagaaattatcttagaaataacattacaaagagagataggacgcagctcactcatccgatcgggcttcttcttcttaggaattagcacaatattagtgtcattcatcccattcggtatttgctcattgcagaaaaaagctcgaacagtattgatcaatagaccaatatttttgaaagaatttaggattcataccatcggggcccggagacttatcggggtgcatttgaaaaactgcatctttgacctcatcatcgccaatcgaccgaagcgaaaaaatcattgtgttcctcacaaaatgtaggagtgacacaatcaagcacatcctcccatctagtaggctcagcagtaaacaatttagaatagaaatcaacaatgacattatctaaaccgctatcccaatgtcgcaaaattccatcatcatcctttaagcagaaaatttgattgttgcgtcttctagtactagctttagagtggaaaaacttactattttgatctccttccttcaaccaaagtcgttttgatctttacttccaaaacgtttccctttgattaagcaccgcaaagagctcctttttggcatcataaaaagtttcttcacctcatcatcccttctactcttataccgcttcaactcatgattgcaacttttgatatgagaagcgatactcccaaaagcttcttttccccactaatgaagctctcggccacactcttcaagtttttcctcaatgtcgtggcctatcattctattccaacaacttcgaataatctcttcacaaccttgatgagtcgtccaccaattctcaaacttaaactattagtcttgtgtagaaaccgtacccatctgaagttccaaaagtaacggagagtgatccgatggagaaatttctaagttagtaagttgagccgtagggaagatgctcaaccaatcattgttcaccaaagctctatccagtctagcttcaatccaactaggagagtctctactcttttcccaagtgaaaggatgcccatgcatctccatgtctctcaatccacacaacaggattgcctcctggaacccttcaataagccacaccggataaggttgtcccccaactttctctgattgattaaggacattgttaaagtctctcataaggcaccatggcaaggttgaacgactaagaagtgttcttaaaagatcccaagttttccttctaagactcctattcggttcaccatacaaccttgtgaatctaaactccctttgtccttcaaaagaaaccttacagtcaatgtggttctcagaaaaagtgtccaccgagacctcttcttgattcttccataacatagccaaccctccacttcttccttgggcttccaccacaaaaaacccctcaaatcccaaagctctactcaaatgatccaccttcatctttttacacaaagtttcacacaaaaacacaatattgggtcgtttattagtaaccaactccttgaggaactgaacattccgtgacggcccaagcccacggcagttccaacacaagattttcataatgattggcgaaccccaatgccaaggcccgccaaagatgagttttttgaaaagttactcataacctttttgtaacaccctaact

SEQ ID NO: 34971 - DNA, 3628 bp, Cannabis sativa
atataatttatatataattagtcaaattatttttagtcacaaattttattttgagtaaactaagatttttcttagtaaatttcatatcacaaacaaaataatcacatttgaatcattctaaaatagaggaaaataaattatgaacaatcatcatgcctacaatgagtaagaatcaaattagatttataacgtaaacaagaaactaagttatacctgattagaatgtgaaaattttatcttccgatcgaagagagtcgagaatgagagatccatatacaaattaatagatctaatatatacatatataaataaataaatgagagagggagagagagagagagagagaataataagtgagaactctattggcagctagagatgagagggattacaatggatttggatttggaattttccagtcgttcacctgatacaaaagaagaccaagaagaagaagatatatatacatatatatatagagagagagagattatatagtgagagctgaaataattttagggttttatgttacatttgttccgcacgaaatgaaggagggaaatagaatttggagccagagaattactaaaaccaatttaagttcgcttcgagaaatttaatttttcatttttttaatcaaataaatattaagttattattaggcgacacactgttaataaaaatagaaatgttgtccctaaaaatacttagaagcataattactagccggcatagctaaaaataacgagttatatagaggtgattttttgtcacccttaatgttgtcgcttctaaaacacatatttatattgtagtaaggataaaaaaaaattaacaagactctttaggagcgatgcgtttttcgctcctaatacctatactattaagagtgaccttttgtggcccctaaaactcacatttgttgtagtgacgggagctgaagtataaatactccatttgaattcttataaaagagttgaaaaattactatttgtaaaggagcttaaattttcaatacaacactattttactccattgatgtttttagtttctcttaattaagctttttatctttagcaatttacatttgactatttaattaacgtttagttgataagttcttaccgtcaaccttagttttatatcaaaatctatttgttacttttttagattcttgtagttcaacttatatataagtcaccatattggtgcatcaataagaaataattgttcagacttcttcctcattctctcagtcttcttcccaaaatgagtaggaaatctaaaagctagcagtgaaactgaaaagctttattattatcagataaatgctaaagagtactagtggtgtctagtaccatcctatgtgtcaatattgctattgattcaactaagtatcaggtcttacataatttaatataataatttttaagaagtatcgctagccaattgcaatacgacatgtcgaaaaagtactagacagtactgctgcctaatagcaatgttcttattatcatgcatgcatgaatgcttatagcttgaactaatgatggtataataggtataataagtacgcccacctctaacgttagaatcaaactgtactcgatccattcccttttagatattatgttgaagctttattcccttgttcgaatgacatatgcatttaaaaattatttgttatctcaaggcggctagtcaacttattatcttctaaacgtttgaaaaatactagctactatatattataatgtatatggtattgtataatacaaacaaacacatatataatggtaatgcagcatatgtatataatgcaacttaaaccttggacctttgtgcgattatatatatttaaaatttcatggaaatataacacacgtttttcttgaaacacgtacgttaagatttaacacttgaccgtctatatattcactacatacccaatagactgttatcttttcattcaagatcttacatgattaaataacatttttcttttttattatttggtaagcttcgtcgtagatctaaacctaatccattatataaaaatatatatatatatttatatatataagactggatcttaaaatatatataataggtaatataatttattggtgataaagtttttcttaaggttaatattacagcaattatacacaccttcttatccactttataggagtatatatatatatacatacatacatctcctgaatgtcataattaataagaaccagcttgatcgagatagctctcatctgaaacaagcttttagaactattatttttctccagagccaatttagcctacacagctatatcctttttcaaatatctacacataaatttatataaaagagagaatatatagcagtatttattaatttatttatttattttgattgttaaaaatgctgaaaatgacaatatgtaaagttccttacgggtcgagccatcgctgcaacccttgcagaatccataataatagagaattagttcaagctttcccactgagaggttttaaaaccaatcacctgatcggtctttcgttgtctaatatcaacacaaccaacaccaaaattatgtaagttccacttttcctctcttaatttttttttttttatatatatatgatgcatacaacgagtatatatattacgtttttttgtttaattatttagatcataatgttgttaagccatgaacaaaatttattgcttgatcttaattaattaagatttataaagaatatctttaaatctttattatatataaaaggctcataatttcttattgattgatgcaggcataagatgatgtgtaacagtgttgatcctgcaggagcagcttcaggcggtggtactggtgctccttggaactctttgtaagttaattgattatatattatttagaatatctcttgttacatatattttgatattatttgtacattttaatttcggagattatttattaattaattaattaataaaactgcagccaaggttgggttttgggactggtgataagtctgattctaccattttataggaataaatggggtcctctagtatcaatcaaaagtaagaaattaatttatatgtacattaattctttaattcaagcttaattaataatatatatatatatataaatattttgagcagggaaggtggacatggctgtaaacacagtggaagcggtggctgaggctgtagaaaaggtcgccgagaaaatggaagacatcgccgacgatatcgccgataaccttcccgacaacggaaagttgaaggatgctgttctttttattgaaaaagttgcccacgaaacagccaaggacgctcaccttctggacgactttattgaaaaggtattatatatataaaaatactatgttatttataatattgctatgcattactattgctttcatttcgccatctaactttcaatataatgttatatatcataattaaaaaaaaaatggattattaattaagagattattataagtccaataaccagcatattcatagatccatcatccatgtgctacgcattgttaatatattatgtatagattatcgaacacaccttatataataataataataata

SEQ ID NO: 34972 - DNA, 2213 bp, Cannabis sativa
  modified_base (1260)..(1263): a, c, t, g, unknown or other
tgaatccaaaaccttgatatttctcgtgtcccatattagcaatgtgcctccagatcttccgatggtagggcttaaaatccatgccttaaaccgtgacctccaaatactgccaataaaccttctatctacatcttccttcttcacctcttgtaagatcaccatattcggattagccttacatattatcgctttgattgcccttctcttctccttgtccccactacctcttatattccatgagaggatcttcattaaactttcttgaccaaccctgattttttgaagcttctatcataattgacattgaaagtcagattattcaattctctacttttctttctcgttggcttcctttctcctttaatgaaattgttgtcatcattattttccaggatctccattcccatctccgccatggattgaacaatgttagaccacgaatgatcctcatgatagttttgtcttgtgttctgtccttcctcttgtgacacagtagttgactgcatttcatgttcattctgtttccacaattctttgatatcaccaataatatcttcttgctcttcactattttcagcctcagaatctgctccttccccctccgaacattcactgtctgagcttagcccaaacatttcatcttcaattaactctacatcagcctcctccccctcaaagtagaattcttcttctgttgacgctactgtttcacttctggtgtgtcccattgactttctttttctgatatagaccttcacaaactgttcaaaccccttttcttcttcttgttctacctctgctgttttcttcaaaatagaagacttcacagttttcttgataccaacatgtattaaaccatccatggaatctgtagcttaaatcgttgagcttgaagagctttaattcgtaattcctaccatcgtggttaagagataaggtttcaggtacaaaaccgaattcatcacccatcaattggagtcttaagtgagataaaaaactagcttcagccgtatccttgtccacatccattaagccaccacacatatctccaattttcctgaaaattctcatatgccaaaggttcaaagggagcccttgaacaccaatccaagatcctttgcattccacctttacattattcttttggttctcccaactccaaggagaaaatgtaacatatgattgagcccccggaacatacattctttgcacgttgactaactcttctttttccatctcatccttacaccaagtaatacnnnnatcatcaaataattgactaactatcagctttctctctagctctcttcaaaaattaaagaaaatagtgctccaatcccgtgagtgttgtccctagcaaggaaaattgccaaactccaatctttaggttgagcttttgaacgaaaatattcatagaatttaggttgataaaatctcttctcagggatagattttttggtttgaacccgaggttgatttctggatataattctctccattccacttttcccctgtttcgaaccgcagcacccttgttgtgctgaatattcaatgccagtttctccatctgtttcaccacattcccacccattggtttagtgacatgctgccccgatcttttgacgatattagcccatgattgagagttcttcttgcattctcctatcttcacttctttttgctgttttactccatcatgaacgtttcctggcttccttttaagtacaccaaagagacaattatatagatcagaccacccttcagcttctgtttcttctggaataatcaccattctgactttgttattcttcagggttgaaatcttcaagaaagctccattagagttagtaaagcattccataaaataacttccactgctgtttctgaagaatcttttgaaggcaaccctttgttgtccagttttcttttttagttcctctagaattccagtcatctagtccgctgcatcgattgttacccctatctcgtacccaaaaagtcttgttctctcacaaattctaaccgaacctccatcttttgataaggtgatcataaacgccttgtgtttggtacgaaaactccaatacttatgaagattctgatcacaatttggatcagagaaattttcccagccaacaccagtggggtgaaggccttttttcttcccaaaaccagtggggttttggtgttttccatggccagaagggccatgg

SEQ ID NO: 34973 - DNA, 1239 bp, Cannabis sativa
aacttcagtcagctttggtgcccccatagctagcttttctaaagactcacccaaaactttgatgtaaactttagatctttttctgaagcaatggatttaggagctccatggagacgaactatctcctttacatacagttcagcatactgatccactgcatatgtaactttcactggtagaaagtgaactgatttagtgaatctgtccactacgacccatactaaatcatacattcctgtggttctaggcaaaccagttacaaatccatcgcaatgtcctcccactttcgctcaggaagggctaatggttgcagtaaacctgccggcctttgatgttcagccttaatttgctggcaggttaagcacttggacacgtaatctaccacatctcttctcatcccataccaccagaagtagggttttaagtcctgatacattttggtggttctcggatgcactgaataaggtgtggtatgagcttcaccgaggatttcttttttaagttcaacaacactagaaacacaaactcgagctttataccgtaacattctattatttgagattaaaaagtctttaggccgaccagccatcatctcatctcgaactttgactagctcgggatcttctaactgtgtcttttctgattctctctaatagattagattgaagtgtcaagttgtgcaactttccaactacaaactcaattcctgcactaaccatctcagaagctagttgaggggctatcataaccttggcgaacacctgcccgagacctcttctacttagtgcatcagccacaacattggctttcccggggtgatacagaatctcacaattgtaatcattaactagttccagccacccctttttgctttatatttaaatctttttgggtgaaaaagtatttgagacctttataatcggtataaatcttgcacttttcaccataaagataatgtcgccatatctttagagcaaaaaccacgacagcaagctctaggtcaagtgttgggtagcgctgctcataatcttttagttaacgagaggcataggctatgcctttgtcaacttgtatcaaaacacatccataccttgttttgatgcatcacaataaacaatgcacttctcttgatttgatggcaaagctaacaccagagctgttatcaaacgttgcctcaactctagaaaacttgcttcacatttgtctgaccacacgaatgctgatttttcttagttaact

SEQ ID NO: 34974 - DNA, 1700 bp, Cannabis sativa
aatggaacaagggttagagatctttatattgttagggacatattattctactgcaatcaatgtaaggtttcttaactttatatgtgtttaattccattgttttagagaattcatatttaaggaggtgttaaacaacatacatgttaataattcaaaatcatcttggtaaaataatctccaacaatataaacttaactgataagttaaaacttatcagtttatatataataatgatattatataataaataaaaacttaattgataaaagttatttcaccatttcttaatcactaagaaatttttacttctaggacactaggtcaaatctacttatcccaatacttacactatcaacttatcataatattcctatcaaagtcactaattaaacttattatgatatttttggccccaatcgagtctccaagatcgccaaacttaaaatatttttattccactaataactcatattatattcacacgcgctatagaaatctccataattaataaattatgcttatttatccacttataagaaaattaaaatttatgctgaagtagattagtaggatcataattccacttattacctaattaacccataatatataaaaaccctaattatttaccattaggcttatcaagatactacactggcagtctcacagaaactaagaccttatttgcaagctcaaactatttaggaactgacgaattacactcccagttactggccataagaagaagataagatggctgaactctgaagtcctaatctccctcaattgagtacccggtaatgaaacaactacctaggtacacacgacatctggacaaggtctcataggtcttgggatgtctcacgttaccttcaaggaaaatgtcccacttggcacccctctgacaaaatcccaccaaatcagtggaatgtctcgcttgtcttgtctaagaagagggtttttgctaaaatatacgatcaatctaagaattgaaacgatcactacttcgacactgtcgttttcccatgcaccaaagggccatgcatatctggacatgtcaactctcaacaatatcttcaaataatgtgtcacacctaccacttttggtattagaccttaagcccaaggcccaatctcataacaatatgtaaataccccaccaatggctttatacttagaataatcccacagtccgggtcatcccatcctgttttgcatgtctgcctataaataaaacaacatcttcatcattaaaggtgtaaaaaaaacccttgtatatacagagagaaaactctgcacaaaagtgtggaaaaacaccactaatactactactgattcgtgaataaagactcatcaatgccaagccaagtaaaaatcttttgtttatttatattttattttttctttagcttaatctttttttttttatatctagtttttgaaaaacttagtaaacacatatatttttataatatttaatataatttaaggtattaaatacaaatcttattggtagatgttaaaaaaaataaattttaaatgtaaaaaaataaaaatattcttgatgagttttgatactaaagttataattatgttaataaatattagggttgtacatcggtcggtttgggcggtttatcctatatattttttaacccaatctaaagtttgggttgttaaaatttaagtgcaacccgccc

SEQ ID NO: 34975 - DNA, 907 bp, Cannabis sativa
gggatcctaaagtcaccaatttgagcttaataatatgttgttttgatggtttgaacccctaattctatcaaaagaattttgttattattgataatgacttttgtaatgttgtgctggctgcttcaaataattaatctgatttgtctctgattaataaaaatattttagtttaaattcttaagaaaaataaaactcaacaacctcgataaatttctcagtttagttgcatgtggagtttgtctattgtaaattcttctctcatccatggaatttggcgatgatagtttcatgtatgcataagacttaagattgagacatgtctttcttaatctgtgtatgtttacttatttttcccaatttatgtatttatttttccaactataagaaaaactgactgaaaatattgggttacatttatactgtagtaatttttccacaacagtaattacacaagaacacttaaacatatatagaatacaaattaagtacacttgtcttcaaaaattgcatatattaagaaaaaatctatatcgaaattagtaagtcaaaacactattaataaacttttgaacacattaaaagtgattcaattttttttgtgaaattcctcacggtctctcgaactttaacagtatcctagttgcttctcaatgaaaattagatacattagtcattcataaccaaaattatgtaagaaaccattaataataagtgataatagattaacatactcttgtcatatgtagaactttgtcttactttttgtagcttgaaaaatctgtctttttcaactttggtagaaatattagaatatttctaattaaggaaataaaataatattattgattctgataaatgaatattttatattcattgaatctggacagaatcaattacgtaatattct

SEQ ID NO: 34976 - DNA, 2344 bp, Cannabis sativa
  modified_base (1155)..(1159): a, c, t, g, unknown or other
gggctgcacttaagcttgatatggttaaggcttttgacagggttgaatgggattttctaaggaatgttatgtttcatcttaacttccctatccattttgtttctcttatctttaagtgtttatcttctgctgctatttctttttctgtcaatggtgttattagtgagcctatcaagcccattaagggtttacgtcaaggggatcctttgtcaccttatttgttcattctctgttctgagggtctttctgctattcttagcaattatcagcgtcgaggcctcctcagaggccttgcaattgctaggaatgccccttctatttctcatcttttgtttgcggatgatagcatacttttttgttctgctgatcccacttcttgtgctgcccttaatcaagcccttactctttactctaaagcttctgggcaaatgataaattttggcaagtcttctattttattttcccccaatactcattctgggattaaagatctcttttttagtacttttcatttggaggataggccgtttatcaccaaatatttaggtttgcctcaatgtctgtctagatctaaatatccagctttttcctttcttaaagatcgaatctccaacattattcattcctggcatcacaaatggtttccgagggcaggaaaggaaacacttattaaagctgttctccaagccattcctacctatgccatgtcctgttttagattaccaactaaactttgtaaggaaattgagtccctaatttcaaaattctggtggggttcctcgggggataattcgaaacttcattggaaaagttggggaactgtttgtcaatctaagtttgttggggggttgggttttagatcttttgttcactttaatcaggaaatgcttgctaaacaagcctggcgggttctaatgtgtcctcactctttgcttagtcaaactctaaaagctaggtattttcctcattcttcagtccttgaggtaggccctggttttaatccttcttattcctggcgtagtctcctttgggggcgtgatctaatgaagagagggttaatttggaaagttggtgatgactcaaatattcatgcgattcaggatcactggatccctgggcttcgttataagttttatgcctcccctcctcctcctnnnnnaactctttcttattttctctccccatcgggtgcttggaatttagataggcttaaccagcattttgactcctccacggtaactcatatccttaatgttccaatttctggcacatgtggatctgataatctcatctggggtcaagaatcttcagggattttgagtgttaagagtgcttatcaccttgccttgaccaaccgtagtatagcttcgggttcttcttttcataataccaagcggttttggactacagtttggtcttcaaatgttccccctatagttaaacacttgatttggcgagtcttgtcccactcaattcctgttgcttcctctttattttttcgacacataattccatctcctgtctgcccgatctgttatcaaaccacggagacagtgaaatatgccatcttggattgtaagtatgctaggaaagcctggaaaaattcaagtttcattagtttttatactactaatttatctagttccatggataatttttttgttgctgcctttgaaacttttgattctcatcagattgctatactcttttgttttgtttgggcaatttggaattatagcaataaagtgtttcataatcacaaaaggccttggccacaagatgtttttcaatctgcttgtaattttttggatgaatttcagttagctcgtgccaagaacttcaagcaggagactgcaacttcagagggtcaagatctaatccctatcccggttgtaggaacctggcaggttaacactgatgcatctattgatgtggcctctcaaaagactagtttagcttcaattgtcacggatgagtgtgggatcattaaagcagggtttatgctcccattgcaaggagtgctacctccggatgttgctgaggcaaaagccattttggctgcgattcaatggttacaagctactaagctgccagtttctatccttctttcagactgtaaagtagtagtggacaaaattaataatggtttttgtaataattctgttttaagtgatgtaattaattgtacaaaagccttgctacctcaaagccctggactcgttgttaagcatgttcataggagtcataacatgttagctcatgatcatgctacaatcggtctcaggctttttagcgagtgcgtctggaatggttgtttgccttccagttatacctgttgactttg

SEQ ID NO: 34977 - DNA, 1629 bp, Cannabis sativa
  modified_base (196)..(196): a, c, t, g, unknown or other
  modified_base (556)..(563): a, c, t, g, unknown or other
gtttatggtagttccaatacgttttctcccatgtggcattaaatgcgaggtgactgttcaaatagagtccagtacctcccgaagatgccttaacacggctctagcctccgggagtatgtggagccttcttccatcatctccgggagttatcttctcattgacactcctgttgccaaagacttagtcgatttctttnagagttgagcctctcagctccacgtgtcatcgttatactggtccacgtattttgggcaaaatcaaaggcaacactcttaaaatatacagcttgttaaaaattttctctaagatatgacaattacataatcatgcctattttgttagatttcgtttcttttaccgttaaaaattaatatttttattctcgaactttgaccaatacaaattttgtccccttttattaaaaaaaaaataattttaaaaattataatgttgtataaattttgaaaaataaagaaaattaaataacctgataaaaatattaagtttacttaaaaacaacttaaattattctctaaaaaaatattttcaaactttnnnnnnnntataaacacgtatcttaaaaaatcaaactaaaattattgaaaatttaataaataatttaaacaaactaaaattttttgaagaaaaaatcaaacttatttatatttataaacacatattttaaaaactaaagaaaaaaaaaatttaactcaataaaaataaaaagttattttgaagaaaaattagaaattaaactaaaattacttaaataaattaatatttttggagaaaaaaatagacttgttcccataaaatttagtttttacaaaaattaaattttaatacttttttatatctaatggattttgttaataaaaaataaataattttttaaattgcttacttaattaaaatttttttttttattttcttaataatccaaaatggatttttttttttttacgatctaaattagttttttttaagatgtactgttgaatctttcttatttttattttgagaggcgagatttgatagttgtcaaaatttaggagttaaaatttataatttacaaatacacatttaaacagagtaatagaacaaaatctaactggactaaatttttgtaaaagttataataaaaataagtgaaaattacatcaaatatagaattttatataaaaaaaagttacaaaaatatgacatttataggtttgccactcttctatggtattttttcacatttaagatttttaatggtatttaatataacatacttttgtaaacctaatatccaaatccatattttatgtttttgtttctagcttaattagttttattttttttctttagtttattttacatttacattttagggtttctttttatttgagaaatttacatcaaatactaattttttttcaaacattatatttataatctgacaaggaaatttttacatttatacttttcttaattttttttttcttttttcactgttttttacttattaaagcttcaaaagagcctttttctgtttttttttatatatttttttaatcaattttgactctcttttttcttttcattttttaagtcagttgctgagtttttttctttctttctttc

SEQ ID NO: 34978 - DNA, 6680 bp, Cannabis sativa
  modified_base (6642)..(6644): a, c, t, g, unknown or other
tacaactgataaaaacaggaagaaaaaaaggtaacacaagatttcagagcttcaatttcgagtcccagtgtttgtaaatcaaggtatcaaaatcataagtggtagaatttgatgttattattggtgggagggagaagtggaagtagaagtgaaaggattagttaggttgattttgagatgtctggttgtttagttgaaaagcttgtaggtgaatggaagggtaggacatgagcttcaaacaccaattaagtcacatttgcagtctttcaggagtgcaaagactatggaggagaaaattaaatccaacacagatcaaattattattcaactatgatatagatataatgcatacacattattcttatagataaaattgttgtcgtacaataaaatggttcctttccttgcacttatatttagtttttgttaagaaagatgggttgtataataataagagatgatgaggtatcatccaaattacaacctaacaatccaaagaatttccattcattaagcggcattgaaaatggaaaaacattaaaaaacaaaatccttataaccactctatccctcctacatcctcttccacaattttgaatattttattgatttcttataaccaaatagtcaaaagaatggcattaatagttgcattctacaaaatcttcttccttcttcccataactccccgacacccgcctaaaccctccatttgctgcaatatatccggacaaaatgtgctcatcaaactcaatcaactcccatttgttgtaagcccaccccaaaagccagagtgaaagagcaatgcagaaataagtgatcagtagacacaaaacttctattacaaaacacaccaatttagagatacctgaaggaacgactgacatcattgtaatttctcagaagtatttagcttattaaaagctaccaatcaccctcacatcttcacttttgagggaggcaaatatttttatataagggtgcgtttggaaaccaaagccaccttgtaattattacaattgtatttgagtgtaatttgagataatcactcagtttaacgtgtttatctaaccatgttattacacaataactatgtcatttgagataattgaaaggtccaattacactctccaattctcacggccctctatgccaattaggtataattacaaaaaaatattttgttctaatattagttacaaaaaaaattattttttgtgcaattactaattatgttgttaattatcacatcacaaccaaactcatcttattttaaaatatattgtaattactcgactgtgtaattactgccatagtaatttcacaaccctaagggcgcgttaggaaagtcactatgtaattgaaattgacagtaatttggagtaattacaaagtttggcatgtttgtttagccaaccatgtaatcggaggtaattgaggggtctcaattacactctccagttctcatggtccccatgagaatcgggtgtaattacattgtgcaattacaaaatattactagttttagctaattaatgttattaaactatgtaatcaccaactcatttactgaaaataagaattcatatgcaattactacttgacatccaagcacacaatagagtataattactctaatgtataatttccaaggtagtaattacacgattacttccaaacataccctaaataaaatagtgtggagtgatttcatcattcccttgtaaataatctcttaaaattgttttgctagaaaataaatccaagccatttagcttccaaatccttctagcactaatatcacagctaaaatctgtagtagctctctcccacctgtccctaaactctactagatcttcccaaattcttatttctccccttgctatagaattgatttgcagactaatagcttcatatggtaagggaaacttatcatccatagtgacttcctcaactcacatcctccaaatgggattgtatccctattacccacgcctagtttgaaagttatatgcttgaaaaacttatatcctgatgagataaactttcaaggggttctatacgcgactctagaaaccatagaagtatttattgatctaaagaatgaaaatagccccaccaaatgatctcatcactaagggtggcagttcgtattggcatgtcaagttcgtggtgtgttgagatcttaattttacttaaaacctgttgacacgaacacaacttgtataaatttcttgcgtgtcgaacctgtgaaatcttgtgtcgttcgtgttgtgttggcatgttgtaaactaaattgtttttttggtatcatcgtgtcatgtggagttcttaaagttattttagatgactggcacgaacacaaagacgacccatgacacgaaatattgataaaatacggacacaaaacgacagacataattttcgtgtcgaacctacaaaatctctaatgtgttcgtgtcaaacacaagtgttaattctccacatgacaagatcccccatcaaaaaaatctctccaatcttcaacttctaggtttttactctttagattggacctacatttcttcactaatgcctcatgactcactacaacaataattctctaaagcttttcatatttgccagcaggaaagatgccaatattcagttctcatctcctcttttcacaagctttgccactattttttgtggttcttatgaaagagcaaagctcaagcaactctaataggtgtctatagtcgtttttatggttattaaaacctcattttttagaggtaccaatgcacaacatcatgaaaatagccccttttctatgtagaagatcagttcactaaataaacatgataggaaatgagttcacaactcagaatttccttcctgttctgagaatgaatgtgtgagcttgtgtgacgaattagctactgataattttataacaccagaaaaaaaatctgacatgcttcagacttctgttttggcagaatacaccccaagaaaacttgtataatcaatcaattaaagttatgaatcactccacattcaaaatatttcaaattctcacaacattgtatggcaagaagaagcaaattaaaagttgtcaataacctcttagggaaagttggtacgcggtattacatcgtattacattgtattgcatacaatatttttatatattactaaatttgaaaatgatctgtagtaccatacaatacaatacgatataatacggtgtgccaaacacacaactgttaaaaaggcggccgagataatccctttaaagatggatcaactaagaaataaagatttaagtagtcatatcagtgctttgaaggcaccttggtcatcaaagagtttttttaatcctttgagcaaaatgaattaccatttggaactttatgacatatatgaaactgtaaattcttgtaggtaataagcatttaatcaagagaaggagcatgcgcataaaccaaaagtaactcaaaccatctatgaaataaacaaatataaggaaaacaaaaggtagcatacttgtttgtttcgtcaataatcaacgctccattactatctctgttatctataccgccacttctttgattagcacaattatgcctctgttcagcactcctagccaagcgataaagactgtctcttatgcacaattttgtcctgacatccagctaaactcaagcaggtttacttaattagaatttgtataagtaatattcccataaaattaaagagttatctatcaaaacattaaaaatcatgatcctttcagcacaagagatatatccttgaaagtacggtcaacaagaagaaaaagacttttgtacatagttaagattttcaaaggaagttgagttcatgctaaattgataatattaactattatcaaaatcagatctgtacacgcaccatcaaatccaatcatactcgaaaaaataaatagaagttcctaaatgtcattggaaagagaaagacaggcatagatggagagttgcttgctatgaaagcaaaatctgagtcctctcacagataaatttattgattttaattctagttttaatcatcaagtttcccagtaataatagggggtgagatttctgtgttatattcttgtctggtagcagacaatttatcagtaccttttccataacttgctgcagctggcggaaacttcttgcttcaactgagatatcatttagtacagagctaaggcaagacttctcctgtacagtcgaagagcccaattcagctggagcatcaaggctgcttccttcaacatcactttgaccttcaatctgcctttcagattgttgcaattgcttctgatttaaagctgcaccgttaaatgccattggacttgttgaggccacattctcaaaattctttgtaaaagaggattgaacactttggcagctatataacttttctctctttccactcattgttatggcaggagtcactgtcgatgcatcacgagaaccatccatagactgcaactggttagatgtgcaggaagactccttcaaggcaggagatggacaaccattgttctccgattttgtaccagagggagttggacagactgaaatatcggaaccgtgagcgtagtccaggtgcatatacggaagtttactatttacataactcatcgaatctgattctgtactttgcttatgttgttgaatactatgtgtagaataaacttgattggatagttcttcatgaggatgcttcatatctgtaaattgattcaagttatcataactctgaaaagaaataccactttctaggtattgatctgtgttttccccttctgactgagtctgttgctttggctgctttttactcaatgtaatctgtcatgcatatcttaaatcagtaaatggagtattgatcaaaacatatagcttctaaacatcttacgataactcacaaggataaagaaaaaacctaaacattttacatgaagcaatcctataaaggcaccaagctatgacttgagcacaggctagatggaagcagaagtcgccttaaatcagtttatctctatggacacaaattactccagcaaatgaaagcaaggttataaaagaacttcattagtatcacttgcttcagatgacatgccagatgcaagtttcttacatatttaatgtcaaagtgcaatattctataatttggaagatactttcttgcaacacatttacaaattatagccgtataagttatcaaagcacagacaacattttcagatatttgaaagcatggagaatatgtttacttgttcttttggcataaagatatcttcgcttccagattttgtatctaacccatttaaaaatgataaatgaccaagagcagcgggatcatcagcatctgtattttgtaaacacacactgttaccaacagagccaattttcttttctgaatgggttgaatagcctacaccgtcttgcttaaaatcttcatcatgattagaaacacctactgatgaactagcatttgaacctgaaaactttaatccagacttgttttcagacccttcagttgcatttgtaggaggaaaccagcacaactcctcatcattgctgagactctctattccaaatgttgagtcacaatttctgctgagaaaagacaatgatcgtataataatataattagtgagtgacataaaagggaaaaaacttaaatgaaacctctgaggttgcaaaaggtacctaaacatcctgtcaacatcttcaaaatttcctatatcttgccacccataaaataacagacccgcattttctttgtcttcattatcattatcaaagaaactgagatcattgccagtttggggtacttgaccaagtggataacgatatacattattatcgactgcagtacaacgatcacccatgatagcatcatcattacagtaatcatgggcttcggattccacattgctacttttgaaagaaaatgtggacctcattgtatcatcagatgctatactagtcacttctttcattgcatcattgtcacgtgcagaaaacaaattatcaggactgtgagcccatggactcttttccaacatactgtggttacttgtcacagaaggtaattttcttttctcctttccttggatatggtataatttagatgaagtatcagtattagcagcatcaattacttcattctgtcgcttcttgcaaccactcccctcttttggtgaatgatctccatgtgtattaataggatgaggcactatatgatcatcactttcttcaaattcatcccacacgttatcttcaagctgtaaactcacagagagcaatttaggcatataatatgacagtcatggtaaaaaaggatacatcacaatagaaaactaacaaatttatttagatatagtagttccaaaataataataataaagagaaacagacacgcacacacaccccccaaaaaaatggagtttagtaggattcagtcaattgagagattaaaacttataagcaagaaaaaatgaaatcaccatgagcttccctttaataatttataacatgtaaagtggaaccatttcataaaccagttatgttagtttaatcatcaattccaatgtacaattcttttaggtggcgtttggttggnnntaatgaaatggaatggaatggaatggaaacaatttt

SEQ ID NO: 34979 - DNA, 1454 bp, Cannabis sativa
caatagcacaacatcatatatcatccatagacataaccaattacacacatgtaattaaaatcaagtaatcacttactttatttcataagcaggtagacattattctcaacgtaaacaatcattaatctcaagtatttatctaataagacaaatcgatactattactttataaagtaatcatctatatagttgcctaatgagacaatctttactttattgcctaatgagacaacttttataagaaacctaacaaagatttcaatgatagagtaatgactctttcttacaaaggttaattaccgtatcacattttacatactaagtggtacaattgtacttttcttatctcaaggctaaatttaggtgtgccggccaacctgagtgaaaaaataataaacgatttggggccctatgtcacaatagtggtaaactgataaataattcaattaaacccattctatgacataaactcaagatcaaaagttttcctattgataaataatgtagtgataccctaaatatcgataaaacatgaaaattgaggttcctgagaatgtcgccaatcggatcatcagattcccaaacggttaactattttttgggagcgtgcctggggaaacaattcaccgtttctctacagaaaccacaaactcaaatttttacttcccaaacctactactatcttgtccaatacctgtcaaactctctagaatagtcttaatattagttctgatcacaaaccacaactcaaaaactataattgcaccaaaatttacaaaagactattaaagctcaagcttggatttcaaaaactcaaactactaatatttaagcttagaaacttaacctattacatacaacttcatacataaccaaaactattaaattcaacttaaaatcaaattttttcttccaaaattcacaaagaaaagggagaactaggttactttgatccttccttccacttcaacactaactccagcaaaattccttagttagtttgatgtaaaatggctttgaaaatttctgatttagggtgaggatttcttgtggtggttctagccgagagaaagagaggagaatggaggagggtttttttgtgtgaagataatttaattaatctttatctattcagctctaacaattagtctagaataaatccacttacaaacaaacattaaggataaacttaagtgacaaaagactaaactacccattcacttttaagtaatctttcatactacgagtaaaattttcataactcgaaatatcacggtaattctaatgtataacttaattcttattaggactagaataaatgtctcaaattgggaccagaatttattaagctttaaagattattaatttaaaaagtgtttgtttactgagtaatagtatatacttaaattattttgttgcagcttttcaacagtaaagtaatattgctttctcat

SEQ ID NO: 34980 - DNA, 2098 bp, Cannabis sativa
ggatcggatgatgtttttccaaattcaattactaattggattggatcggatgaggaaaaaaatattagattggatcggatgcccacccctacgtgtaagtatgggctcgttggccaatcctcataatttttaatctaaaaaccaaatcataaactttttttctttgatcaaaccaactaaatcataaacttaaaattaaaacaataaatactaataacaaataataataacaataaaaaaaaccattctgcaatcattacttagatgtaaaaagtatttcactgtcatagataaggagagtgagtattagattataaggatcctgggtaaatttttatgcttataactaaaagtataaattaagtaaaaataatagcttatttttctacgataactattttaaaaagattttttttttttttaaataaaaagtcgtttttaaattgtttagttatcgttaaaataattttttttttgaataaattaagaagtaagtatgtatcaaaaagaatggaagtaaatacattattctaacttttaaaaataatttctttcaatattatatttttttattcaaacatataaatttaattttcggttgtaaataaataattaaatttaatttttaatgtaataataatactcaaattatatttttaaaatttaagtaagtagtaagtactaacaattgatgttaaaactaatggtcacagtttttgattatttcatatcattaaatttttattatttatttaaaagttaatatatgaaattttaaaaatataatttaaaatattattttttttgctaaaataatttaaatattattagtgtaacgcaaattaattttttaaccttggtgaacgaatagcagtgttgtctcacttaataaactctttaaacaacagtattgatacgacacgcctctttctaataatagcataccagaattgtcgttttttcactcaatcgagagagcgcgagacatttgtagtagtttctggaaattaaaaaaaaaaataaatgaataaataaaagaaaggaaacatgacaggtggagctgttagccttttttttttgataggagaagatgatgatcgtttaatgaaaatttctagaagcagctccactcttccatcaaatttcaattgctcattttaagctcaattacaaacactccatttcttcttcttcttcagtaaatttctgcctgggtacctaaaatgtcggcctacaggtggaagaactttcacgaggacgaagaccgacccgagaaacctcggcggttcggagtcacggagatgagaggcccccattatacccttctttctcaaaaccttcttcaggtaatcattcattactgttgcgtataaataatgttcttgcttgatcaaacctcagctttgctcttctaatttcatttactttgttgttaattgcttcaattttgcattcttggttggtaattttgtaatttttgtgctttctgaattattaatctttcaggatatatccgagtccatggggcagtttgtggatggtttgaagttcaggggaggttcccacagcttaatgccaaagtctttcgtgaaaaaagtgattgatatggcccatcaacatgatatatatgtcagtacgggtgactgggctgaacatttgcttaggaaaggtccatcagctttcagtcaatatcttgagttgaggctttgttaagaatgatcgtgctgatcactgcaaactgttcgcagcttaattttgttgattgtgttgatcgtgtcaatatcttattattttatcgcgatttcaaaagtacattgttgatggaggtggtgaaattttctgatcgctggtcaccactctcaatccacccttcaaagaattctgattaatctattttcaagtcttaaagaattttcctcagtctagcccagtaacgagaagaagacatttcaaggagtactaaataatctatacgaaacctaaacccccaaatttattctatttcttttgaagcatcaggagtggagtttcctctttgatcatcttcttctcctccatcgaacgccatgcctcgacaagattttcaaggtagatctcc

SEQ ID NO: 34981 - DNA, 968 bp, Cannabis sativa
tgcagcatcagcttgggtgatagcaaacactcgagcagttaccggtttttcctctgctttcgattcttctgcctgaggagggaaatcaatctttctttcttaaaatgcctcaccatgccgcacagaaagcatgtcttccagttgcactctcccagatgatgtttcttacaacgtggacaatcagggtaagaataaccctggcgtccacctctgcgttggtttccacgaaaccgcttattctgcccagagccaccagatgcaggggtaactttgctcttctgatctgtggtggcatcaccaccatccctaccataagtaagagtaggaaaagtgggggttccacaaatattcggagtcactcagggtcctgaaggaactttaccgtgccctgggctctcagagctttctgaaccatttttgcataagttgttgtttcgttggtagtaatcagtttgtactagctcaatgaattccttccgcttaccactgcagacggcttcattataatatttggcattgaataattcccggaattcttcccatgtcataacatgtccagggttatcaactcccaccacaggagagcatcctcctagaactgaaaagtggcgcaggtcacccaaccattaccaaccacccccataaaattcaaaattcgcttaataactgtgagccactactcagctttcatcacatcagcacctcccagaaatactggatgtgcttgcttgcgaaacctttcgtataacggctcgatacggttccgagcaacaggttgttctgctggcaccgctggagctacaacggcctgagcttgctgaggaggcacgacaggaagaccctactgccttattcttagaatttcttcatcctgctagcagattggatctcgcatttcggcaaacctttgcccccaatcaagaggagcttgtggtggatttacaggacgaccaccctgagctctgcca

SEQ ID NO: 34982 - DNA, 1813 bp, Cannabis sativa
ctcgctggcacatccagaataagatattcagcgatccgtgcagagcactcaacacttagcgacactactagaaaatagacattttatcccactttttatacttgaaaaagtgggataaaaagtatgttgatagtttttaccccacttttgtataatgcacaaggggcatgtttggtttagcactaaaaaaaagaaaaattacactaaaaataaagttaaagattgattttttattcactagccaaacacgctcctaatatgtcttttatcacactttggagcaaggatcttgtttggctggtcactaaaaaatgaaaattttagcctttattattttgccagagccaaacggggtaaatgagaaacccttttatcccaatttttagcaaaaaatcgagataaaagggtttccctaatctttttaacgccattaggtattttaggttagatgtatttttctcacatatgttctctctcttccgccgctccttctccttcctccccacttctatatcttcatccagcagccaagcaactttttcctcgtgacggacgaccaacggagttcagatctgagctccacatcctccaaaatatccaagtatcattccattcttttttatggaaaaataaatttgttcttcgtgtattctggatctctatcattctctctttttttaggtggacggaggttggaagtttgtggcagttcgttaatcacggtgcttctaagtttgtggcgtcgacaacggttcttggtgagtgtcgacggtggttcgttgttgttgagtgtttgtggttttattgtagtcatatttattttggattttattatactaatttggatatgttatatacgaaaaaaaaattgtaaagtaatagatttttttatctgaaaatatatgtataaatattgtgaaacattgaaatattgataataagattttatgtctaattattttttgttatatttttttttattttattttttgacatgtaatctcggtttttacataaaaatcgggataaaaggtttctttttatcccactgacatatatcccggtttttattttagcgaaaactgggataaaatgcccctaaaaatcgggataaaaggccctttttgttgtagtgacatatacacacatacatatacatttacataaatatacatatacacacatatttataaaaatacacataaaactataaaaatttacacacatatataaactcaaaaaactaaacacaattgtatacacaaataaactaaaattactatatatacacaaataaaaaataaaataagtaaaactaaaataaataaaacataggttaccttgactgaaataacgaaatgtgaagaacaattggcggctcgggcagtggtagacgaaggtgtggcaacacgtccttgttggagtcccggtacaaatttttttagaatcaaaatgaaaaaaaaaaagaaaacgagagaatcaatgatttggtagacaaaataaggcctcttgatggtgaaaatggtggtgggtggggaagagaggtggctgccagcggtggggaacggaggatttgcagagagagaaagagaagaaagagaaagaaaaagaggaaaatgggggagggggttcgtcccaggcttttattcagtctggacttttgctagggcacttaggctcaccggcaaaagtcgacgctgacaaaacgcagcgtttaaataatgcgggcacttttgctggcgcattgaatatgccagcaaaagtgttaggaatattttaccaggatctaaatttactaacaagtatgtttcat

SEQ ID NO: 34983 - DNA, 1820 bp, Cannabis sativa
ctgattaggtgatgcaattatatggtatgtgggtgtaggtctttggcacaggctcacctaattaggtgatgtcgttatgcgatatatgggttccagtctatggcacgggctaccctgattaggcaatgcaatataggattatcagattaaagtatcgacttgcttgattaagcaaagtgatgtcatgaagatggttgctttctgaggtaacatatatataatttatatgattaaatgaatatgaattctattattagtataatagttgtttattaccaaatatttgtatactgatgttcattcatggtagatttcagtagtgattcggattttatcttatgaataatgtatgacggtttgattcttgttgtgtataaatgataatatttgaatagtaaattaaatgattgttattatttcttttcttgctaagtcattgtgactcaagggtgttatgtggtgtaggtaaaggcaaagaaaagcagatcaaccgcgaggtgacagtcttcaccatccatgtacatattgacctcgccggtgtgcgtactaggttgccatgagttattttgagctgtatctattgtgtattttggttttatatttttgaggcatcatcgtatatagttcttttgtaaaactttttataagagggattcccagaatacacttttatgtcgttataatgtccgtttttaatgttttattttagtcatgtattttatattatcacagtttttaataattaattaatctattagtattaaactagtttataaaatcacacacgtggtgtccctatagattagggtgttacatttttgtaacagagcagccatggttttaaaggtcctgaaaactagtctaatatgtacatttgctgtgaggacaagtcgactcatggtatagtaagtgtttatattatttgctattggattacatgcctaggctattataaagtatgttgggaaaagtagcatagtgatgattgtgataagaatatgtgtatgatatttgcatattgatactgatatctgtctgagttctaaatagttagaagatgttaactaaatgtgttataagttatgcagtaagggcaatcgaacagtctgattagcgagctatctgggctcaaggtaaacggtaaagaagagaattctttattgccataatgttgggaacatgtaaattctgctatgcaggatatgataagacaataaggggaaaacagagctgagatttgaaagaacaataagctcatcttgtgtctgcttttgtactaccgacacttcctattgtaccagtagatgtggtggaatatatgaagccaacttactagtagatcaagaagaaaaaactaaatgaaccaccaattatggtatagaacaaaaaggttccagggtgactagaataacagtcaagttaagaataagtaatagcgaccttatcctcagtgttcaagatgaaaaaaggcgtcatttgaaccaatgtagagctagatcttgttttgttgtggggtagtgggtcatctaaaaagaacctacgtgtagttaagaaagtctaacattaaagaagaaaagtgtacgggtcctccccaagtgccagatatgattcaaggggacccagatatcgatccttcagtcgactcaaattagaattttatgggaaatattacaattgttgttttatttgatattgatattaaacattgtacattcagttagagacatcaagaaatttaaattgattgtgcatgtatgttatttagtggtaacccatttgacggggtagacaaattagagaaatgacaatatgagttaaat

SEQ ID NO: 34984 - DNA, 1541 bp, Cannabis sativa
atgcaacataaaatgtgatttctgatctctattaattactaaatctgattatattgaaataagttttatttagggtacaaaacccaacacctagggtttccacccgacacccatgttgacattctcaactagggttttagtttatgggaccgtcttagggcaaagtagccaaaacttgcattgggacatcaacttggcataccacagacatgtttgaggcatcaaaatcagattcagagcaacttgatttttgagcaccggggcctaagcacccagcgcccaggttgataatttgtcaatctaggcgccttccaagtgtccgatcgaagatccaacttttgcattgaatccatcttcattaaaaacaggaaataggtccttctagaggaaaaacaacaattcatgggctgaaaaaatagggccaagcacataggttgacacttggggctggccctgcgcccaggttgacattttgtcaacctaggcctcaaaatatggagttttcctagaaattatttcgagcaacatctccatcttcagaaaacattgagaatacattattttgggggaccaaacaaaacttttgaaggggcagaagagggacctaacgcttaggttgacacttgggactaggccctgcgcccaagttgacattttgttaacctgggctgtttctaatttagttcagcaaaaagttctccgagcatcttcaccttcataaaaaataacaaagattcaagtaaacttgaggagaaaactacaatcccgagtccctggaaatagggcccatcgcccaagttgaactagtgctgggcccaacgcccaggttgacaatcaacttgtgatgctgccttcagttgctcaaatgccaaatccgatgcgaccattgaattcagcatggtcattatggggggagagaccccgtcctcaagttcagaagccttgatagccttaaaagtataaaaaatagaatctcgagagttcaatggttcgctgggttttgcttatcagaatttgatgctgttttgaccgttcatcaattttcttacaagtacaatgatctataaagttagatcaatcaaattaacaacatcaattttggctcattcggaagccggaagtaggatattgagaaactcacctggccggacattgtgatcttgatatactttcgtaaaagcaatacaacaaacaccagagaaggatattacggttgaaaggggccgaacctctataaatttcatatgtcctttacatttttttcataatctttgttattgttcaaacacttatatcatcgttttattaactctgcatcattgactaaaaataaggtcaacaatatttttagagatttgtatttttttagagtttaaataacattatttttcacattattgtaacattatactatattaataatattttttaaaacaacctaaaatggtcaatgtaaaaaatatcataattccataaaaacatattttattcagttattttttgttgggtatttgtgaaataaaatttccggaaaaaaaatt

SEQ ID NO: 34985 - DNA, 2362 bp, Cannabis sativa
atctaaagagagttgaaagagcgaggaagcccgattacccacatcaaccagtttcctttgcagatcaaagcttatgtgggtttgaagctcaagaatcaatggctgtaggtatttcgattcttaatttatatatatattatatacacatacatatatttcagtttatacatataaatgtctaacatgtatgactaccaaaaatactattttagtgatattttcactaatagtccaaataaaattacttgttactaaaaagtaatatttaaatacaaattgttattaatttaattttactcacaatatattattaataaattatgatttttgtgactaataactataatcacggattttttaaaaataagagcattaacaataagagcaatttttagtgttgcttaagtgaacccattattagctcttacccaaacaattttttttgggattatttcacaaatacacaaaaacaacaaaataaattacaaaaatatggttttacggaattttaaatagttttacgatttttttgattttatttacataaattacggtctttttatattgtactcttgttaatttgttgttatctgtatgttattttttgatgttattttcatgttacttttgtgtaattttcttgttgttttcgtgttgttaatatgaaaaatcataaaaatatatataaaaaaaattaaacataaaaatgtaattttttttttacatttttgccttatgtaattatcctaagtttttttttcttttataaaaagaaaagaaaaaagcagagcaccataactatacaacaacgactcaattacgttaactttacaaatctctctacttctctcctccacctccaccccgaacaagtaactccccatacaactcccattaaacttgctttaatattggaattatgatttatgtttactcataattgtttttttaattttaatcacaaatttaattgttcccaatttttttttttggtagtgtatatcaacttaaatacgcatatttttttaccatgacaaaaaatacatctttttaattaatatttatagcttacaataaaaaaaattactgttagacttcaccccctccctcatcttatctctttcatatatttatcctttttcttttcctttattttttaaatttacattgttaaagatgagtacattagttcttttttttagaaaaatgtataaagtaatttaataattaaagaccattagtaaattttttttaataacattatttttatttcgaagaacaaattaaattataaataattacaatatatatcagcataaatctgtatattttattatgaaaaaaatacatatttttaattaatatttatagctttctccgataatatatcatactatttattgtttatatttcatgtgtctttaatttaataataattttaattatagtaataaatttcgaaataaccaatacaattatatatattagctcaatatgtaattttaatttatttctgttaattatgttttttatatcaaatatctttgctatatattaatatgcttatgtgaatttaatataatatttattaaaataatattaatatattttaaattaattgatacttaaatttttttaaaaaaatataaaaaaaatcaaatagaattatacttataatggtaatgatggtttaaaaaaaatgctaatgttggtaagcattacctttttgagttgttatttagtaaatcttttgtgttatatattttatttagaaaaattttgtattctaccaaatttaatttgatttaaagaacttttttattattatatcaaatttttatgtatgtgtaatttttaatttaattttaaagtttagtataaaatgtattattcttttaattttttgaacaaatcaaatgtattattttattaaaattctttattattgtgccattgtctaattatatttatttttatattttatatgtaataatatatacatattatatccatccatatatattcttcctttccaaagggattgaatggcgaattctagaactctcaagaggcatgtttctctacctccgtctggcacccacgttgggtttctggtccaccttccacgatggtgtggtggcaatcgggtatgggttcctctttccctctttcatcattcctctgttcagagcattaattgtgatattaatgtctctgatgattattatcccccaaagatcctttttgctggagcttttcaatgcattaaatgcatttttcctttcccacaagacttaaacttttcagatttcttttccaactttcctttgactacattgatagtttcctgttttgtcaaaaa

SEQ ID NO: 34986 - DNA, 2462 bp, Cannabis sativa
gttaaaccaagaaatgtcgttagatatgcacttttaatatataaagatattgggcaagattatagtagatctaacaaaagttctttactggtagagaatttttttgaccattaattttaaattatgtagttattatgatgtaaggtgtatactcttatgataagactgcttgtatacaattaaaactttatacatattataataatatttaatgatatttatttttttaaaaaataaaataatattaataattaaaagttttattaatttttattttgaattattattattatttatttataaagttaatttgaattatttttatattaatattattttcaaaataaataattgtttcttctaaacttatttttttttgctttttatttttttggcttttcataagttactgctgttttttttttttttacacctagtatttttgttcagtgttttggtttttatcttgttgttgtttggctgcacttttgagacgtcacttataaaaaaaaaagttaattaagtcggttagatattatttttcttgctaagaaaatgagtttaggagaagtaaattggtacggtaccaattaaagagcatccaaaatcattcaagtgatcctacatcagaggaacttttgaaaataaatatctatataaaaataatttaaattaactttagaaaataataataataataaaaataaaaattaataaaatttttaattattgatatcattttattattttaaaataaatatatcattaaatattattataatatgtataaagtttttattgtatacaaacaatcctatagtaagagtatataccttacatcataataatcacaagatctacaatcaatggtaaaaaaaaaagttccttactggtagagaacttttgctaggtcctgaaaaaaaaatcggaaaaaaaatatatatgtattttagtcaacatatatttgtattaaaagatgatatttatagataaaatggtaagtttggtgtaatggttaaggtagattataaatatgtaagagaataaatgttcaaatcccactaactacactttattttttctttttgccctccctacttttactaaaaaaaattacgctcccatcactttaaattctgggtccgccactggtattaccctatatatatcataataaaatagtaaatttaaatatatataatttcctctaacaacttataataattacatcaaatatataattataatagttataccaattttaaccattaattagtttattattaaataattataattaattaaaaattaacatattacctttaatttaaaactatattttatttattattttattttattttttataaaatactaattaagattaatatatttaaaaagttactttaattataattattaattaatttttgtattaattattaaataaaattcttttagcaattaattttttttgcattcaaattattaatatatttacaacaaaactccctaataatttaaaaaatttaaacatatgatcttaattaaaataaattaataaagacaataaaaattaataattttttaaagccttacaaaaaataaaaataaaaataactttttcttctctttttttttacatcatcttattctttttctcttaaaacatagacccaacctcactaaagaacttattcttcctctcaagtacccagatccaacccctaagattttttttctcattttctagatccaactctttcacgaccttggatacatcagtatagttattgttttagtggactttggtgcgacaatatagatgggcaaattgggttatgatctacagacgtagtcagaggaggaatatgcatctatcactgaacgtgataaattaatttaccatcttattctcatattttaaaagttatcttattttggcacaaatctattgatgtcgttgtgctcttaattttggggattttataaacattcatcttcttctatattattttttagtttaagattggaattttttttaatgttcatgttgaatgatgtgttttgttatttatttagtggttttgcaatacgtagtgtaactatgtaaaattatatttgactaaataatattttaatttgtctaatgctctttgtttttccttgtaagaaatttgtctaatgttcatgttcatgttgagtgatgattttttttgtccctcttcattttaagtttctgtttaatttttattttattttaaattaaatgagtaaatgatattttgtcgtgatttgattaaaaatgattaagagtttagtgtttattattttaaaaaatatttgttacattattgtaatattttaaaatatatcagaaatttaattaatattaaattaaaacatccttgaagtaagatcaacaaaggaggagaagaagaaatttctcaaaaaaaaaaaaa

SEQ ID NO: 34987 - DNA, 1977 bp, Cannabis sativa
tcctaagtctaagtctgaagtctcaaaccctaagccttgtgctctaagtctgataactcatgtctctctctctctctctcacgcccactgctcttctcttacttgagattttccaactatgattctcatattgtaattctaagagagctacttcagatcccattactactgtgatctaagtagtattatctctcggtgtagatacaactaaaaggggagtaggtaattacccactaactaaggggccaaacctctataaaatcttgtgcctatttactatattattctaattgtgtaagatgtgggaagcatcaatattacattcgactccactgtcgattggccaaatctaaggtcaatagtttgatgcttttattgagagcaagttgttaatttatctgatcaaacgtcatggttaacacaaggagaactctggctacgacatctgcctcatcgagtcttcctcaagaccctatgacagtagaacctaatatttgtgttccagtcacaattagagtttccacgacatgcatcttaatttgattatacccagagtagacatccatgaagccgaacaacttgcacacggacatggcgtctaccatttgataaatccgtggaagctaaaagtagtcttttaggagggccttgttcaggtcagtaaagttgatgcatattctccacctgccattgggtttcagaaccaaaatagggtttgcgagctagacatggtataatgcctcccggaggaaatcattagtagtcgacttactcacctttgccttcacgacttctgtccttactgaatctaaaggtcttctcttctgccagactggcatcgcatcctctcaaatttttcaaagcatgaaaaatggtgttatggtcaatcccagtcatgtcagaatggctccatgccagcacatcccagttcttttttattgcgtttacaatactttctcttatggatggaggtagattccttcccaccctaatggttcttgtgtggtcttcatcactgaagcttacctcctctacctcctccattggttctaagtttctttttctcccaacactggattcaactcatcttgaaaatcctcttggacggcttcagtgtccatttcatcttccattccaggagcaatagatgtctcttaccagaccatgaacacaacccatgttgaaatgttgtaacagtttcttgccttttttgatcgcctttgatcgtgctaatacattcgttgtcacaggggaacctcatgcataagttcttgatagaggttattgccgcgaaatccattagggttggccgccctagtatcacactgtacatcgttgggcaatataccaccaagttgagtgcttaaaagagcttgtgctttgagagtgataggtaactagatttgccccatcgacattagggtatctccattgaagccttgcaactaaataggacaaggatttaagtccgcttcagtaagtcctatcgcttggaatgtgaacttaaagagggtgttgactgagcttccattgtccactaggactgtataaacttgcttgtggacgatctgtgcatcaattaccaagagatccttatgggggaagcacacatttttagcatcatccttggtaaaggtgatgggaaaatacatcattctagggtgttgtgagggatattgcaccaacacacacacacacatccccttcttccacctctcttaggtaacttttctacgagttttgagtgcttccaactagatgaggtccacctaagattgtggccacgtgttcatccattggaggtggggcgagtcagggaggatatggggttctaagtcccagtgcaagtaatgctaccctagctggcactggcaaagtatggagtgtaggtaatgatgttctaggagcttgagaacaccctaccccctgtagaggatttatagtattatactatttgagaatgatcatgtgcctatg

SEQ ID NO: 34988 - DNA, 5432 bp, Cannabis sativa
attattttgctactagatttgacattttttgctacaaaaatattagtagcaaatttgctacaaattgtcttggtagcaaaaaactttcagcaacggagtattagctacaaagtaaccaccaaaaaaaggtagtagcaaaaagtttaatagctaccaaataggaattatttgctaccaattacgtgactggagatggagatccatagcagaaagatcagagcctagtgttgctgagttcaaactgaagggagttcagtgtcatcttcatcatcagatctgaagggatttcagattgaagaaaagtgtcaaagacgaacttagctgttgcacaagggattttatgcatacaatcaagattcttgattgttgttggtaattcattactaattgctataaagattgtattaaatttctaagtgtgaactggagattgtaatacgaatcttttagatttagtagatattattaccctggttcggggaacccaagcactagtcaactgaaatttgttctcagtacaaatgaagcttgtaaatcattgtgtactgctttatcttcaatccgattcttgaatgcataagttgaaattaaacaatctaaccatgaacaattcggtaacttgaatcatgaatattagataagtagttctttcaagtatgaatgacagttataaaccgatagaaaaaaccaattttatagtagtgattgtaacagtttcctctacttagcaaatataaatatgcagtaagcttctaatcacaaataagacaattaatacaaatcaattctttgatctttttcttcttcatttttctctcaatatacttctacatatgcgtctgtacatattattgccgtaattaagccttgagatcctgactagtttggctctttgcaagaggcttggttttacttatttatgttattgtgtggagactgattaaatacttagttgtaaactaaattgttttgaaaaggtcgatcggttgttcaatcttattttggttatattattaacgattgttgctactaatgactttgctgttatttcaatttctttttgtcttagagaagtgatatatatttatatatatgctttgggtaaatttgcaatctttatggatgattattatgttaagtggaattggctacccgctttctatcagtaccttttttgaggctaatttttctaaataatatatttatggcactcttccactgacaagaccattttctcactaaaaagaggaaaattaaaagtgtaacagtagagttgaataattttttttcccaatgccattatcgggatgctgctgttgcatggttatccagtagtgaatattatattatttcccatcttaattatgagttgacttagttaaatatatgtacattctctgtagctagctagtatagctagtgttatatatggtggaccaaaattaattggatgccctagcttaatggtcgaaggtgtgttttctacacgtgggttgctatttctgaactttttattgggtagaagagaatgaagttatttaaattagaatggggcatatgatcgatttgaaagaaacagaagcacacgtacatataaaattatgtcggccatcaaagattttagttggtaaaatccaactacaggttatttgtggattaagctagaacaactataaagtgcctatatgattcccttgctttaaactccaagaacttgtggaagaaagcagagaagctccgaatgtttgccccttgtctctaaactctgtttagtgctattctatcaaacattattagtaatttacacaatgacaatcattgtatatttttatagatgtatatattaattggtgcgagcaaaaattgtatagtaaacaccactaatgtaacacatttgacattcctataaatactgaattatcatgaccaattgtaaagtgagcttgggaacagagtgttatcattatcatcgagtgtttttatctttttcaattggataaatatataaatatatatatatatattctcaaaattgaagggggtggtacagtaaaatggaaattacacgtttgattaattcccagtggatatagtaatggtattggtggaaatctactcgacaatgtatacatataataacattattggcggtgccttgtggtgaaattcattgtatttaatatggtttgaccaagtgtaacctttcatgcacaaaaccgaaagtaaatgaagttgtgtaagcctaaagttctctactataaatactattgtgtgtgttgggctctctctttctattggtatatatttatatacacaaaaatgggtgtcatagcatggttaaaagtagatagtacaagctatatgatatatctatgtatatatatgtgtgtgtctatatatcaatatgcaatttgtttacagaattaggatagctagccaaattaatataaataagcttagtaaataaactaaaacgagagaaagatcaaaaattagagttgattgtatattggatcacgtatcaagatcttaaaagattatgatgatatatggaacggtgagatttaaaggatcttgagtgacaaaatattttaggactatgaaatttattaattatgaatattaattggaccacaaaaaatattgaacgttgaccgttaaactaagtagtttttagttaatggtcattttccagatgatatgggcggccaaaatctgaaaaacaatttgaaatttgaatatatgatagcagttgatattgagagaattagaagaaaattaacacatgaacagtactaaaaataattttaaataaaatattagagcaaaagtcaaccaaataaaagttgactaacaaaattaatgtactacttaatttttttaattattcaaaagattttgtctaacatttttagtcagctcatacattattggtttggggctgaaccttgcatacaaatctatgttacgaatatcatgagcaaaaagaatctatgcatacatcattagatgattaacattaattttcagaaaaaaaaccttaaataaataatggaatcttctcgatctgttgtataaatattattataattttattgaaaatctctgttttattataaatataaacaaatatgtatagcaaagcatgaaatgtttcgtttgctctctataatattaattgctgatgcgtatgaatctctatatgctgtcaccatatatacattaattatacacataaatatatacttggtatataggctttatcaggtttagtgatgagtagtgactcatcagttctgatcttgacttgaaaaaaaatatgtaagtaaattaatgccgtattaatatgtatatttatataagtcaagtcaattacattttttataatttacaaaaatatgtaaggtgatttttttttttttttttgcttcaactactaaggtgattttggttgaatttcgtatgaaacgattgcgtatctattggaaaagcacgcatgcaaaattaatacaagcatttcaaaagtctttgtactcttgcgtaatttgggaaaaaggcgtacacgtttgaaaacatagaaaggtatttacttctcaaaatcctaataaataattttcatttcaaatttcatatctatatatagatatatatctctcttatactcttacccaaagtgaatataatattaaaagaaaaaaataaaatataaatgaaaagaaaactaccatattaaattattaattaatatacaatttatctccttctctctatatatatgtccgtaactccactcctttttttccataccatttccacacatattcttctctatatctcatctttctctctctcataaaaatcagaaaattgtcagagaataaaatgaacacgtttttaatagtactcgctttctgtgttgtactctccaccactactactactactgcgttttcattctttgatgataatatcctaaacgggttaatattgcaaaacgacaccgtaaccatcgacttagcctcaatagactacggccacatagtaaaagtaaacccagaagccgttttatccccaacttccctaaacgacatccaatccttaataaaagccgtaaacgacaacaactcatcatccacattgagtagtgctcctaagactgtagccgccagagggcaagggcactcggtccgtggtcagtccacggctgagaagggcattgtggtaaatatgacatctttgggtagccttgggaggaggattgtagttgttccaaacagtcttttgggtccgtatgctgacgtgggaggtgaacagatttggattaatgttttggttgaaaccctaaagcatgggctctcgcccatctcgtggaccgattatttgggtctaagcgttggcggaactctctcaaatgctgggattagtggccaggctttccgagttggtcctcaaatcgccaatgtatacgagttggatgttattacaggttcgtaataattaattagtttgtttaattttctttttgtttttgtttctcggaggggtagaattgactttttaataataaagaaagaaatattatagggataaaaaggcgtatgagactagctagatattgtagatcacgcaaagagagcctttaacacgccgttatagttatagagatttgaaaacagaaaattacaagacaaccaaacaaaattctcctaagtttataatatataaaagggactcaaaaataacaaggagaaccattattaatttcttagagatttgtagtattaattaacaaattccattcacagtatatctatatattaatattacacaaaaatggcatatatattttaaaaagccgccccattattattaatattattgttccaaaatttataaaactaaatttggcgatattgacatggacgattatcaatcatgttggtcgacaacatcatgatatatctttctttctttcttattttaattactatattcctatagccatgtagacattccttatatagagccttataagtcaaaattttctttttaagaaaaataaatgggacaaattaaataaaatggagtatgtggccttttcttttcctttgatttggtttggtgtgtatggccttttagtatataaagtcactcactaaaataatgggacgcaccgtcaagaaaacccattgatatatatgcaagctctctttttggcagctttgggagttaaattcgtttcaaatctagtatatagtagtagatgttagctatactaatataaaagtataggctatgagtgattataacctatagctaggattttgtccaccgtccaaacaccatgtgcaccgtgtatatactagttagctagttgcatgtcccaaccacacatacatttttattatactatatataactacattacatat

SEQ ID NO: 34989 - DNA, 2210 bp, Cannabis sativa
  modified_base (677)..(687): a, c, t, g, unknown or other
ttatatgatctattgacaattcgatgattattaaaattagatcattagatctatcaacaagttaatcataagaatttagatcaaataaataataggtttgttttaaaaaaaatgaataaaaaattaaacaaacattcaaacatgtaaaaatatcaggaatgtaggttaagatatttttattttaaaataatatattcaaaaaaaatatcttaatttgaatttaaattaggttgttagaaaaatatttaaaatctaaaaaattctaattatcttaaatttaaatatccaactaatttataaatattcagtttatttaaacttaatttaaattaaatatttaatggtaatataacatgaaatcttaattttaaaatggagatatttctaatattatatttcaaatcttataatttagcaaattaaatttttatcaaaataaataatttaaaaataagatatttttatggttataatattataaattttattttaaaaataaatcaaatacaatatcctaaattttaaaaaatttatgtttagaaaagcttaaaatatctattcaaactaaaattaacaacttttcagaaattttatgttattttaacaaaaaaatataattttaattaagataaatatataataccataaaatgtcaaaactaacatttttctaatctnnnnnnnnnnnttaataaaatatattttaaaaataccaaaatttaaaaatctgagatggttagcaaatttgaaatttttactaaattttctttcagttttattaaaattttaatgtcaaaataagatcatttcaaattttattaataaaataagtaaatgtctgatgttataattaaaattaataaaacaaaccaaaataatcaaattttaaaaaataacaataaagagaagtttgagaaaaaaaatcaatttttcaaattcaaacgctactaatatcaaaattaatttaaattaattaaaaaattatttttattcgaattattagatttttattttttttcattaaaaaacgatttttgaaacttaaaatatcacaaaaacgctacacatacttaatcattttctattattattgtgttttatatcatatataaattttttatcatttattaatttttctacaaaaatttccaaccaatgatccatccttccaggaatatgttatgtaattcatttttttttcattctacacatctttgacatttcctatcatattttctttttttgaatcggagatagtcagagactaattatttaattccaatacatactatgtattgttaattacaattatatgtactaccttaatacaccacacaaaaaaaaatctaacttctagttacaataaaatttttcattaaaaataaaaaattatagctaattataaatcataaattctatgttgtgactaaaaggtctttagctaaaggtattagttacaaaaaaacacaatttattgagactaaatatattttcagtcacaatacttgttgtgattaaaattaaattattgacaacgttgcatctaaatactatgttttaattacaagtaactttttattgtgactaaaagtcatgtttaattacaaaaaatatatactgtgacaaaaaatttatcactaaaagtaactgttttttgtagtttgtagtgataaaaaattcaaatcaaagataatattgtaatcaatacgataattaaaaaaaaatctcaatatataattaaaatcacagttgaaaaactttaatccaagtttagaacataaaaaacaacaaggcattattttgtttgtatataagatttgacaccaatcatggcccagttatatatgattgataatttcttcataaggtcttccctaccagtcccttaaattgagggaaagttgcccaaatattcaatattgatagtggtatacaaaaactataaatacatactccctttattccttttaaacaaatacaaccaatatataaaaagttacatctatcaacatgcttgtttgtgcaacttgtccaaccaccagtactcagtatgtatataaagacactgatatgaacatttaatatgaggtgagtaagactttgttcattttggttgagttgagacgacatgttaagtgggcttttgctttctttttcactctctatccttctttctttcactcactgacacacttatatgatttgttgtgt

SEQ ID NO: 34990 - DNA, 1002 bp, Cannabis sativa
cacatcatcttaaaatattatattttattttttctttcatccacattatttttgaccactttactcttaaaattactctaatgctaaacaattttagaagtgaaaagaatagacccacactctattatttaatatattattaaattacttttaatattttaaatattatattaatacacctttttgatagaaaaattataaaaaaaataaaaaaattattcaactaccattgtttgactgtagcaattgcagtagcccacacaattttcttaagtggtcaagcaatcaagcttgcttttcttagactaacaaaagcttgatgagcaacgagcattgaagctgctctaagaggttaaagtctgaatatttaatgataaaagattaagagaaaatatatgatcaccaaaaaattattatattgccaaaagcttagaatgaaaggttgcacatgagattacaagatttaaaatcaataagtgattataactctgtattacttcaaagttatttttgtgtgaaaaaaagttactgactatgaaatatagaaacaacatacataacttttcatgcctcaaatgtactcttgcagtaataatatagagaataaaagtaaaaaatattaagaattgatttcatgtcttttagtagcttaacaaaataataaaattttaatgaaagatcatgaatctcgctcaactaggtttgtcccactcccttaagtgaatgctacaatatctaacaattataatagtggttgtggtggtggccataatcataatcgtagaagtggtcgtggctataatcaaaattgccattgcggtcgaaataatatttgacattgtaatagtcagaatagcaactcttatactccaatatatagcacaactattgagaaaaagagaaaagatactcaaaataataattataaaaattctgaaaaacttatgttttagatgtagtaagaaaaaacagtactggtcacgtacctatcgtacgaaaaaa

SEQ ID NO: 34991 - DNA, 1525 bp, Cannabis sativa
aattgcctttactaattcaatttactaaaacggtcattacactaaatatcaaaacaaaaaaaaaaaaaatcaatgcactcgttttatgtgagtgtattgttaaatattacgaaaaattgtaataaaaacttgtagagaaagagttgggccaataaatacgatcaaaaatatttttttttgtataaaataaataaaagaattcaaataagtgatcaacatgaagaccaagaaacgtagagagaaaaaataaacgtagagagaaaaaatgtgtattaattacatgttaattagaatttttgcttcccgaactttcacatgcactaaattatgtctcttgaattttctaagttgtttgaactattgaaattgttgtattcaaggacttctgtccaattttactaacgaaagtctaacattaatgcaagttcagagaatacaatttggtacatgttaaagttcaaggacacgatttgttacatgtatgtcaaagtttgggaatacaatttggtacaaggatacaaaagtctttgaatctaacaattttatagttcaaaaaaaaaaaaaaaattaactaacgacctgaaaagttcaaaaagcatgatttgaacaggtctgcccctaggctaggcaagctaggcccatacctactgcgaacccaagcctaagccttaacttttatacacatatataaatatgttgagaaaaagactggtaattttgtgaatatataatgtgaaataggcccaataatgcctaaatccattaccccgagttattttttaggcccataaaatgtcatggccgactatagatttaatacatgtcaaagttcggtaggtaaaaatctcaatttaaattatatctcaaatggtactatatatatatatattttgacatagtgatgaagatcactatcgaaatattatatccaccattgaatcagagtagctctttgtctaatcgaagaagatgctttgctaaactatgagttgcgggagtaagaaagtaacatgagacaaaattgtccagaaaaatttagacaataaaactataacgtaataaaacaatacactaaaaaagcaaatgcttccgtttgtaacattaaaaattacttgaaacatcacaaaatgagcaccaaaaaataaattgtactagaatataatcatctataaacaaaataatatattaataaagtactaaattctactctaccatttgattctaataagtaaaaattaatgaaaaaaatcataaaaatacttagccaaagatataaaccttttgctatgtatagtaacttattatcacccaactatttataaaccactaaaatttaataatcatacaacattacctataaaacacgataatttcttaattattatcaaaatgtaatgtataatagattttccttaataataacttttcaatggtgtgatcagaataaataaataaataaataaataaataaatcatttcatatattatttgtatatataagttagggaaattctacaatgcaccc

SEQ ID NO: 34992 - DNA, 1613 bp, Cannabis sativa
acggtggtatcattttctcccactgttcttgagggaacaagtagtcaagtactttttggagtacgaattttacaggcgtggttaccgatcaaggtatccaatgagcgtctcatacaagtactttagatagttgatattgatttggattttagacacggcctagatctttggttaatgaatgggataatgaattttttggtgcattcaacggtaacttgattgtgttgcttaacatggatttgtttcattagacaagcattagttgttatgatgagaagtgactagaaagtactgctgagtagtttgagtagtttgatcggtaaatttcttcatttagtcttggtgtaagtgattgatgaccatatcgtgtctcatgagaaaatctctggaggagttattatctggttctgagttctaccttccactccatactgttggattatttttggccaagaaaaactatcataaataccgaaaaggtggtcataactgtctggcttgtgctcctttcgggtaggatcagtggatcaccatgtttgttctactacttttgtttcgatccttggattctatactttgtttttttatcccacatataggtttttcccaaagtaatttttttattatacctttacataatcatagcaaggaaaatagttaaaaaccgtggtgaataggaggtgaaatcgatactcattctagtacctagagccgatgaaacgtggcagtacttataaccagttacggatcccctatcctagacaacactgcaacaaaatataagcttgttcaagaacttagcatagttcttgattcttcttctttttcatcaagctctaagttggtgtcttctagtcccttcgtgcagtgtcagcagttaacaaaatatacagatacaaggaaataaatggaaaaaggggcagtgcaaaatttgtagctgggattgttaagataggaaaagtaatgttttgggcactatatagctgatactcgattaaaagtgaagtgcaggaaagtaaaagaactgggattttaattatcagtaaataaattgcaaaccagatgttggggatcttgtagcatagcaatcgaaattctgttattttacttaagtttggtgaaggttatcgaaatttgaaatcaccattgtcaatctatttttttttttccatttgttttgtttactacatgtaggagccaactcattctctgcgttctcggacagtatttgatgtctcaatggtcaggcctcccgcaaggtcttagcgtcccttttgggcacctatagaacagtttaagtttctagcttcccaaatattgtagggttgggttagtggggagctccaaattacaaacctaccatcattatttatcccattctactagtttggtaataatttacctatgcaggtattctatgcttttattttcttgttatcatgagaacttattgcttgaataaatcttccaattaaaattagaaattcttcatttttttttcactgtgtttgattgatcaacacaatatgatcttccataatttttattattatgagaagagaagaaatcccctatgtttgctaagtggggtggatgaccattgtgatcgattt

SEQ ID NO: 34993 - DNA, 1582 bp, Cannabis sativa
aagctcatggaagtgtaaacaatgagacagaattcgatctacagccaatattaccataaataattctacattattgacaagaaagcacaaaactttaatgtaatttcataaagcccaattcaattatcaattaacagatttcctcacatgggattagttggaattcaatcataaagccatccaagtatcttaacattcccaacataaataaagaaactagctttaccaatcaatatattataacaagattatataatcaatagttgcactaaagtttcaaacttcacacaacagactatgtatcacattaaaattatgcattcatttcctattacagggtaaacctaaacacaagttgttagaaaatgaaaatactataggagcttattagtaatttgaaaatagtgtgaaagtctataaatatgtaagtgtgtagctattattggggatgaattgagaaaatataactttagttcaattaggagattgacaccgcctcaaaaagtgcatttcggagatttgtcccgtcttgaagaggactattatcaatcaaaagcaccaatgataggtaacgggtcctcttcgaaacaggacaaacctccgaaatgtactttttgagacagtgtcaatctcccaattaaaccgaagttctattttcttaatccataccccaataatagctacacaattacatatttataggcttacacactatttccaaattactaataagcctcatagtatttacatattctaacactgggcagattaaaggcaaacaaaggacaatgttactcaagtttgtttggggttaataattgaaactaaggaaacaacaaaaaccaaatgaaagttattactacccaaagctcatggaagtgtaaacaatggaccacaatttgatctacaaccaatattacctgaaataatttaacattattgacaagaaagaacaaaactttaatgtaatttcataaaacccaattcaattaacagattttctcacatgggataagttggaattcaatcacacaggttcattacatggctggctttgctggcttaatgattgtttaatcatttgttcttttttgaatgttttttcagcagcagaattgtttggtgggaataatgaaattggattgggattgtagctcacactatcaaaaagattaattttgaagttacaacagaatttctcatacatattacttaaacgagttactcagagaaataaagtttggttttttattcttaaaagcagataaagattggatttttagtcactaaaaaatacaaaaactaaattcaataattggtacagaagattaaaacgatcaatcaaacttaagaaatcatataaaatgaaattaaattactaaccagaagaagaagaggctgatagcaaggtagtgagtgagggagagagagagatgtaagagaagagaagagaagtaaatatgatgaattctgaaaccctaatatctgttagtgggctcttgtattgggcttttatgtttgggcttaaatcatatggtatttttctaaactataattaatattttgacatggaaaataagaa

SEQ ID NO: 34994 - DNA, 1245 bp, Cannabis sativa
ttgttgtcttacaaaatgaactcagcacctctatttatagtgttttgaagatcacatatgaaaatcaaagtctctttaccacatggctgttactttaattggtatttaatgggagaaaaacgttggacaagagagttggaaatattctcaatcaattcatgtacgtttatggacgttttcaaaaacttgctccaggtgttcataaaataaccataaaacaacataaaaataaccattaaacaactatttccagattactcaaaatttaatttttgtaactcctctccgagttaaatcttcctccaatgtcccaatactcatttaaatgatataattgagtattgtaacagtttcgaacaacaagaaacttatcccatgattaccataacttccatatgtaataactcacttaattacatgtgatccttaaattacaatctatttttagatttgtaactcctcatatactataacttttatgtgtattattatactatataaaatataatacaacctccaacacataatatatattaatctcatattaatatataatatgtcacattaaatattttaatctatattatattataacaaataatataacatataatgtctccttcagtttaacaaaatatatgtattaggggccacttttgtcgcccctaaaaagtcgcatctaataattcgcacctaaaagtactattaggggcgacaaaaaagtcacctgtaagtaggggcgacattatcgccccttaaatccctaaatgtcgcccctaaaaaagagtgccataagtcaaattttgactttcaggggcacctttgtcgcccctaatactttttatattaaaaaataattttttatattattataaatatttaaatatattttataaatgacaatcaaaatggtataaatagcataaatatttatatgaaaaaaataatatagatgtgataacattaatatattaatagtataaatattaatataaaatgtcattaattagtacaataatataattaaaaaaaaacttatatttcttacaaacaatattactattatttaaaaaaaaaaataaacaacaacattattaagataatttaaataataataataataataaataatacaaatgaagtgttttttgttgttgctgttgtaaccgtagacataaaattttccgcatctcttattctcattgaactctgcctaagacagtggttgagctgcctgtaatgttt

SEQ ID NO: 34995 - DNA, 1309 bp, Cannabis sativa
aaatgagttgaatcaagatgtgttggaaagaagaaaaagaaatctcaaacttttatgctttgacttttccaaaatctgatcagaacatagtcaaatttaagcttgaagtttcagctttataaaaagtgacccaaaacgtaggctaaaaatagcctaacacatctctattgagacttttgacgagatactagcaagtggtctagagagggtgtccactgtgagataccctcatgtcaattagatggcatggtcagagcgtcacatacagtaggggcggtgttgtcactacaaccatacttcaaagacatcgctgcttacttcgggatgtgtccaacacaaatcactccaaaatttataaagtacctttcagtgatgttgttttttatgcggagttatgttgacctcagcctactccatatgagattggatattccttcgatatgaagtctgccccaaagtagaaccaaactgcatacttctacttcaatcaggtcggtctttggtggttacgcaacaccaacaagatgcctacgtccgaagttggtgggtatgcccagaactacttcatttcttagaacatccatgagatttgacacattgcaaatgagggatagggtgaatcacattctgtccctcactatagagaagaggaacatcatcaggttggctagtgtggccaactttcagagatatggcctgtacccttctgtctctggagttattgaggcccacgacccatcagttggcgtggatggaaccccaactgttgaggtggtctgtcccggtaatggataagtccatgacatggatgatgatgtgcctctaactcggatagtttgaggtctgaagaagagagagagagggcccttcaccaacgcttagctcgcggggggcacagttagagatgcttctcttcagattagggctggaggctagaggcaagggcaaggcgattgttgaggactcagatgattcctcttctgaggatgatataattgattgcaccatcttttatattcttgtcttccatcgaatatttttgacttgtattttgactttgctactttctttttgtagatatgtcttccaggaggtcttgctggtggaccttctgaggagccttcaggtcatctgagggccaaggtggctcgaaccactcgtgctagagatgttgcaggattatctgttcctcttcctcctccaaggcctgtgccagtcgggcaacccgtgatggatgaccctccagccaggagggaataaccttcgagtaggggtgccctaaggcctagtcggggagtagactcagcca

SEQ ID NO: 34996 - DNA, 2137 bp, Cannabis sativa
aaaaaaaaaaaaaaaactagattacatttaacaagaggctataaactaaatctcttgcactcatttcaaataaaatataaatagatctaacgtgagaatccaaatgccttggagacctaatcacctcacgaccactttcctacagccagccacttgccacgtgcttttactattaaaagaaagattgcaacgataaaatgcaaatataatatcatcaatatatgcctctctgggtcattatataaacaacgttgttttacagaagatagacacaagcttcctcagccatgattactgctttacccagaatccaagtagtaattctaaatctaataccaatcttctttttattttcctcaagttatgctcaatctaaggtatacatcgtttacatggaccattcagccatacccagagcattctctacacaccacagctggtttgagtccactctttcttccatatcagaaaattcagagctccccatttcctcaaaactcatccacacttacacaaactccattcatggcttcagtgcatccctcactccctcagagctagcttccctccaaaactcccctggttacatccactccaccccagatcgtcctatggaactacacaccactcactctcccaactttctcggaatgagcaccagttccggggtctggccggcttcttcatacggcgaagatgtcataataggcgtcattgactctggcgtctggcccgaaagtgagagctttaaagacagaggaatgagtcgtgtcccattgagatggaaaggtaaatgcgagacaggacaacagttcaacacttctttgtgcaacaagaaactcataggtgctcgatatttcaacaagggagttcgagccaacttccctgatgccaaaataaccatcaactctgcccgtgacaatgagggccacgggactcacactgcgtctatagcctgcggaaacttcgttgagggtgcttcctatttcggctacgctgcaggaacagccagaggaatggcaccaagagctcggctagccgtatacaaagttctttgggaaaactatatttactcatctgatgttatcgcagcagtagatcaggcaatcaaggatggagtcgatgtattgtcaatgtcgttgggaatttttgcagaagaagataaattttacgatgaagacccaattgctttggctacatttgcagccatggagaaaggtatctttgtttctgcttcggcagggaacaaaggacgtctttttcatgggacaatttataatggggcgccatggttgacaactgttgctgcaggaacacttgaccgtgagtttaaaggagcgttgactctgggaaacgatactaaaaagattacatttgagtcgttatatccaggcgaattttctggtcaccgagaacaaattgttttcttgaacaagtgcaaaagcttgaagaagctgaaaaggctaaaggggaaagtcattgttgtatgcaaagatggaaagaacacaaacttgggaacccaagtcgacataatcaagaacggaagtacttcggtgatttctggtgctatatttctcaccaactacgactataaagattattatgattactcattcgcagctggattcattgatgatgaaaatgatcggaaaactgtgatggactatattagtaagaacaaaaacccaactggggttttggagtttcggaagacgattttgggtacagctacagctcccaaagttgcgaggtatagttcgagaggtccatttgcgagaagccggaatgtgttgaagcccgacgttttggctcctggttcggaaatcttggcttcatggactccgcttgacaaagttggcgaagtccactccaagcctttgttcagtaacttcaaattagtttcgggaacttccatggccgctccacatgtttcagggttagccgctttgatcaaatctgtttacccagattggagccctgcagctattagatccgccatcatgactacggcaaaccctttagacaacactgggagtcccattaaagacgacggaaacaacgacgaaccggccagccccctatccatgggagctggattcattgatcccaataaggccattgatcctgggctaatcta

SEQ ID NO: 34997 - DNA, 1011 bp, Cannabis sativa
ataaaatagatagttttctttatatattttccttaaacttatacattttttaattttattttattctttaccaacatccaattaaatcacaaaaatccttgatctaaaactaaaacatactccaaaattgatactatagaatccattttcaccaataaacattatcttaatcataaaattgtggcttaaaaattgggaatgaaaaagtaaaaataatcaaattattaaatactattattgatttatcttcttcatcattctccaacaaaaagatcacatggcaatcaaacttatatttatagaaagaaaaaatacaatattttaatcacattattaattatggcttagaaaaagtaataagtaaaaataaaaaaaaaaattattcatgcactaacaacaagacgatatagtatttaatatattattattatttactaaaaataacatatatatatataactgaattgcatgcaattagtaataacatactttttaataattaattatacgaatatatattaaattttgatttaataaggttcgatcatttttcgagacaccgacaacgtatgaaaattaattaatttatatttatttaattattttatttattaattaataacttattagaaaaagtgatgataattaattacaacaaccagatcatgtatggacttctggtctggaaaataataactacaacaaatatataattgtaacatgccttgttaaaagtcttattattaagacactaataactttaataaagtttatttacttaagtggtacctctgtgaatggttagtaatatttcataaaaattattatattaaattatatgaaatttgatatgtaattgcactaacgataatattatatattggagaatgctaagcacccatgttgccttaattaacatgaaaaatgctaaagggcacacatagtacataacactaattataaaaaattataaaaaatcactaatcaaattataggatgacatatttgtca

SEQ ID NO: 34998 - DNA, 1521 bp, Cannabis sativa
gcttggtcttcatcctccaccttgattccaatattctctaaatcaaggatcactttattgaaatcatccaaatgatcttcaatttcttttcctggtgtcattttaaaagaatatagtttctgtttgaggaataacctatttgccagtgattttttcatatacaagctctccaatttcttccaaacacccactgcagattcctcctttgagatttctttgagaactttgtcaccaaggcttaaaataatggcactatgtgctttatcaagaagctctgttttctctttttctgttaaaccagcaggcaagttcttctcccccaatagagcatcttgcagaagtgccttcatcttgactcgtcacaatccaaagtcattcttctctgtaaacttctcaagatcgaatttgacattccccatcttcttacttgattgatcacctggttctgaagcttgaattggcagatcacatcaccttcttgatttatcaagattcaacttcaacagctccaagatccatcttcgatcaaccccagctttgataccatttgttagagattcaagactcaatctcacacaccatgggagttcaatacacattcaagaagactccactaaagcacttaaccgaaaccaacaacaaagccaaagaaccacacttaagaacttagacagaaatgtaataacactttctttattcatatgaatctaaatttacaagtaaaaggattaacctttcatattacaagtacattgttatttataggacttaatttacacgtgttacaactaactaaaccgacatgtatattggttttaattaactcgattagttagttaaaacaattacttatgtggcatattacatagtcataccaaatctaaccgtttaggatttgataaaaatcatgcactaaagagtatgagatatcctattgtttcaaaaaaaaaaaaataaagaattattaaatattgaccaaaacataagtcgcgtttgattagtgtttttcaaaaataatattgacaaaaaatgaattgttttttaaaatagaaaacagtattttggttgctttcaaaatttttaattcttataactttatttttttgaaaactgtttttaaaaattaaggtcaaataaaaaaataataattttctgtttttttaaaaaaaacagtttcttaattataattccttattttttctatcaaattagagatattgtagaggttatatagtaatgactgtacgtgaacaaagtcaaaatctcacctcctcccaaacaataagaaaatcgaagctatacaacaacaaaacactgaacagactccatacacctacctagctagcttctcactataaatatatatatgacctgacatcatcattttccatctaactttctctccatccaaacagaaatactactccctaaacttcactcaaataatggccgcttctccaatttttatcctcatcctcatcgtctccgtcgccggaacccattccaacgattccatcgaca

SEQ ID NO: 34999 - DNA, 1215 bp, Cannabis sativa
ttaactcttggtcatatgtcaatcttctatgggacgaaggttcaagttctacgggtatcatagcttcataaccatatgtcatggcaaatggagtctgtccggtcgctgttttctcaattgtgtggtacgaccataatacttcagggagttcttccggccagtttcttttagcatcttcaagtcgcttcttgagagtatctttgagtgtcttgttgactgcttcgacttggccattttcttggggatgtgccactctggagaaactttttatgatcccatggtttgcacagaaatcaatgaaggattgactgtcaaattgtttgccactgtccgagactatcttttacggtagtctgaactgacaaattatatttttcacaatgaagtcttgcacttcttagatgtgatggttaccagcggctcggcttctgtccatttagtgaagtaatcaactgcaaccactgcgtactgtactccacccttgcctttgggcaattgtctgattaggtcgattccccaaatggcaaaaggcaaaggactttgcatctgagttagtttgttggacggtgcacgaggtatctttgaaaatctctggcacttatcacatttcttaacgtaggccttggaatcttcaatcatggtcggtcagaaataaccttgccttagaattttcttggataaactctgcccagccgcgtggttgccgcagaatccatcaagtactttggacaaaagtcatgcagcttcttcttgtgtaacacacgtgagtagtggcatggagaatccccttctatacatgactccatctacgatgatgtaccgtacaacctttcttctcattttttgagtttcgttcctatcatttgggagttccccagtattgaggtaggctactattggcgtcatccagtttgtagatgtgtcaatcattttgatctcctctgtgccggtgatactagatttttcaaggtattggatggggattagattagccttatgatttatgttgctgctcgcgagtcggcctagtgcatcagcaattgtgttttcttctcttggaatttacttgaggacataacttttgaattgttcgagcatgtcctgtattatgcttagataggctatcatcttttctccccaagctttttactccctagatacatgatttaccactaactgtgagtcactgcgaatctcaatgtgttcggcatgcaa

SEQ ID NO: 35000 - DNA, 1649 bp, Cannabis sativa
tttctttattgataattgaatggtaaatattacattgatatatagttttatttagggcacaaagcccaacacgctccttcgactctattaattcatcctcgaaggtgacattaggattcaggggagtctttgattttcgaggcttcgaagtcatgatttcaaagtctaggtcacctggttcaaaagtaatcgtgactctgggtaaaaataaaggcctagctagaggaattgatgataaattgggggattcaagccaagtaccatctcgcaagaaacaacgtttgccttgtttaatttcttgcaagaagcgtctgcggaaattggtaatgtcatcttgatgggtttttactaagtgttcgctaatttttgcatcatttatctctaatttggatttgggttctaaaattctgggtttatatgagatggctagttcactaggacactttgtttctaagtattctagacgataaacttttgaactagattgagacattgttgctaaaagaaaccaatcccaattccaggataaaatttatcaaagaagaagttggtaaatttgagaaacccagaaacctacgttttggctaaaccctaaaatttacccaggtacaattcaaccctaaaattgctaaaaccagataaggagataaaggtgctaattaagaaacaagtgatcaaacccagaaatgtgaaataaaaagcttgtaagaaaaaaaagtaaaaagaggaatcactttcggtttgaagttagttttgggagcaatggatggtcctacaatcgatggtataacaaaaaatgtggtgatccctctgaatgcttgaggttgaaaattaaatcggacaaaaatcacaagaagaatttcagcgacagagagggcattcaaagctttaagaaatctaggtatggtttttagcagagaagcttgaaaaatttccaaagtttttgaaatggctaaggtaatgaaaatgaggttcctttttaaatttatactcttgggtttatctctatcggattaaggaggcaattgatcgaacgtgtaaagtttaaaaaaggtagtggaaaagatggttattaaatgctaatgtgccttgaaaccacaaaaccgtcaaaatcaaaggacattcattttttcaaaatggattaaaaagaccctctataatcatttaaaaagcacttttcactgaaaagaattttttaagggtcaattgctatacccgaaattcggctggcacttcagaggaggacacgtgtcaaccttaatacggaatcaacgaataatataatggcaattttattaaaggatattagaatggaataactcattaaatgcagagttgataaagtatatctatcaactcgcttactgtatagtcttatgcgagacacggatgtacaaactattaattaacgtattgacgagaaaccattttgtatttaaagacacaatcataaggataacatatgcatagcgaggcatcaacctcgttacatataaagaggcattgacgagacaagttgaatgttagaacacttagcgtataatatacattatactaactaagtataatagctggaagagtctgagtaacagatagcgaggcatccatctcgctttaggaagacatattcttggtacattcattaatca

SEQ ID NO: 35001 - DNA, 2006 bp, Cannabis sativa
aaaaaaaaaaaaaacagctatatagcccccttttcaaatattaaaaaaaacagctatagccacgtccaccaaatttttgtggggacttcatatatattacttatcatttaatctaatatctgattaaatttgcagggtaacagaatgcaaccaactattatacaaaataaacagaaaaatgaaaaaatcaccctaataataattagtaaccccatctcttctttttatcttgttatgtgagttgtgacttattgtgagacctctatatatatatatcctcggattccttttgttttgtctcacagtcacagagttgttccaataacattcgtttataatttgtttggtgagagactagctagctacgttcaaaaaactttatttccataatatattgtaacctacttttgtttctaaattttttaattcttttattatgtattaaacataaagataaatctaaaataaaataaaataaaagatagttacaaaaatataacatatcttattcaagactttttttgaacatatatcttattcaagacttgatagtattacttaatatcaaaaaaaattatttaatgtattatatatatacatatattgttataaattaattatttaatttgttcattttttgtcaatcagtatgtagtgtggaataagtagttaatatatataaaatgataagttgacacgaaaaggcgataactcaatataagcgagaggtaaaaaaaatttacatgaaatgaaaataaatcatattagattgactaatgagaaatttgatattatatgcttaaaattaatttatccacaaaaaatgggttctcttgagtgggatgaggaagttcttcacaatttatttgttcagagggatattgatttgatctgttgtatttcgttgtctccgtcttcggttgaggatgcttggttttggatgttggagacgcatagggattattctgtcaaaagtgcttatcgcgccttacaagtaagcaatagtggtggaatactcaagacaattcgggtttttggaggatgttttagaacttgaaattacctcctaaggtgaagaattttctttggtggggtcttaccaattgtctccctactcttgtgtctgcggtctaaaagggtctacgtgagcggattgtgcctgatgtgtaatcgggaggatgagacaatttttcatataatggttagctgcacttttactaagagttacctggacagggggctgggagggacggttggaggggggtgtagctgctgtgtttggcagctggtttgagtaatgggctaaaccttgttttagtgagattaaggttaattataatgatgctgtctttgcggatgacaatagtctcaatttggggtggattgctcaggatcataatggtttatttattgatacgatggcggttaaaacttatggtcaactcgacccatttttggctgaagctatggccttgaaggaggcgctcagttgggtgaagggaaggtgggttgaggggggtgtgcctgctggtgtggttatggagtcagacttgctgctgctggtgtaagtcgtgcaacaaaagaagcatttgttgtctctggtggggcttttaatttcggattgtgttgctcttatgtaattctctcttttatttcctatttcaattaaatttatttcctagctgtgtttcccgcggggattttgtccctgctggtctggaagctatcttggtagctgatttggtttattaaaagttaattttttggctcaaaaaaaaaattatccactaaaaatatgctagcatattttgcatcatgcaaaatatacttacaccatttttctcattcaattttacccctaaataaataaaaaccaaacatccatctctctctctctaggatactcacaccacacacacacacacacactctaccagacggacgacccatcaccgaagctagtgttgttcggccgccttacatttcaaaaaaacttctctcgtttt

SEQ ID NO: 35002 - DNA, 2083 bp, Cannabis sativa
  modified_base (201)..(201): a, c, t, g, unknown or other
tgctaacagctgcttgtacaaatggagaacgagtactgagagcatctccaatggtactctatttttttttagctaaaatagctaaaaagctaaaatagagaaccatttttattgttgttgctccaatcatactccctactttagttagtatttgattattttaatagtttttactaatttgaatttgtcaaatataaattnattttataaaataatgaaaaaataatagtgcttttgattaaaatattattaaaaaattttagcagaaaagtagggagctccccatccattctctattatagagagctattttttgtatggttggagctcattttcacgctccctattttagctaaggagtgtgtttagagagcatggttgtagatgctctgagaaaatgacttatgattgcacttaatacttgtatctgagttatttaatgattccccctcatctttccttcaggccttgctgtcagcagcaaacatacatatatgttttctgctggtgatgacaaacaagtaaaatgctgggaccttgaacagaacaaggtgagaaccaactcctcgagagatgtagtttgtgtatgttttgtctctaagtgtgctatgtaccacaattttgctgcttaggttattcgatcgtatcatgggcatctaagtggtgtgtactgcttggctcttcatcccaccattgacattctccttactgggggacgtgattctgtctgtcgagtaagtgaattttttccttttcccataactaaagttacagagcttatttcagatttttaccataactagttactgctatagctatttctgcatgttggattagattgcacatataataattcagtgactattttcaggtctgggatattcgtagcaagatgcagatttatgcactcactggacatgacaacacagtttgctcagttttcactaggcctacagtaagtatatattcatcttttattctgtttatttgctgtttctttacattctattttaccattttccttttttttgggcaatctcaagaaaattgggttattcatatcaagtctgttctgtattgcttttatgtttgtaaatacatttttaggttttgagatggatttgttagctagatctgtctttgttgtttatgaaatgaaaactataaggttgctcttctttgggagttccagtaaatctttgttcacattgctttatatgttaatcttaaatttgtctcattctccaggatcctcaagttgttacggggtctcatgactcaacgattaagttctgggaccttagaaatggtaatttgtgctatgagactagaacattgtagttttcagtatacatacatcccttccataatattttatttcctttgttgcagggaaaaccatttcaacactcacacaccacaagaagtcggtccgagcaatggcacagcatcctaaagagtaggcgcctaactttgtcatacctgtctttttaaaatagagcttagagtaaagaaagtgtagtttcaatatgaaaggttttggtttcacttttcttttgttgtattctttcaggaattgttttgcttctgcatcggctgacaacattaagaaatttagccttcctagaggggaatttttacacaatatgctgtgagtaacttgacaaccatttatttattaaatacttatttacttaccctatgttggtctgatatttgtgcatatataatattgtaatttatttgggttttcaagcaattcttttcacctttcccttctaatgtgacaactgggctgtaatttgttgagcagctcccagcaaaagaccataattaacgcaatggcagtcaatgatgatggtgtcatggctacaggaggtaaggatttatctcaactgtgtattttgtttatttcataatatggtcagaggagttgtttggtatacaaaatgttaaattgttttcacttattgacaccgaattctttttacgaaggtgacaatggaagtttatggttctgggattggaagagtggtcacaattttcagcaagcccaaacaattgtacagcccggtaaatgctt

SEQ ID NO: 35003 - DNA, 1003 bp, Cannabis sativa
agtatgaggtatagatatttgattgaggtatattgatttattgttcattggtaattcataaaagaatgatcaagaaaaaaacttgtggaatattaaataaaattttttgtttaattttttttttcactatgctggtggtatattattttttttttcactgtgcaaacagtagaacaaattgaaaaaaaatgaagttgagcttcatctatataaccaaatgcattttaggtattaacatttataaaatgccatttacttcatttttttaaagatggatattaactttcatcattgtgagatttaaggctatttattacaatttccctctctattagctattttagctagaatttataggtttatagaatgcaaataaaattttccaactctcaatctcttattcaagcttattcaagtcaatctatcttaatcttaatggagcataatggtctatcctagtgcaactcagcctatcttattcaagttttacataaagctcctctttgtgagaggatactttcattttgaaataagttttgaaatagtaaaattatagagagtcaaaatcttttggtgaaacattctattagtttacacttgtgtatatgtaataataaaacttcgaagtcgatacaatattaatcaagttagtatttaatggcaatatctaactgaaactttaaatttataagaaaaaataaatttaaacggattttgtaaaaaaaataaaaaaataaaaaaattagatgtataaaaattaaaatttaaaaaatttttaccattacaaaaaataaagacatatataaagtaaaatataaaagtgtttctcttttgctcattttattaggaaaatttataaaaatactgaagtttaagttaatttttacaaaagtactacaacacgaaaaacttttaaaaaatacacaaagcagacgaactcaactgtaaaacatctaaaaaaaacaccacagtagaacataaaagatttcaaaaaaaaaaaaaa

SEQ ID NO: 35004 - DNA, 2447 bp, Cannabis sativa
agttgtttagcaagctgctggagtgtatctgtcaacacttgtagaacgtgttgcaaccatcttgtttagtaactttcttgaggtgtggctcaaaatgaaagcaccaaaatattgactcaaaaatttggactagacttttaagccaaagttgctcattagattggtgagaataagaaaagtagttaagtaagataaagagacacatccaatttataatagttcacaccctatattgcgatagtaatggggctacgtctactttgagtttttatttctcacaggatggtaattatagcaatagaataattatcagaaactgcaaactctacagagagaaagtctagatagagaagctctaaccttgtggatggttttctgaatttctaaaatgagttaagggagctttcattttataggtgaaggaggcccacaaaaataggagagaaatacaaataatttatttccaccgttgatgatgatctaacgatcaaaattatcttctggtagtgatggccaatttgtggtgcctggtgggtcttgctgtgggttacccagagcttatttttataactcccttaggggtgaatttctagaacaatagctttgtaatttctactggggtgtgagacatgaattgatagatcgtttaaatagcttcaaaaaacaagttgagtcgcattaatcgaataaaaattgagtgaattattaccgttttactgaaagttttttaggtcctagtgcccaggttgacatctgatgtcaacctggatgctggataagtgtagaaacgttcaagggatttcctttaagatgtctaagtgatagtttgataccagttagtcaatttatatgttctaacaaagcttgtcaccaattcttggagatgttgctattttgcggaaatgggagactcaaaactcttcatttccaggcgtgttggaaatgagaaatgcaatgctgtgaacttgatttctctgacttcatagatcactgtatttgtgaaaaacttgatggacggtcgaaacaacattagattcagataagtagaaccaagcaaactaggccatttgttgacctgggggttgggctctttccattgagctccctcgattctttttttttatacttccaaggcttctgaacttgaggatgatgtcaccccccccccatttttgaaaattttaaactcaatggtcggatcagatttggcatttgagcaattaaaggcaacatcccatgttgcttgtcaacctgggcgctgggcctagccctaggtcaacttgggcgctgagccctgtttctagggactcaagtttatgtttttctccttgagtttacttgaatttttgttatttctgatcacaaaaaaaaaatgcttagaacactttttgctaaacttgatcgaaaacaggccaggttgacaaaatgtgaacttgggcgctgggacccaattgccccttcgaaatttttttttggtcccttgaaatagttgaatctcaatattttcttaagacagaaaagatgttcaaaataattattgaaagaactccattttaaatagcctaggttgacaaaatgccaacttggtgcaagttagtccaaagtgtcaacttgggtgctcggccctattagttgtgctcatgaattgttgtttttcctttggaaggacctatttcatcatttttcatgaagacagattcaattcaaaagttgaatctctgattggacacttggaaggtgcccagattgacagaatgtcaacatgagcactgggtgctttaggccacggggccctaggtgcttaaaaaccaacttgatctgatttcgattccgatgactcaaatatgtctgtggtatgtctagttgatgtaccaattaaattaagaaccacttttcactaagagggtcccaaaaactaaaatcctatgtgcccaggttgccttttggattgcatgttcatgtaatttctgcttctgggacttggattaggttgctccatctcttcatggtacagaatactgaaatatagtgggttggattcaagttattgaactccaaacttccatctcggagatcctggagtcaacgcgggtgcagggttagggtcccctcccatgtttactactatgactcaagtctactcaactctgtgatggcatccttcatgccacgtgtcaaacattgatgtccacatcaccagggaaattttctgagttaacactacccaaggataaccgtctaaaggcccttcgtctttagaagaagactcattagagctgccctcagtcacaacagccttgcctttgcctttgcctattggcgtgggctgagcaggactcactaacttttgtccctcatgcataatcagaactagggcatcactaatagtgccacctcgtgcaagacaccttggaagggcttgatccctcctagtttctatttgagca

SEQ ID NO: 35005 - DNA, 3153 bp, Cannabis sativa
tttagttgggagactaagtttttgtccaaagcgggaaaagaagtcttgattaaatcagtagctcaagccttgcctaattatgctatgagtgtgtttcttttgactaaagaaatttgttcgagtcttgaaggcatgatggctaagttctggtggaaatctcagtcaagttcttctagtaagggagtaagttgggttagttggaagcgactttgtcaacataagaattttggagggcttgattttcgtgatctgcgtgattacaatctcgctttcttggggaaacaaggttggaggttacttactatggaggatacgctagtggcgaagatttacaaagctagatattatccacaacatggttcgttccttaatgccgatttgggtcaaaatccaagctttatttggaggagtatttgggaggcgcaatctcttgttcgcagtggtgctcgacgatctattgctaatggttcatcggttagtatcttgcatgatccttggttgcctcacgatacaaatccttttgttcaaactgataattttggccttgttgataagtttgtttcgaacttgatggtgattggggaaagggcttgggatgttgagcttctaaatgatatgtttgaggaaagggatattaatttaattagaagcattcaacttagtcaaactcgagtgaatgatggttggtgttggaacatggagtcatcggggttctattcggtaaaaagtgcctataattttcttcaagcttcaaaaggaaattggctatttttgcaagatgatacttgctggaagaaattatggaagctttgtattccacccaaagttcatcatttcttgtggaaagcttgctcaggttgccttccaacaaaggtacaacttcaaactaaacatgttaatgttgatctcttgtgccctttttgtcatatgcaagttgagacaatatttcatgttttgttggactgctcattctcgcgttcctgctggacgttttctgctgcaacaattccaccggttgctggtgtggaaaccgatttctgcaactggttttttgatcttcttgatggaggccgtgaggatgtagtagctgaagctgctatggtgtgttggagcatttggaaatcccgaaacgaagtgttatggcaaagtaagtctcggcctgctttggaagtggtgaaatcggcaaagcatgtccttggccaatggaaaattactaagtttgagtcacctaatgctcttcttgctacaggtgacatctcaagtactagtagttggcgcaaaccagatgtttttacggtcaaggtaaatgtcgatggggctatttttgaagctcaacaaaagttcgggtttggttgtgttgcacgcaacagcagtggtatactccttgaagctttttctgcgagtagatggggctgcgtttcggctgaaattgcagaggtcattggcatcaaggaggctttgagttggattaagcgtaaggggtgggaaaaggtggttgttgagtcggatgctttggttgtggttcaagctataaatagttctatccaaatgccatcccaatttggtttacttgttgaggactgtcgtgttattttatctagtttgaataatgtccttgtgtcttttgttaatcgatctgcaaatagggctgcccattgtgttgctagggagtcttatttatcgtcaggttgtacgtacaatgagctgaatgctccttcgttcttgtgtgacattgtaatggctgaggcctgttaatcttaatgagaacaatcttttattcaaaaaaaaaacatacattcattacaagagtccaccacaacgtgcttggaggactcaccagcagctgcctcgactggcaaatcaaactactttgcctcagttgctgcagctctttctcaaccttcatctgctcgcatctcagcggtaggacatcacaatcactcaaatccatataggaaaagttggcattggggtgggttgaccaaaattcataaaaaatatatgtggcaagatccgcaaatgagtcaagtttgactgagcaagccttattttcttcctccaatgctacctttgccgcagttgcacgatccttttctttggccactttgtcttttaaatctttaacatgctgctcgaggtctttaatctttttctcgtggttttgcattagtgtccggaggttggccatttcctcggtcagcttgttggccctttttgcttcagccttcaaatcttcatgcagtttctacgaggaaggtacctcaaataactctttttctaaggccttaacctttttcttggactcgtacagttgtttattgatgtcgcccaggaaagtttctttgcgttcaacctcgtcttgaactttctttagctacctaggtggctaaaactttagtatgagagtacacatacttgacctgaaaattcatctaaaaaacaaagcaagttaaagcaagtttttatgaaataatttgttctaatcacataatgtatcaaaaaacaccttagttatatatttgaggaggcctctagccagcatttctaaaggagcatactgagccctttagcacctcatttgcttcgactcaaaaacattctcggtagttctcgaccacttcctcgaccctctttgtctcaacagttattagagaggatattttctccttattttccttgctcgaagggaccaaaggtaaagtttggttcttctttagctaactcttaagcagcagctgttgaaggaggagcatcaataaccaagacctcatctttagaggccgaaagaggaggtggtggagcgaaaggttttggctgtgccaagaccttagagtccttcttcaaagtgcatgtcagccaagctttcttgcccggatgcccctctagacttcctcttcagggtagcatttagtttggaagattacggaaaaaataacttggttaatttttacaaaatatataacaaaaggcaagtgaaatccttaaaaaagtataccatggacctttcgagaagcatcctcctgaacaactattgaagggatgtcatcatcggaaaaatccacccttaactcctcttcaatgacctctatgcctttcctaacaatagcttgcacgatggtgttgggttttgtgccctaaataaaaccctttaca

SEQ ID NO: 35006 - DNA, 4804 bp, Cannabis sativa
tacatttaaaactaattggcaataagaggagtagccgatacattttaaatatggtattgaatttctacacattatcgatgtaagactctctaacaggctaaaacaagtacaaaatcattgagaagttgcttacctcgggaacttcatcgtgagggcagtgaccggctgggctaatctcgtaataaggagcttcgggtacttggcgtttcacctcaaggccccaaactggcctaacccaaggatcttctttcccatacatgagacagattggtatgttgttcatttgacatctgcaaaataaaaaatgaaaatatttccttaaatttcaacataaaaagagatacaatatctcgacgtaaacaacaatggtactacactcacttagataaggcgtcttgaaatgagagttgtccctgaggagcaaacatgatcgaggccaacgatgcagctgcagccggatgctctgtcgtttcaagtattctcgaaaacactttgtctacatttgttgaatgatctgcatacacttgcttgagaatctctgcaatgctatttggatcgcttattttctgccaactgaaaatcaatagaacataaactcgagaacaaaatttactcgacgaacataaacaataagaggaaagaattcacgaacggtttaaccgaataggaaacttacagaatttctgtgagctttctaacgcgtgatgggataggaaatgttccagcccatgggaagaacttagctactctaggagacctcatcgggttcggtagaaagccccaaaaaggggtagcattgagtaatgtaacacccttaactaggtgaggataggtagctgcaaaatacaaggcaacatatcctcctaacgagttcccgacaagataaaccggttctccaatgacctgtaacagcagataattcaatcaaattccttcttcatgtagctaaatattctatagaaaaaatatgctacatatgtttgttcaattataacaaagagttctttgccactaaaaaccactaattggtcagattttacagaaaaattgattctctaatgattataacaaataattcaatcaattaatctgcgacacatattttttcaagactaattaagactttttcacttaaattttgacaagaacgaaattgtgccctccggttttaaactgttataaattctatcgaactattgagattgttgaatttaggaacttcagttcaattttactaacaaacacctaacatagacgaaaattcaaaagacacaatttcgttcatggacaattacaacattaagtatcccttactaaaattgaacaaaaatccttaaacccaacaaaactcaatagtttggaagaaatttttaacggcttgaaaagttaggaaagcacgaaaaaatcctaattattcattctccaactatatcaaaacatgaaaggaatataacaaagagtattttgatattaaaagccactaattagtcaatctgaggaatgtttttatacacacctgttcaatgaaacaacgaacttgatctctccacaaatcaatagagtaaacaagctcacttgcccaaggctcagtttcatctccaaaaccccaaggaaaatctgtcccaataaaatcatctccttccttagacaaaggagcaggatcttcaaatggcaaggacataccttgaccaagaaaatcaattgcccaaactcgataatcgcgtcccaaatcctttaactgcttctcataatgaaaggaaccaacaccaaaaccaggaagaaacaacactggtggtgagctcacattctcactccctgctttatcataatggacattaaatttaggcttccattcccaaaaacagctagtgatttcggccgcggtttcagcattggattcatctggtaatccagggatcaaaaccttagtaactgatttcccagttccagaaagctgtcttgcttcttcttcatcaccaattacataaccatcagagccaccactcaagaccttagtatcaacatgttttttggggttcaatagggagttttctgacccaaaactttcttttctattagggtttcccaagaacttgtaaaatcccaaatacccattttcagaatcaagttgggaacaaaaaattctgggtctttttgaagttggaatcttaggttgaaaacttgagcttttaataactaaattccagttcaaattcacaacatgacaacatggtgaagaattgtaagagagaatttccatcactagaatcttcaatctgttaaaataaagaaaattaaagctccaatttcctgggaaaccaaacaaagcttaaatcccagaaacaaaaatcagtctttaacaattttgagccaacccaatcttaaaatttacactcagaacaaataaagatcaaaagttatcattttgagaacatccaaaactatgaacaagattataaaaatagaagatttgtttaaagatattattacctttaatcttgggagagaagtgtcattagattccagttcctccgagtattacggagaaagattcttaagaaatctagaatgtgaaagaaaaagaaagttcttcagttgcttcaaagtttggtcttccttctaaagccaagaattttcattatattttttattaaataaagttttttttttgaatgtttattaatgtaattatatttattagaagagtgtgattataaaactcttattacaatttaatttaagaaaattactcatatattattttttgaatttttttttttaaatttacggtttgagttttcaaggtggttgcagcgctagttgtaatagagattttcatatgattttttattttaatttaggttgcagcgctagctgcaataggagtttctatgtaaaattttttaaaaatgtaaaaaaaaaaattattttgaattgtaaaaataaaaaataccatttaatttatgtgtttaaaaatatatatcaaaatattttttttacttttttttatatcggtattaattatacttacaaattagttttatatttttttttaaaaaaattaaataatttataataccgaaaataagttttaagttttttaaatgcgcgtggtaaattaaaatattgagagttctattttttagtaccctaaattattcgaaattttttaaaatttataaaaataatattataactattataaacactattattatctcaaaaaaaaaaaaaaacactattatgaaaaaaaaaaatattaaagtatgtaatttcaaaccttaaagattaatttatagattgcaatagaaaattatgatttctagttcttttactttgagtacttctacattatgctctaaaagcttgtactttgggaccaaaaaacattataataagttagatttttcaagttaatagcttgttgagaagtacaggtgtaaagcaatgattggtgagtatgaatccaaagaaggcattaattctatcctatcccacgtgctgctacaataattgaacatgtggcaggttgtggagtttttaattaagatggttaaattgaacacgttgtatagatgtgaaaggaaaatgagagaaaatattgaaaatgtttttgtttgtttgtttgtttgttattattaagtttgagttgagttttgttgttgttagacaaaattattagtgattgtctttggttactctctacacacgccaactctagttgttcgttgaaaattggaactgatattttggcataatcactcagattaaaatataatttttttttaaaaaaattattttataaaaaaaataatataaggtacgtgattatcacattatagtaactagttacccttttaattgccataaagatacatggttacttttatttagtttttctatattttttaatatttaattgtctcataaaataaccttatttaaaaaaaccatattttacataaaaagtataaaaatccataaaagttataatttcttctataaaatttgctattattttaaattttatatgtaatatggtaatcttgaaaacaaatgttgaaagcttgtacttaaaagaaatgacatttttaaaacttgggagccttaggatcttgtacacatttgcttctcagcaacatattatttgataaattgtagacatggtagaccttttcaacaagaaggacattggatcaagattaattgcgatgttaaagtgggaaataggtcgatgagtattgtagctttggctcaagaccatgcgagaaccgttttgtgggttgcttcgaagagttttgcctattctgtttccttgattggagaagttgaggcttgtctgctggcacttcatacggcaacagcgtggaaacactattttactattatcaagagcaattcggagattgttatcaaaattttgataagaactaccttaaattggcatattgataactatgttttaatttgtaatagactctctcttaattttttgggttgtaattttgtttttattttgagattttataattttactgctcacaatattactagattggttattaccaaaaactttacaggtattagttgatgtaccaactattccagcaaatattacctgtaatagttaggaggtctaattttgattttaatgaacatttcctttcaaaaagaaaagttgcaacttcattactagtggtcatcagaagagaaataagcttttgaaactagagttgttaagtgtgtctttctttcctattttatacttttgaaaatggcaaacaaaaaattattgtatgcaaaa

SEQ ID NO: 35007 - DNA, 1548 bp, Cannabis sativa
aatagatttttgaatcttattttttagtgatatcttagtcaattctttgtaactttacattattgtggttaattttggttgttgatagttcaagtctacctaataaatttttggaccatatttgatattattattttttataactaactttttttttttttgagataaaaatgccaattatattaaattaatcatccataatacaataagcatttaacgggggaggtatttcctccaaccaaaaacaaacagagtccaccgaaagagcatacttcgctaacaaatggcagccgtattcgcagatctaaacatgagaaatctgcactcctgggaaattggacactagatgtgtaatgtctgataacagacaatggaaatcagaaacagtagcagtagatgtgtgtaaacctttgaccactaaaagagagtctgtttctaagatgtgagcagtcaattgattgtccatcagccattttaaagcattcaaaagagccaaagcttccattatttcaggccgaaaaacacccggaattgactttgaaaaagcagccacaatatctccattagagtcccttaacacagctccacaaccagtacgttggttagatttgtcgactgccgcatctgtattcaacttgagcttgcccgaaggaggattgagccaaggagcatctgtagcagttgtcgaccgtgagggagaagataacgttggagtagcctttggcttctgggcagcttgatactcctcaatataagacagagcaaaatagagaaccatatcatatggcttggttttatttccatgcttttctctattcctttcattccaaatataccacaagattgtgataaattgttcaattgtagaatcagaccagatggtagaaaaataaagaaaacattcctttaaagacatactgctaaagagtatattatcaagtgagaaagaggaatctttccaaattttcctaggcctgtggcaatagaacaaagcatgcataatcgattcactatcttgttgacatagcggacaaattggggactgagctatatgcctgtgatacaaaacagcagtagccggtatacaatcatttatcgcacgccataaaaaaatacgaaccttggaaggcaaagacaacctccagaattttttccaccattgctgtgattgtgtacctgatatactaggttgttgttcctccaaattagtagccaaaaaatatcccgatttcaccgtgtagcagccattatgctcatggtgccagataagtgcatccgaatatggagttagggtcaatggaatgctaaggattcgctcaacatcagcaggaataaaataagagttcagcaagtttaaattccaagacctttcagctgtaattagagaagaaaccttaatatgatcctcaattccagtcacaaccaaaggacgaaagttggtgacaccaggcagccaaggatcacttttgcacaagatgccttgaccatctcccactttccatctaagaccttttgaaagcaaagctttgccccaatgaatcccttgcc

SEQ ID NO: 35008 - DNA, 3016 bp, Cannabis sativa
  modified_base (191)..(196): a, c, t, g, unknown or other
  modified_base (2953)..(2974): a, c, t, g, unknown or other
gcttacaatctatactggccgaatagttggatagaaaatccatccccagtatgatgtcaaactctcttaattccatttctataaggtcagcactcaactccctatcctcgatcctaagtggcatagacctaatgcgcctattggagataaccaactccccgctaggccttagggttccaaaccttctttcnnnnnnatcagaaggcctacccaaaagatcaattactcatgttgccacatatgagcgtgtagctcctgaatcaaataacacagtatacaaggagttgttgacaagaagttgacatgtcactatagaaggattggctgcagcatcagcttgagtgatggcaaacacccaagcaggtatgggttttgcctctaacttctgctcttctctcttcacctgagggaaatctttcttgaaatgccccaccatgccacactgaaagcatgtcttctgattgcactctcccggatgatgtttctcacaatgtgggaacttagggtaagagtaaccctggcgtccatcttttccttggttcccacggaaccgcttactctgccccaagccacctgatgccggggtaactttcctcttctgattagtggtggaatcaccaccatccctaccataagtaggaacaggaagagtgggaattccaccaacacttggagtcactcggggctcctgaaggaattttaccgcaccctcagctcgcaaggccttctcaaccattttcgcatatgatgttgcttcattggtagtgatcactaaatcatgtctaatcttcacattgaaaccgggcaggtacttttctttcttactgaaatctgttggcacaatacccaaggtgagcttggcaagacgatcaaactttgtagtatattcagtaactgacatcccctcggtttgcaccaactcagtgaactctttctgattagcactgcggacggcctcattataatacttagcattgaataactcttggaactcttcccaggtcataacaatgacgtcccaagttagggaaaccaattcccaccacacgagagcaacttcttggagctgaaatgtggcgcaggtcacccgatcatttccaaccacccctatgaaattcaaaattcgctcaatcacagtgagccactgctcaactttcatcacatcaggatgtcccagaaacattagaggtgctggcttgcgaaacctttcatataacggctccatacggttgccaaaaataggttgttctattggaaacgctggagctacaacggcctgagcttgctatggaggcacgacaggaggaccctgctaccttaatctcagaattttttcatcttgttcgcagattcgatcttgcatctccgcaaacctcttctcctaatccggaggagcttgttgtgaatttacaggacgacaaccctgaactatgccacaaccacgactgcgaccatggggattctggggaatttgatttctttgaccgcctccggtctcaaccatattaccctaacttcttgtatttcgttgggcgtcaattaaataggacttagcctgcgaacccgtaagccaggcaggttagacaacgatcataaaacttaataccgctcttagggattgcaaggcaacacacttaaaataaataatcataatctaatatgcttcctaacatgttttaataatcacatataatactaaacaagtacgggcttactaaaccgtgagctggtctttctctaatgaagattgtacatgtcttggcaaggttcggtagacaaaccttgcgactctgataccaaaattgtaacgccctaatgctaaggcacactacagtgcttttttaattacagtgctatcttcgctaatcaaagaattttcttgaaaaacgtttcaaattaaaacttttatattaaattttaactttataatttacatacccatttacaaacaccgggatcccatttttaaacttttatccaaaatttacaaaatacaaaaccatgtcacacaacaactacagaataataaccccagatgtcccgagaccaaacactcaaggtcgcgtcgccacgacatgtacaacctcatcttagcccaggttcactcaagtttagctttcgcctttcgttaaccttctttctagattcaagtgtgctagctgacctgaagagaaggtctcgtgcttgatggatgccctaatcacataacaaaactgggtaaatcacatattcgaaaccctaatccgggaaacccaaacctataactctaggctttgctataattaccagggattacactaactcaagaaatagggaaacacccaactaaggcactgaaatgatcgagaattgagaaaacgagttgcttggggaatctaccaaaaccggctaagcagttttacaggccctggcaaagtggttagccagtttgcaccaggttttccccaacaattcatttcttgctcaaaactcatccaaatgccaccaatctttacagattacctaaaaaatgtatacataacataatccaaccaaaacatcccaaaaaagccactgaattcaaatatgcattaaagaccccagtttaggtttctaagctcaaacttgcagaaatccaatcccatacaccaaaaccagctgccaggagctaaatctaactcaaataaaccctaaaattcgaactacataaaaaccaaaccgtaacagcccccaattttcaaaatcatatactcaaccaaaccttaaaattcaagaactaagaaatggtgatgttagggcttaccttggcttgattctctctgatgcccatttctaacaatgggacccacaactaatcaaattcataaataattatagaaatatcaaaaattagtgctaagtgccttttctattcaaaattactaatgcgttcattacaacaggcctaggtctatctgttggaatttattttacnnnnnnnnnnnnnnnnnnnnnnagtatgttgtttaacaccctacatatgaactttctaaaacga

SEQ ID NO: 35009 - DNA, 1672 bp, Cannabis sativa
  modified_base (188)..(194): a, c, t, g, unknown or other
taggttgtattgacttaagaataaggaaaatgattccttttcttagagctcttacaatagtatctatgaatataaactcttagatagattttttgaccctttgcccagtgaatatgaatcactatttatagggctataagcttgggagggaagtattttccttctggttacaattgatataagtagannnnnnncatagtaaatacagaatacactaatcgtgggattcggacagcttgccatatctctgtgatctaatcccaaagttaaagggatttcttcggtgactcatgatccgaaagttgaatttgttaagtgttagcatactatgcggatttctcactgcccagctaagaggacttcgtctgagcgaatgtatgtggcgtcctattcggcatatttcttgtgagcagatacatagagttgattccatgtgtcaccatcgtgtgatgccacgttagagtgcaaaaattgggataacatttgcccccaagtctttacgggacttctgaagttgcgtgtagacttcatccgagttgtctttgcatttggatgggtaagaggtcgtctgttcgcgattcgatgtgagagtgaccaagtgtctcttcattttttggctaataaatgctctgacgcaattaatgcttcaaaacctggttttctcttaccacatttgacggatatccttgattatctttgatttccaatatttgctttaggggggaaccgaggcgtctaaggcttttgaaatgattaccctttttcatttttctgcctataaatatgactaagcattgttcacaaattcatttttaccaacttctccattaggcaagctcagagcaaaaacagaagtttttgcctcaagtctgccatgaaattttcacaagaactatccaagcagcttcgcttagactgaatccagacgtcgatcagtgagtaagttctcgatttcttctccttttactttgcacatttattttctacatgcgttcttaaccttgttgtaaaagataggtagaaaaccctaggtttagaaactttacgatttttctttacaatgatttgtacaacttcacgattcatgacacttgccttttggttacagaatgtctgtctttcaccttgcttattcaaagctttgttaaatttttgccctaaacccaaaaaatttcaaacttttgggctttgacttatcgtcgaatatttccattctttaatctattgagtattcctggtcggcatattttcctgtttattgttcgatatcccgaccaaacattcatctcgtgtgttgtcttttgtagatgaaccctggtgagtttttgggaagcgaacaccgaattgaccatgatttgcttcaactcatgtacaaggattaccctcgtctttgttccagtccgccctcttcaagcaacggacgtttcaactcaatcttcccgtccagcaacagatgatggctcgaacaaaacaaacaatgcgtaaggttaacatgttcgaccctcacgtggcccaacacgctacattactctgtgctaaataggatctgcccgtccaggaggagggtgatcatgaaggggacactgaagtccaagagataaaggaacagagcgatgtccgtcctggcagtcttcccgaggcggaggaagaggaggctgcacctccaaatttt

SEQ ID NO: 35010 - DNA, 1260 bp, Cannabis sativa
aaaaaaaaaagataaaaaaagatgagtttgacttaaatattattttttttgactaaagagaagaattcattaatcaaaaccaaccaaatacaccaaggctacaaaaaccaaccctaaaacaacccaaataacctctacagccggcctatagcagccaaacaaacctctactgaataaggcgtaaaaacaagcctttttcagcaagcacaactttcctatccttcatgctatacaacatgtaatgaactatacctttaatttcttttacagttttcaacacagtataacaacgtgaattttttaaatattaatattatcgtatttttttacccttttttattcttatcgttggttgtgtgttggatacaataaattacttttgatgacatcatattaacttctcacatcatgatatggaacagagtgagcacgtgatgagaagttttataattttaaatattgatttcttttttttaaagtttgttcggactcaagatagaatagagtaaatttaataatttgtagtttgtatacttaatagtttgttttcccacttttttaggatttttttttgtaatttgttcaaatgtaattttgatactatataatttaaggtttatttttcattttttttaggattttattgatgtatgtacaaatgtatttatgatattatataccgtaggttttttttttcgtatattataaggttgtatattgtatagtatactataattttttgcatccgatttattttatcaattatatatttgatgattgatataattttgtttgccactaatatacatgtcattttatatgatgtaatttttgtaaaatcttttgtatatttttttttattattgagaattttatttgagcggttgttattttgatacagtatactttagggttttttattttttattttttataaaatatgtttgtaattacataggactgttatacatgtgcgtttttcatatgattatgatataccaaaaagttacttctatttttgaatctagtgttttttgtatccctttttctttggtcgaaaaacttgtattttgaattttggtaggagtacaataatattttgatctcatatcaaatatattttataatgttacatcacttaatggtagtatgttgtctttgtatgttgacataaaaactttttttatacagtattaggagaaatagttgtagcaagaaaagtttattttggtgagtacagccattgtgtgagagcaaaat

SEQ ID NO: 35011 - DNA, 1305 bp, Cannabis sativa
  modified_base (1233)..(1243): a, c, t, g, unknown or other
agaaacaaaaaaggtccatctcgggatccatagaatacacgagaaatcgacaaatatttggaaagggtagataatgaattattcaaagagtctgcagctcattgacccatatactcgtgagtatgttgaaagactagacaacaatccagtatgatttaccttgcaattatcatattgtgataacgtctcgtgtatgcctcactcaatattaatggaagaacatgagaagtattacttgaattatacttaggtgctaatttttatgttaaaacatcctaaggagattggttgcattgcaagaagaataaggcatagtataactacatatagattaggggtggcaaaatgtgttattgtgtcgtgttcgtgtcatattttatgtgacccgcttttatatttcatgtcaggcgtgtcgacccattttttgacttgtgtctaattttctcaactctaacccgacccgtaaaaaatcgtgtcgtgttcgtgtcaacccactgtgacctgttttactattattgaagctggagttgtaaaaaaaaactgataaatttaggttccatcagaaaacttatatacatttatatatatactttgttatatatataataaaaattaaaatttttaaaatattttcaattttattttaaagaaaattaaatttaaatctttaatgtaactttaaatcactaaatatatatttttaaataattatattattatgaataatttttatgttattatatttaaaaaaatcatgtcaaatgtgtcaaattcgtgttaagggggtcatgtcgtgtttgattcctttttatttcgtgtcaagtcgtgtcgattcgtttttgacccgcgtctaagtttctcgaccttaacacgtaaaattcgtatcgtgttcgtgtgccatgtcgaaacttgttttgccacccctaatatagataaagttaaaagagcggttgtaaaaagttatttatcattatcccatgtgatgtaaatgtaaaatatggggattgtccatgtttcacgaacgattacaaatgataaaattctaagagaataattgtcacccaaaactcatataaatagggacaatatccataaaatagaggacgaccaaatctgagaagaagagagtgtattaatattagtcttttattgaattatgtatacaaattataaatcctagaataagatggactcatggactatgaagaattgttatttattattattattatnnnnnnnnnnnttattattattattataatagtgcataagtgtttattatccttttttttttttttgtcaaga

SEQ ID NO: 35012 - DNA, 1031 bp, Cannabis sativa
caatatgcttgcatgacttacctcactctactaatgttaacaatccttcttcagaatcaaaaggactttccaggttgtaatgtcatggcttacaccatactagtgtcccaaggcttcaacattcttttttcctttgctctacaagttgtcggcgcccgcaatccttccatctgataattgtagaaattaccctctacaatattaatcatagatatataatctatagcttctataagtatttagaattgaaatgatgattttcttagagcttgacttaacgacataaattaaaaaattatattaatttactgaaatattatttataagtagctaaatgtttgaaggataaaatacattgaagggcaaaacggtaaatttgtccctattcgatgtaaaacatctatagagggtcattaattattatagagtatttgtatttagtatatagagtgttctatgtaatcgagagtgctattctgaatctacagtgaagtcaggaggaattaccaagttagaaaatttattcataaattttgagaaatgtttattgggagcttggttacataggcacatagtgtccacactatctgggataatatttcctcgtagtctcaattaattggcttattaaaccaattaaaattctaaaaaaggactatgtcttattatgaatttcactaagaaaaaggcaaatttgagaacaaaagtaaagagcgggtttatttgttaattatgatactttatggtaggggtgttcataaaatatgaaacattgaaactgacaatcaaaccgatcagaccgtaattaaatttttcgttccacgtcatcaccaaatttggcagtcggtttcagttacaatttttttaacatggcaaccgatttcagttttttaaataaaaaatggttaaaccaaaaatcgctaaaactgccataaagaacccataaccaccaaaaactgcccaaaactgccaaactaaaaaactgctaaaactgccaaaaactatatggtcagttttatacgattataatt

SEQ ID NO: 35013 - DNA, 1733 bp, Cannabis sativa
atactaaatgatatagtatatatatatatatacatatcatgtatatgtgtatatatgaacagacacgtacgtatacatgtttttggtatgtatggttgattttttgttgggcctatatatataaaagcagagatggtgatatgagaagaaagaatacaaattagttcttactcaactagtctaatcatgtctgaatgccatgttaaagattgacaagaaaaggttcgtaccttatcttaagcacaaagtatcaaagataagattagagtaaatctagctaagtggaccattttcatatatattttatttttatttattttctttaagagtttatatattaatcttcatctactgagatccagctaataaggtggggtttttgtagagttgtagaaatgaccaggataagttttttggggccaaaggaggtccaaaaaatcagtttgaaactttggagacaccgttggagtgttgtgctttttgcttaaatgaatgataattaagtgaagtgaagaagattgaaagttaaagggaaagttccaagctttggtgggtaaccaccctttttcttattataatcaatttgttgttgataataatattgcgttttgttgtgcctttgatttaaagtacatcaaataattataatgtgtgttgatatttctattaataatgttgatctatgcagttctggatgtgactaactgagacaccacaagcacaacattccctctaaagaaacatcatgccattacagtaaacaactatacatatataggaagactatgatacagaacattttatcgatacacattattaagtaatagtattcatcatctccattgtaccgtcattactataataattatggctaattattaggatttttgacccgcaactttgatatgtattaaattatactttcgagctttctgggttgtttaaaattttcttaaactatatattgagatggttggactctagaatttctatccaattctgttcattttactaacatggtgattgtacatgtactaaattgtctcccttgaactttaatatgtatcaaattgtgcctcccgaattttaacatgtatcaaattgtgtttctttaactcatgtatccgttagtaaaattagacagaaatcattgaatctaacaatcttaataaattgagaaattttttgacaacttgaaaaattaggagtacgatttgctacaagtgtcaaagttcaaggaattcattcaacgtaattgtccatgtactaaattgtgctgccaaactttaatatatatgtaccgaattgtacctttcaaactttgacatgtaccaaatcataccccttaacttttatgcacgttatatctattaataatattaaatacttgaatccaacattctcaataatttaaaaaaccttttaacaacttaaaaaaatcaaaaaatacaatgtaatagagttcaagtcaaaaatcttaactatccaataattaatattggtctagatcataccgatagacttaattttttttctctatataaatatatcaaaaagatgtttggcaatacagatctcttttgatgatttttcatattatttaatactctttttttcctaaaaaaatagcattaaaataagaaaaatttacaaatttatgtacattttattactaattataataaatgtacaaaaaagcttatttatgttataaaataatataaagtagatga

SEQ ID NO: 35014 - DNA, 1698 bp, Cannabis sativa
aaaaaactggttgtttaaaccaagcagacgcgatgcattctgttgttgaaaaaggattaagattgaagaagtacgttcgatataggcctaatagtagtccaatagtctatcaatttttttttttatgttttgcgataggtccgaagtagggtcagatagtggtcttattggggtccattttttatgtatttgcgttagtcccaataggattgatgtaggatccgatagttgtccgatggaagtccaattactggcttgactaatcctcacaatagtttttccaaataagctcctcataaaacaaccattcaccaatcccataaacctaattgtacgaacacatgagaaagaaaaccaattaacatacctcaaaaccatatctagaaatctagcaatacaatacactttgataaagctactaataaattaagtaaataacaatttcaaaacggactaaagttccatttagcaaatgatgaaatacagttatatccataatcgtagtcagctcttgttgtgctaatcttttagatccaaatttcagagttacaataatgtaaagcagctaaaatatgacctttttattaatagataatgtttttaacaaaggtgcaatccacatcacggcatccttcaactctgaaactttcttaggattgcgatcagtaataactctaagatttttccacccctactgttgaggtattaattcacttaacaaccaatataataatctaaatcgcaaccaaaattaacgtaagaatccacctacaaattaatggagcaactaccaaagtaatccaaatatatttaaaaaaacaaaagttaaaaaataatatattggtaattttcttttttctacttcatttttatatttaattaatgcttcaagtcattttttttttcttaaaaagctttacaaaagagaaatttcattggcatgtcgacttagtttaggtacagtttaatcgggcttgtattttattattgcaattcgaattttgctattgtaattagtcttatctttgtcatatagttttgagtgttttatttttatctatgtgacatagttttgagcgttttaatcttgtctctctaacatgatttagagtgttttagtcttgttcgtatcacttgattttattttgtttcgttattggtttttccttaatggctcaccatcacattattgttagtggttagataacaagttctctgtgattgaacaggttgttagtagtgcacttacgtaccttacataatagttaagtgcttaaactacaaggttgaatgaatatgttgcaacagtttctattgttatgtcttttgagcggtggatgaaatagaattaagtattcttaaagttaattgtgatgttgtaatctttttcatctgattttattttagtttgtttgtcaaacgatttggaaattaagcaattaattatttgactcgtttttctaattctgatcctgatcgtatctccaacagaaataactaccttaccattaattcccattttttattagtaaacatgctataaaattagaaaatctaatgaatccatctttctctttctctcgatctctttcaaatatttcattgattctatccataccaagaattagttataaatcactactttgaccaccttttgaaaaagagagttaagtcacatatatgactttgtgctcaaaa

SEQ ID NO: 35015 - DNA, 1488 bp, Cannabis sativa
tattcaaggactttctcgataattttgtaattgaatttatcgatgatattcttgtgtactcttggtcagaagcagaacacgaacatcatcttcgaatggttctgcaacgactcagagattataaactctatgcgaagttcaaaaagtgtgagttttggctgtcacaggtatcttttctgggacatattgttggaaaagacatgataatggtaaacccaggaaagattgaagcagtgaagaattggcctagacccaaaatagttactaaagttcgaagttttctcgatttagcgggttattatcagcgttttgtggaaggtttttccaagattgcaatgtcgttatccgagctaactaggaagaaccaacggtttatatggtcagataagtgtgagggaagtttccaagagctgaaacaacggctgattacagctcctgttttagccttgccgtctgatcaagagaaatttgtggtgtattgcgatgcatcaaggcagggtttgagctgtgtgctaatgcaggcagataaagtcatagcttatgcttcacgacaattaaaagattatgagccacgttacccaactcatgacttagagcttgcagcagtagtgtttgccctgaaatttggcgacactacttatatggtgagtggtgtgagatctatactgaccacaaaagtctcacgtactttttcactcagaaagatctgaacatgagacaaagaaggtggttagagctagtgaaggactatgactgtgaaatcctgtatcatcctggaaaggcaaatgttgtggcagatgccttgagtcggaaaggacctgatcagatttttaatacagtaatgatttctccttagttagcctcagagatgtctagggcaagcactgaatttgtgattgagagattgcataatctaacacttcagtcgaacttgttggaaagaattaaagtggtacaactagaagatcctgaactgcttaagactcgagatgatgtcttagcaggtaaagctaaggactttttgatatctgacagtggaatgctactgtttaaagcacgagtgtgtgtccctgataacactgaacttaagaaagagattttggatgaagctcatactaccccttactcattgcatccaggaaccaccaagatgtatcaagatctgaagccatatttttggtggtatgggatgaagacggatgtggtagattatgttactaagtgcttagcctgccagcaaattaaagcagaacatcagtgacctgcaggattacttcagccattatcacttccagaatggaagtgggaggacattgcgatggattttgtggttggtttgcccagaaccacgggaatgtacgactcactttgggtcgtagtggattactttacaaagtcagcacatttcttgcctgttaaagtaacctatacagtagatcagtatgctgacttgtatgtgaaagagattgttcgtcttcatggggtacc

SEQ ID NO: 35016 - DNA, 2017 bp, Cannabis sativa
tatataaatatataaagtgacatgatacatgcctcaagctttgttcgaaaggacacaagttggtaataaaaattagttctcaaaataagatatttaatattataattacacttatattaaatatatattatattatctatatctattctacgtatagatatattaattagtaccaataatcgagagattgataccgatatatataaataataaatatatataggtgtatgtgatctatatcatacttcatttaataattaataaagtaaatgaatgtgacataataatatataggaatagctggtggcaattttaatttattattatatatattttaactccattgttcggcctaatcataatgaattgtattaattattatctaatttattaaatttttgtatgcaaacaataaaggcatccatttacatgccttaattatttgagtaaatttattcatttaactttctttgttgatcacttgataaagatatagttatctttaaggagttgtttttattcattcggctttattttattacttgatcataattagcctcaattaatattgtattgttgatattttttgataaattaataagttgtaactctattatttatttttatatattaaattttttgtaagagtgtgtgtatggaaataaatatgtaattactaaaatgtattattagtacctagtactattctcagtatctgtatttttatttgtataattaagtattgatctcataacttaagaaaattattaaatatcactaactaattatagaatgtcacctataaaatgtggtgcccaataacaatgcgcatctatttattataattaattgtaaaatataaagtatatttgaatgtcaagtatatttaaaaatcataatattatgattttttaaataatttatttatttttaattttttttaaaaaatttaaaattatgatttggactaataatatgttaacatgtggcagttttgatttagtaaatgaatgcgttaagaaaatgattaatagacttttgatcaaaagggtgattttagagactattgccgctatttttcgaggttgatgactaatctgcataaaagtgaactttgtgaggacttttgccgcaaattttcctaatttataatataaaaattaatgttcagatcgtctatttcacacatttataaaataaaaaagtaacacatgtaaaattctttgaacatatttttaaatttctcaaaatattatcacatgtctttattaattacaacgtatacgatcttaaaaatatttttgactaaatattttttaaatactgaaacagataaaagtgcatcaatatatttattttaaaaaatttattgtaataaccaaatatattgtaattatttaagacttttcatttgaagttgtttggaagggacgaacggctgaaaaatacattaataataatttgtattttaattttaaaaataatatatgattatacttttatttaacttttcattaattaggtttattagttgttagatgttactagacacaagatatattttcatttaaaaaatattggatatttatagatcgtagagactacttttaatttttgcccttcacttcataaataaactacctttttattataattatttattttcttttcttttataaattatatgaaaagcaaggtatatttaagagtataatttatatgaaatgaaatcgcgtacgtacaaagtaagtgtaagaaattaatataaagttcatagtgtataattagtcataaagaaaccaaatccaatgttctataattaattaattaattaattaaaaccattttattaaccatataaataattaaaaatgtaaacttgggtggaactaccgttattaaatgcttttggtaccttcctatatataccgatccatatattatataaatatattatataaataatatatattttcgtaccaaacaaataatattgcaaatcatgcatcaatgccat

SEQ ID NO: 35017 - DNA, 903 bp, Cannabis sativa
gaaaataaaatgcaatcgctcctattttaaataagataactgccatatttgatttagtctttgtattatataacatgcgtttgctaaggagcttgattgtttgaagtgtcgtcctttagaaatttgccaatacttatacttcgtgtgacttatctctattggagaacaaattgattacattttttaggtgatgaacaagagcgagcttaagcaagttaagcctctcaatatatataatgtcaacatcaagattcttcttgaatgtcttatgagcttaggcccctcaattgcgtatcatgagtatgttaagcacctaacaatgaatgcttttaatatcaacttatcccaaggagatggcacgtgagctttatattgcgaggaggatatatattaatatctctgagtgttttttttaaacgaaaataatctttatattaaacagaaatatctgctaatacaatggactgaagagcaaggggaacatcactctcagtaaaacgacgacttgaccaataacaagcaccacgtgccatacagtgtgcggttttgttagcaaaccggttaacatgaccaatagaaacactacttaaagaagataaaatagattgacaatcttgaataaatagaccaaaaatataaggcatagaaaccgaactaagaatagcttgaacaactaaaatgcaatctgtctctaaaatgacatttgacttgttattcttctttatccaactaattacctctttgacacttagaatttttgcaatctcgggtttgcaactgacagaagaaatagttgaaaatgcctcaactattcgaccatcacagctgcgtgctacaaacccagtactaatctcatttgtgtcttcaaaaaccgccccatccacattaatttttaactgtcca

SEQ ID NO: 35018 - DNA, 1056 bp, Cannabis sativa
tattgtattagtattatttaatcaatactatgtttcgtattgacttgtattaatagaatgtgtaaatttataatatattttcaataaactcgaccccaacaccgactattggtcgggtccgggtcttagatctggatccaggttcgggtccggatccgggtccggttccctggttggattccgatcccaggtctcgggtctgggtcctaggtccgggtcttgagtcctgagtccgcgtccgtgtctaggtctaggttcgagtctgagtctgggtctgggtcccgagtcttaggttcatgtttgagtctcgggtcctggtctagatcctgggtctcgggtctaggtcctaggtctgggtccgggttcgggtcctaagtccgagtttggattctagtcccggtctacgtccgggtctggatctgagtccgactccaagtccaggtcccaggtttgggtcctgattcgaggtccgggtatgggtctaagtctgggtactaggtcctgagtctgggtttgggtctgggtcccgggtctccagtccgagtcatgggtctccaatccgggtccgggtctgagttcgagttcgggtcccagttttaatcggggactgggtcagagatcggggttgacctagatcttttgtaaatattataatacaagctaatacagactatttgttatgtattaaataatacaacttacattgtgttaaaaaatttggtcgtaataattaatacaatatactattctattcaaacattgtgttatttattatttaatacaatgcgactgttatacacttaccgaataagccctaaaagtaaataataattaagaacaaaataataaaataactaaaaattaattaacaaacaacgatttttattaaaatataagactcagagcatttatttccctatttcaaactataaatcttcgtttaccaattattccactttattctggagtttttagtttcaagaattctaatataatctattaacctctcttgagtgatgatagaattaacctaattaactaacatgatatctctat

SEQ ID NO: 35019 - DNA, 1990 bp, Cannabis sativa
ctagtcctagtccgattccagttgcagttgcgattctgagtttgactttgggttctgtctggatttcggtctaggtctaggtcaggctccgggtgtgggttcgggtcctttctctgggtccaggtctgagttgtagtccaaagttttgatcccgatctgagtcttggttcagttgcgggtctaagtcctaggttttgatctcagtttgggtcaaggtccaggtctaggtttgggtctgagtctaggtctgggtctgagtttttttcccgggttcaggttcgattttgggtttgggtctggggaaggttttgggtctgagttttggtatgacttcggattcccaagtccaagtcaggtcctggttcaggttcgagtctcaaattccaattttggtctggttttcggggcctagatccctattctaggtcccccatccaagtttagttcttaggtttttatctgggttaaggttcgggtttgggtctcgagtcttggtttgagtccaggtccaagtccgcattcagctctaggtctcggtcccagtcttggtcagggttttggttcgggcccctctcaaggtctggatcctggtctgggtcttggcgagggtttaggaccaggtcatgtctaggtcctggtctaggttcgggtcacaagtctcaagtcccagtcctagtgaaggtctcgatctaggttctgatctgagtttgggttatggtttgggttcggttctggtctcaggtctgggtcctagtcacagttccagttctaataccgagtctaggttttattttacgttagggtcgtggtccaggttggggtcagggtctgagttttagttcgagtctgggtataggttttttggatcccaggctgggtcaaggtctgagttcggatcccaggtttgggtttggatctacgtctgggtctgagtccaggtcctgtgtttcgatcctagtctgggtctgggttagtattcggttctgggtctgggtttgtgtccatgtccaagtttgaatctaagtgtatgttaggggcttggtctgggtcgggatcgagtccaatttttggttcggggtcgagtttgagtctcagtccttatttgggttaggggctgggttttgaacttggttttactcgagtttcggggcttggttatggtctacttttgggtttcagtctaggtacaggtcctggtcacggtcctggtcctgttccagggttctggtcatgttctgtttcatgtttcagttttgggtcccatgtctaggtcggggactaggtcttggtccagctttaggtccttgtccgagtcaagatcaagacaccgactatgggttttgtccatgcctcgattcttggatctcaggataagatccggatcccaatcatgggtcccagtcttatttcgattcatgtcccaggtcccggtctcggtctaggttcgggaccaaaaatagggtgcagttttgggtctcgagcccaattctaggtcctgagtcctgttccatgttagggtctgagttcaggtctgggttcgggtcctaagtcccagttcgggtttggattcaagtttgggacccaatcccagtgtgggtctgtgtccgagtccgagtcctagtcctgttacagttttgggtttgggtccaggtcctgctcctggtcttgttcctaagtcccaatcttcttctagttttggttccagtttcaagtcacggggtacgggttcaggtcgagtttgggttagactcttgtttcggatcttgatttgggtgtggggtgaggtttaggtccaggtttcggtcttggttatggtccgaggttgggttctcttcgaatttcaggtcagggtccaagtcccagtcctattccaagatcccagtctggttctagttcaggtttcagttttggttaccgagtgtgggtctgggtatgtgtttgggtcttggtttgagtttgagattgggtttagcttctgctctaagtctca

SEQ ID NO: 35020 - DNA, 1359 bp, Cannabis sativa
tagtaagagattacacttttctcttttatgtgcctacctcattgttcacatttgttttctcaagaagaatttatcacatttatttatgtttttcttttttttttctcctttcttctttctttttatagtaaaggcacatcacgtaacaaatttttcaatctcttactttcaaaatatttcccacttacaacacttcattccccccaaacttgattaaaagcttatggcataataaggtacgttgagaatgaacgtatttaaagataacaaattaagcttagttaagttgtgagaagtttgaaacaggttaaggctcaactttgggtaaactaaggataaaacttttcaggtaagctcgaaaggctcaaacgatccaaagaaaaatttgcctaaatcattttccaagtaaaaatcatcaaggatttcgcttcaagagagtatgtcacacaagttctattccatgtcaagtcatcattccacaatccacgtagaataaaagtgatacacatcaaaagtaaatgctttacatctaaatgaacaaccttcttacacaacatccaactcaattcaaagagttcatgactcaagcacacggttaaaattccaatccattgtacaagtaataacagcagtagttcaatcaatcttccagctcagatatcaacacatgacactaacaataacaaagactaactcaaaaacgaaaaactgaaaaaaaaaaaaaaaactgtaaaaaattcaatctctccccccaaactaaagatacacattgtccccaatgtgttaaaataaaactgcggttgagagagacttacctgagccccagcagaaggggtttggcggagactgttgtgatgcaggactatcagtagccttcgactctgttgatgttggggttggtgccggttgatctttaatttcttcatccaatggctgtaccatgtcaggcccctcatatttctttccacttcgcagggtgattgccttgcagttttccttaggattcacttcggttgtactaggcaagtttctctgaggacgacttgctagttgccccatctgagtttgtaagtctttaatggaagatctcgtctctgtcatgaattgcaataataaatttgtctaaagaccagaatttccactagagctttgttgctgagtctgttgttggttctgtgactggttctgatttctctattgatagaacctactattccttcgatttcctccttgattaaacccatagttgttgttgttttgagtgtcatttccaatggcttttgcttcatccattggcaaattatttacatcttcttgacattctgaatagggatgaggacctccacatagctcacagac

SEQ ID NO: 35021 - DNA, 1379 bp, Cannabis sativa
tgaaatagattttatttaaggcacaaaacccaacaccgtacccccatggaacatacactgtcaattcgggataccacctcgcccatgacattatacaccaacttgagccctctccctctatcacaactcaccaaaagaaatggtggaagatgacttggaacatgaagatacccttgaaaataaaacacttcatctggtgagcttaccatgatgctcttcctactagtgtgaacctctactgccatcatgtagtaagatcctctacttgttgtcgatgcaataatcacgaggaaaccttagcacatgctttgtttagttgtcacttcgtccagaagtttcggaaattaactacattttatgataacattgttaaattaaaatccttaccttgtcatgatgttttctatatatgtactgatattatgacacccaaagaatttcagttctttgtttgtcttctttggaaagtttaacattgcaggaatcaagtcttacaccatcaaccaaaccaagatgcctcaactcttatccagtggatggaagattatctctaccagtatcaccagaacaatgacggcacagctccactcaagtttcaagatggtagtcagcccccatttcagtggcaaccaccgccaatcggtcacctagaactcaatgttgatgcggcccaaaacacacacgagaacagaatggggtttggaatgatagttcgcaaccataaggcagaggttgttgctgccttggctatcccctggaaaggaatacaccaaccgtttataatggaagcgcacactcttcaactcgctcttgattggtgtcaaaagaacttaattggggtaaactacattgaatctgactgtcaaactctcattcatgcaatccattcaggttgcaccattaacatccatctgcaggagcttcttgacaaaattattagcttactctcttctcttcctcaagcttcgattggccacatccgacgagaggccaactccgtcgcttatctgctagcaaagtaagctttaggcctagatcagtaggctattgattacctgatctattcattcagtcctttacttgagattgcttttggctacatatctatttctctttcaaaaaaaaatatcttataattattatttttagggataattgcggcaaaagtccctaaaaacttagggttgatgcagattagtccccaacctcaaaaattggcggtaatagtccccaaggtgacattttctataagtccattgatccctttttaactgatctattaaacccaaataaagtgccacgtgtcaattttttattgggccaaataataattttaattaaaaaattaaaataaaataaaaaactaaaaaatatatatt

SEQ ID NO: 35022 - DNA, 2098 bp, Cannabis sativa
agggaagatccaccattggtgcctgcccctgaaggaaggtctcatggtcgacagcccctagggacaacaaccgaatctcgtctctggtattatgctggagagagaggaccaagagttggcaagcctacgattggggagcctcaagtggacttgggagaggatctcaagatagtcagactcagagaagctgtaggccaagccggcgtaactgaagaaccacgcgctgctaattgtgatgtatttctcattagagacaaaaattcctgagatagatggatgaccaagagtacatttttcaatcttactacgcagagttggatcgctgcatcagagaggccagcaatctgataaggcagttcactcggagaatgatggaagaggccaagatctcatcagagatccacttcaaggaagacttgttgatagattagggagggtctatcgacaagctaactaacctggttcctcaggaactaggacagatctccccctgatagagggaggatagacctttcctcaaaggtttaatgacgacaacaaccaaatcctagaatccaacagcataggttgctagctagggatctctcgctcaccaacacccctattgctcagcctatggctagccagccaccagcaagaatacccttcgtcgaccaaaggacaacacttcctccctaagaggagtgaggcgcccagaggtcaattttcaattgacaaggaccaggagcaggtggaaacaccttgaacggcaattcgcaaagtgaaactcttcacttcatctacctagatccaccaaactctaacaattattgtgatctacctcctatcaatgcatagccaacatcagtcaactgaggagtcatgggcagtcaaaccttgccttttataagtctagccagccatggaagcattgtgggcagctacaccctgccctttgcaggtctggctagccatgaaggagcaatgagcgaccagaccctgcccaatgcaggtctgaccagccaaggacaatagccaagtgtaggctttggctgctaaagccaacacccgtacctaagaatggtcggctagggtctacaagtcagcacaggtctgaccaaccttcaccataccctctcctagagtacggtcagctagctcttatcttttacggaatctgcaacccctctaaggagagccagtttgtcaagtccccacaacaacagatcctcatttgctaggatagttagaccaactcagggacatgatttaaggcatagctggtctgaagccttcagaccttaaacttgatcggtcaaatggatcaccattctcaacatacataaatgccttgcccttgtaaagtataaagttcaagatgtcgttatggaagatttacaccaagtgagaagacccattggctcacatcaaagacttcgagatgcaactcaatatctagaaggttattggtgatgtgtcatgttgcatattcccacactttgtcagaaattgctcaatagtggtacttcaaactcaccctaggaagattcaactcttgggtcgagttctcatgagaattttacacacaactcttgtctttgagacttgtactatcacagctacaagatcttgtcgaagtcaaacaatgacatggagaacctttgaaggattacatccagagattcttggcagaggctaccaaagtcaaaggccatacagaagaaggtcgatatacaactataatggggggcatactcccattgagttacttctagaaagacatttggaggatctctaccaacaacatgaaggagttctttgatagagttgatggctttatcaaacttgaagaagacatatgacatgcctagatggggcatgtcaataataggcagtcacgaaacatcctggagtctcatgacctgccaggcgcacaagaagatgccaacaactctgcccagatctttagtgggaaaaacactagaaacaagcacaacaccaacaactctaggaggaacactggaaaaaaggggaagtttaacacttctaccataccacaaaagaacaacgaggagaagtacacctgtttaaccttttgacagataaacttaaggccatc

SEQ ID NO: 35023 - DNA, 2014 bp, Cannabis sativa
  modified_base (593)..(615): a, c, t, g, unknown or other
attattttatgtctctgttatactcattttaagcaacaaaatggtactgacacgtgtaaaaaatcaactctcgtgttataaagcaattaaggcattcaataaactcgccttgaaaaatacatgtgctagaaatattttaattcacccttttaaagataaggacgaactatgaataataactaccgattgataagattggtgagatgaacgatcaacttagaagttcatctcaggaaatacagaatacacaacagaatgacaatacttggaaagggtagataatgaattgtttacagagctggcaggtcattgatcactcacatactcgcgctagtatgctaagagactaagggtcacattccagcatatgattcatctcggaactgtcatactgtgatgatgtcttgcattttcttcgctcaacacttatggaagtatccgagaactattacttataaagtatacttatagtttaacacattgaaaactacgttcaaacagtatgttgtacgcgtgactattttattttatacacgtgtaaaatagactgtttgaatattatttcttacattgtaaattattctgaatttttnnnnnnnnnnnnnnnnnnnnnnnatagctataacgtacatgaatatataaaaaaaaaattaaactaaaaaataattttaaatgccgaaataagtaaatggtctatctaaacatcccttttaaaggagtgcattgtataatggcccatattttttttggtaaataaagtgcactgtagttataatatttagctaggaaacatttgagagttcaaatgcacgtttttgataaaattagtactatatttttgtaaaaaaataaaaatgcagcactatatttaatcttcttcttcacctacatcacattcttaaaattttaaaggtaataatatatcaacttgaaaactaaatcaaatgatagtatagttttggtaatatttttatttttttaattttttaattgtaaaataaaagtagaattcttattttttaaatttaattttttaaaaataaaaaacaaaagtgtattttataataactacttttggtttttaattttttttatctaagtgagtaatataaaattgagttgtgaaaaaatgactggtcgggtccatgcaagtcttaatccgagtctaagattcgagtcgtggtccaagttgtttaggtgtcggattcaaatctaaaatattaatgatagacaatacaaataaattataattaaaagaattatttcaataaatttcgagagtgacttctttaaaaaaaaaaaataaaattttgattctaaattttaaaattaaagagtgaagcaaaatatgttttttgaaaatatctccacttcagaaaaaaaaaaataaaaaaaattaacttgttaaaaaagtgagagaccgcaccttattaaatacaataaaatttttgaacactactcacaaattgattcatgggtaattaatttggttcagaggtttctcatgaaatatatatttcttccatgtgtagactatgtagaatgtagttcataaattatgtatatatgctattctgaaattgaagattgttttttccaaatgtaattttcattttattgattgtattcacattgcttttgtggataatctagttagaagaaaagatgtttattttggagggttttctcccatgaaccctagttgtttctaatcctttaatgaactgatgttccatccaaaaaaaaaaaaaaaaacatcaaccctcaaccctaaaaccccaaaaaaaaaaaaaaaaaccaatacaaagaaaatcatattagaaaaaaaaaaaatcaaaatggtcaccaaccttgacttctaatgataccagttgtcatccctgttgttgcttaacttcatttgaccgttgtcgcgcgccctcgttgacaacttcactactaccattggtttccatcgcccacaacaatttttgattgatctcacgtgagtctcttcaatttcaatatcacaaaa

SEQ ID NO: 35024 - DNA, 1678 bp, Cannabis sativa
agtacttgcatccatcaatagtagaagtactaaaaggaccccaaatatcaacatggattaaatcgaaatagcagaagaaacattgtgattggacacaaagggtaattttctttgttttgcataatgacatattgagcaatgaaaatcatgagatgcattggaattgaattgcaaggctttattcaaggaatgatgtttgatacaagctgaatgtcctaatctgtaatgccagatagtatctggtgtaatcttagaatcagtaatagaaaacacaaaaggactatgatttgcaacatcagattttagaaaataaagcctgcctattctctcacccatcccaatcttctgcttcttcaaattgtcctgtatttcacaataatgagaatgaaatacaaaagagtaattgccagaatcagtaagagatataacagaaaggaggttgcaatgaaaatctggcacataaaggacattaaacaaggataggttgggtgaaagataaacagttccaatgcaactaactttagcatactgagcatttggtaacttaacagatgtaatagatgaatcatagtaggtatttttgagtaaggaaaaatcattgcacacatggtgagtagcaccagtgttaatgatccatttagaaatggaaacaatagaatccttaccagaaaaatgagacactattggaggctcggttgtggaattagatggggggtctgaactcctttgggacaacaatgccatgagcttttgacactgtattgtggttaaaccagcaataaggtcttgatccttgccagaattatctccactattgccatcagtagtctcagaattggtagaaaagtttgttgcagaaggctttattgaagtgttgttacctcgattgtcatttctgctaggaaattttccatgtagcttgtgaccaggtggatagccatgaatccgaaaacacttggacatcgtatgacctgtaatgccacaatgagtacataccatctttggacgatgtggctgaacatttcctgcaaactgtccacaattagaactagatccagatccattcttgtcatcctcagaagcagtattagataaacatcgctgactttcttcttgtataacagaagcataagccttattgatgttggggagtggatcttgcatcaagatctgagatctagtgctgctgtatgactcatttaatccaacaaggaattcaagaacacggtcttcctcctgatattcttgaattgttttcatagctccacacgtacaagcaggctgtggacgatactcctgaatcaaatcccataaagattttagtctagtgaaataagtagtaacagatttggaactttgagccagagattgcttcgtgcgtatagcttcgaatacacggggtgcatttttttgattgaatctttcctcaagatttgtccagatgtgggtagcattatccatatacattacactttcatcaatttcacttgaaattgcatgaaaaatccaggagatcacagtactgttgcatcgattccacagctcaaagtcatcatcatcttcttctggtgcaggaagttttccattgacaaacttgaatttatttctggccacaagagctactgtcatggcacgacgctatgaactgtagttttcacatccagtaaggatcttagga

SEQ ID NO: 35025 - DNA, 1682 bp, Cannabis sativa
ttctgggcagactgttgaagcagtgtagaagagaaggcttctaggtatttttatttttttttcaagatattatagatgaggatttttgtaagagaaatttactagggttttttttttcttttagttttgggatatttgagtagagttttgtttgttggattggttagatcaattttctcttagtgggaatgtttttgagctttaagtgggtgaatggttttgggtgagaaatttttttgagatttttggttgaaattttttttaggtttgggatgcctctgttaagaacacaatggagaagacgatggtgagggagatgaagatttaggtttttaattaatattattattatgtaaatttaaatttataatcaggtttaattttaatttttatttaatttaatttttttaattttgaaatgatttttaaatattttaatgaattttaaataataaaaataataattaaataatgtggactaatgcgaagatgacatgtgaacacttacatatcactcaacgaagaggtatctacgaaacttccaaaatcctaacaaagatatttttaccaccaaaatttttacttgagtatttatctgcaactttgaaataaacttagatattaatgctgcaaattactctttactaaatgttaaaactgagagggacaaactagcttgaagaaaaaaatgaatactcaatgctctaaagagtgttgtccttagcattctaaaaaaatgcagtaattattatttaaaaaaaagtacaaaaaaaaaaaaaaaagtacaaaacataaaccctgttaaagagtgtgttttgatatgcttagggtttaagtagaagaagaaaaaacacaaactcaacatcccaaacccaatccaccatgaaaccaaaaccaaaacctaaatcctcaaaaaaatctcaaacaccagcagcagagattgaatcagaatcaacaccccctgacttctcattcgccatcgccaaaatcgctgtagctcagatatgcaacgcagcgggcttcaaatacactcgcctctccgccattgataccctaactctcgtcaccacaaactacatcgaagctatagccaagtcctccgcctccatcgctgctgcctcaaaccgctcccaatccaacatttttgacatcaccaacgccctccatgacctcgaatcccaccgtggcttctcaggcgcctccaatctccaccgaaccaactactgccttctaacctcggcccttctcgccgagctattacacttcgtcgattccaacgttgaaaccccgttcgcaaagccaattccgcggcggcgattcttggataccaatgccagagagaaatcaaacccgtctccgaatccactccgagctccgcatattccgaattggctgccgcagcttcccgagtttgccaaatgcgacgccgtttcgagcagtcatcataagaacggggaggaaatgtgggagaattgtaggggtgagagcggaatgggtatgggggttttgatcgcaaatggggatttgggagtgacgaaatcggagttgggattgggaacgaaaagaggaagagtgaggtttaagattggagataacaggacaaagaaacatgaggttttgaaaggagggaaaagggtgtattgggatgatactaatactacagatacaagtagtttcaataa

SEQ ID NO: 35026 - DNA, 1390 bp, Cannabis sativa
  modified_base (675)..(687): a, c, t, g, unknown or other
aataaaatcactcatacaagattaatatacaaactaaaaatctatttatattattatgattggccaaaattaccctttggctagtagcaattcattaacacctccattaattcaaaaactgctcaaaatcaaaacacatttaataggaatatcaaataattcaaaaattagctagtatcttttaatttaaattatactaaaatttctttatattaatccaattactattcatccatctcgctcttaacgctacttcgcaaataactttacaatatgaagaacactgcgagaagaagaatatctatacttaacattttttctttcaaaaagatagataagaaggataactcacattcagcgagaaacaaccttcttagtcagcataatcatttaaatgatagagacaaaaaatagttgggtagttattagatatcccatgtggatataaatgaaacgtgaggaatgaccacgtttcatgagcagtagtaagtgagtagatctcaataaaactaaaaagagacaccaaattgagagagaatactattatttacctttattgagatttatactctgtatttaaataaatatcctaataaaaaaaactcgtggagtatatagattttaactacaaaatctcataaaatatttagagtttatttattattattattattnnnnnnnnnnnnnttattattattattaaattctgtagtattatatttcaagaatctggagtaatctacaactatgttcttattgctctatgtggattatatgacatgctcattatgagcaaagacaaatatgtgatcaaatgtgtcaaagtcaagctcaagagagaattcgagatgaaggattttggaccaattcaaaagatcattggtattgaagtttcaaggaacatgaaggaagggacaatcaatttaaagcagtatgggtacataaagaaagttattcagacgctcaacatggaagatgcaaagagtagatcctttctgttaggcagaacatttgttttatcgaaggaacagtgtccaaatagtgtgaaagagaaagagaaaatgaaggatgtaccctatgcagtaattttaggatgtttaatgtacgtgatagtgagcaccagaccaaacatagctcatgctctaaggatcctaagtcgattcatgtccaatccaagcatcgaacattggaaggtccctaaatggttattaaggtacttaaaaggcacttgggattatggtctgacctatgaaaaagcaaaaggagaattggaattgaaagggtttgtggatgctgactatgtctcgaatagagatatgagtaaattaaccacttcctatgttttcatgacaaactagaattgtatatgctggaaggcccagttacagtc

SEQ ID NO: 35027 - DNA, 2264 bp, Cannabis sativa
  modified_base (1900)..(1900): a, c, t, g, unknown or other
ggagtcattaatgattttccttcggaccaaggaagttgctactggtagagcatcatggtagactcgccatgcaaatattttaactttttgaggaagcttataaagagcccaaaagaagttccaccaggaagcatccgaagaggaggtggagcagtcacgttcatctgctaatgaagcagcaaaataatatccagattgcacagtataaagacccgaattgtgatggtgccaaagtaattgatctccacttgggaaataacttagtggtattgtaagtatcctgtcaacatcaatttgggagaaagatgtctgcaacatagcttggttccattctctattttcagtgataaaagccgaaactgtaatagtgtgtgaaccagaaaaaaacataggcaggaaagaggtgtgcccaggaatccacgggtcagttgcacacttgatggaatgtccttcaccaaccttccaacgaaggcccttagcaagtaaatcctttccccaatgtatcccttgccaagtaagagaaggggagtgtccaagagaagactctaagaaagagttctgagaaaaataacgactcttaaggattttgccaagtagagaatctggtttatcaagaagcctccaagcttgtttggccagcaaagcttggttgaaatgctcaaaggatcggaatcccataccaccatcttgctttcgctgacacaaaagtttccaagaacgccaatgtattcgagagccattttcatttaatccccaccagaagttggccatcatagattcaagttgattgcagaaatacatcggtaaacgaaaacaactcatagcgtaggttggaatagattgaactacagctttgagtagaacctcccgaccccccgctgagaatatcttttcactccaactgttcatgagtttccaaactttagctttaatgtcactaaacagctcttttttgtctctaccggagtaagagggaagacccaaatatcgctcatgacactctgaaatcggcatcaacaactgcctacgaaagaacaattgagcagctaatgtagtattaggagaaaaggacatcacagacttatcgcgattgagaacctggccagaagcacggctgtaagtatccaaaacccgtttaatagcaagacaagatcgttcattagcttggcagaaaagaagactgtcatctgcaaatagtaaatgagataccgaaagagcctgacgagtaagcttgaacccaagtttcctaatttatttatatatattatagtttaagaaaaaaatatatcaatatgatagatatattttaatttatttatttatttatagggtataattttttattttattctattcaaaaaaaaaaatattttacttttttttataaattgatttcttttttagaatatgaggtataatttttttaaaaaaaaaaattgaaatagtagatttttctattgaaattattattattttcacgagattttttttttattagtttttacaattctattttacaattaatttttcaaatatgtaaagaaataatatttgtacgtattacggtatgagcacatatgtgctaccatcgaatatcttttagtatcttttttttttctttaaagaatatatgcttttttttttgtttgtcctttcttttttccactaactaatttaatgtttttcatatctgtttacttttaattaataaaatcatacttttcaaaaaaaaaaaaataatgaaatcatacataaaaattacagagaatttatgtagaatgtaatataaaagcttggtgtaaaataagataaagtttagtaatgtattttacttcatctattttttctaagtatattttaaatgatgagttttttcagttttaacaaaaaaaaaaaaaanaagtaacaatattacaaaaatatttttagttagccaaataaaaaaaaaatacacaaatacctcttacacacacttttcaactcacgatacatgcttcctggaattgaaacttgtatctgatgcaaccttcaaccacctacctacccaaaacaactaaagcgaaatccaactagaaagagaaccaccattaattccggtaatttcacatgagaagagaactggaattaaacaaaacaggggttgtttcgaattcatgaaaaaaaaagtacagaaaaactactacaaaattgaaattcaactagaaatccagtttaatttgcataaaactaagggcattttacataaatgtatacatttttttaaa

SEQ ID NO: 35028 - DNA, 1825 bp, Cannabis sativa
gattggattggatcggatactttttgaacacccctatgtatattgtgttaagttttcactgttgttctacggttgtttttagttgttccactgttatttttagttttctgttttgtattctattgttgttttataaaaatagagtatttttgaaaaaatttccgtgtgacagtatttttgtaaattttcctatataaaactaaacctaataacgaggcccagcccagtaacacctaaatctcaaaatgggtcaaaaatgtttttaactagaagcccaagcccagtaaacaggcaatgaatgacgtcattgccgtaggaattggtggtgttggaaaggccaactcgacaaaactaatattccaaactttgcgtgtaagcggagcgtaagacacgtcatcctttatacgtggcctaatataattggtaaccctagtcaagtgggtttggtttggcctgaccaagtcggtttaggatttatccatttccttctttttttaaaaaaagaaatatcagagaaagtcggtcaagttgatttataaattgcctcttacccttcatctttcatcattactactttctatctaagcaattctccacaagaaccctaatcccttctcttcgtacattcaaggtaatcaaattcttgcttctgttatcatcatcatagaatttttgttttatttaattgaatcaactgtatcatgatattcgctttcatttaactttagggtttttttaattttcgtccaggttgaattttatctttaattctatcgaataattttttgatttttactttatctggaaagcgtgtatcgtattttgaattttatttgtgtatatataaataaaattgaacgaactgtatcagtgatcttgggtttcatttaattttaggttttttaatttaccgaataatgtttggataatgatacttctttttcatttgtcaaattggtcgtatctttgaattttcttttgtgtttatatatttgaaggaactgtatcaattaattatatttggtttcatacaattttatggttttttgttacgcaagattgttttttattttcttttaaattctagtaaaagagaacttttcttttctctgaaattattattgtctttttttttttgaaaaattctgatagattttgttttaattctgtaattttagatgcaaatcttcgtgaaaaccctaaccggtaagaccatcactctcgaggtcgagagttctgataccatagacaatgtcaagtctaagatccaagacaaggaggggattcccccagatcagcagaggctgattttcgctggaaagcagctcgaggacggtcgcaccctcgctgactacaacatccaaaaggagtcgacccttcatctggtgctccgtctacgaggcggtatgcaaatcttcgttaaaaccctcacaggaaagactattactttagaggtcgagagctcggacaccattgacaatgttaaagctaaaattcaagataaggagggcattcccccagaccagcagaggttgattttcgctggaaagcaacttgaggatggccggactctagctgactacaacatacaaaaggagtccacccttcatttggttctccgtcttcgtggcggtatgcaaatctttgtcaagaccctcactggaaagaccataactttggaggttgagagctctgacaccattgacaacgtgaaagctaaaatacaagacaaggagggaatccccccagaccagcagaggctcatctttgccgggaagcagctagaggatggtaggactcttgctgattacaacattcaaaagga

SEQ ID NO: 35029 - DNA, 2210 bp, Cannabis sativa
  modified_base (524)..(524): a, c, t, g, unknown or other
  modified_base (1094)..(1104): a, c, t, g, unknown or other
aaactaagtataacagtcgggttggctcgagacctaataggagaggtgcctatctcgctataggaaggctcattcctataacttcccccagttaacttcaaacatcttctcagcgagacttacaatctcgacgggttagaagataacattcaaatgagcctcgagaaactctctattaataagaactgcgattgtcacaaataaagagttaagctttcaaacaaagaagcaacaaggtgtacactgttgacctcaaaaaggataagaaaaaaaggctccagcttgctatcacggtcactagaaccaagctcctgtcgagaaatccctaaatgttacaattaaagacgtgtttaaatacacgatcattttgacctagtaaaagcgggaaaatcacatctgtatgattttcaagtaataaccgcaattatactacgtgatatgtaatcaaaccccatgatttcaggagaaaacattgtaaagattacagtcaactttgtaattaactgcctactatgtgattatanatagtggcaagtaagatcaaaaagaggatgaaaaaatcatacaagaaaggctctgaaaaaactataagaaatctaataagattgactcgtggactatgcagaatattaactgcaaaaccacgtaaaaaatcctttgcgttcatatttttttattttacagcttttattttttctgtgtgagtctttcttaggctcaaatttggttaacgaaaatctgtgttaacaacttaaaactacaagttgcattacagtttccttatagtttcttttcaattttctttacagtttgacaattgattatcttgacctaatatgcaggtaaagccaataaacaagagcatgttcgaagtgggtagaactaacaagatcatgggttatcaatctaaaggagaagacatgcagttgcaacagattccaaattgacgaattaccgtgtgctcatgcgcttgctgtgataaaagagatgaacttaaatgtttacaattactgttcacattattacaagacaagaacatgacttgaaacatacagcgagtcaatatatccggtacacaatcacacaacatgggnnnnnnnnnnnaacataaaagatatccttgttttgccaccaaatcagaaaataagatctggaagaccaaggaaaagaagatttatagctgattgggatacaaaaaatagaataggtgcagcaaatatggtcaacatggtcacaaccgaaagacatgcaataatcaagcaattaactagatacaacagaattatttgtattgtttaaatctctatgagaattttgacaacatgaaatgttagttttgatagattgctataaattagcaaagttgaaatagtttactagtagttgcagaatagtttctggacaattatgatacttattaagaatttattacataaagaatttcaaaagaaatagtttttaaaagtcaaatatgagtttttataagttgtaaaataaaaagtacaaaaaagttgcataacagttggtaatctattgagataagatgtcagaaatgaaatgacaaatattttgactaccaaaatagtttgtacacagttgcataatagtttttttaaaagttgtacgcctaaaaatataccaacaatattaattgtaaaatcataacacaattgctgtttaaacataaaaaaatgaacataatataatggtaaatttcaaatatcacataagttgataactagttccataacattaaacgtatagagtacctaaaaacattaaaaaactaaatattttctgaaatgaaaatcaaccaagaacaacaaagtttcccataaaatgaccctacttttttaatttagaagccttgaaagacttgccctgcttctcatcctcactgtcaatatttttatcatttttcctttgaccatatgaaagcaagagggcagcaagttgagtgcggtaaactgcaatgtcaaagtcaccagggacatctttcccatggatgaagaactctgcaaatgcagacacaaatgctctgtaatcactattttcaaaaaagaaaaacaaaatagttaaacaactattatacaacataaaaaaaaaaacttaaaaacaataactcattttttttttttttgctgagatggaagactagcaatctccacaactcttagaggagcttacgagtcagaacctaaatcaggaac

SEQ ID NO: 35030 - DNA, 1773 bp, Cannabis sativa
aagataattgggatttagtgggacctgacatagtggaggctgttatttctttctcaaattctggaaagatttcaaaagagataaacacaactactatcacactaattcccaaaactacatgtcccaaaagtgttgtggattttagacccatctcatgttgcaatgttgtgtatgagatagcaaccaaggtgatctacaatagactgaggaagatacttcctgatcttattgcagaaaaccaaggaggatttgtacatgggagattcattgctcacaatgtgttagtgtgtcaagacttggtgagactgtatgggagaaaaaactgtaaaccaaattgcatgatcaagatatacttgaggaaggcttataatactatagaatgggagttcttggaagagatgatgactgctctaggtttccctggtaagttcataaatcttattatggaatgcattagtacccctaaattctccttactattgaatggctctatttgtgggttctttaatgcaaagagagggttaagacaaagtgatccgatgtctcccttcccctttgtgtcaggaatggaatacttatccagattcttcaccaaagtgggagaatggccaggttttaaattccatgacatatgtgccttcttaaagttgaatcacatgcgttttgctgatgatttattagttttctgcaatggagactttatttctgtgatgctgctactaaaaggacttaagttgttctcaacttcatctggtttgttgccaaatgaacaaaaaacaaccatttattgtccaggaatgcctgaatctgaagtctccaggatccttgaggcatctaattttacaaggagctcattaccatttagataccttggtatccatgtttgttgaaagaagatatctcggactgaatgccaaagtctgctggaaaagatgacaagtagaattcgaatgtggagtacaaggaacttatcttatatggatagagtaaccttaatcaattcaattttgctagctatacatacatattgggcacaaatttttattctaccaaagaagctcttgaaagatatagaagcaacttgtcgatcctttctttggaaaggcacttaagaagggacaggccctggtttagtggcctaggattcagtatgcagacctaaagcaacaggaggtttaggctttcaaaatgtacatcattggaatgtagcagctttggggagatatgtttgggacatagctagtaaaaaatattgtctctttgtcaaatggatacacaatgtgtatctgaaggagcaggattggtggagttatgtaactccattggattgcagctgggcatggaaaaagatagttgctgtcaagaataagattaagcaaagggtagacatgaatggctttgtgatgcagaaatataagatccaacaggggtaccatttgttattttctgaatatgagaaattgccttggagtaatctagtttgggatagactcattattcctaagcataggttcattctttggttggtgctttgggaaagactgaacatgaaagagagaatcagcaagtacactcataacatggattcaaaatgtttatcgtgtggaaaaaaagatgaatccatagaccacctattttttgagtgtgactatagcaggaaatgtctacaagagataaaacagtttctgcaatggaacacaccagcaacaaacattaagcagctgctataagcatgtcacaacacgaagaggttctctgcaacaaggaaaagta

SEQ ID NO: 35031 - DNA, 2229 bp, Cannabis sativa
ataataaaatatatattatttaaaaaaaatattaaaactaaattttaaaaattaatttaagttgattaactaattagaatatttaaaacacactacattatatatgcataaaatttcattttcattttaaaaacttttttaaaatttactatttcccaaactacaatttatagaatattatttgttgttctaaatttattattccatcttcatattagttgtttcttctattttgctctcattctataactctagcattacacattctatgaatgaagaaaatagtacatttcagataaattttaaaaaattaatgaatagtaattttttctcttttatttgaaaaaacatgtttataaataaaataaaactaaattttacagttgttataaaatatgttttctaggatgattgacgggtcaatcatgctaaaaatattattggcgaaagcaaacttaagtatattataagctgtaaaattacaaactctaaaaataaataaaaaattacaattcaaacataaactagagagtttattataatagtaaacaagttaccaatacctaattggaacaggtctcattcattcagcaccttaataactatattggagtcactctcaattaacacacaaaaaaaaatgtttcaaaaacagaccttcaatttctccaagagattagagaacttgtgtagtcttctttatagtttggttgtggaaatatttaataaaaattgatgtattttaaagagtggttatgcaaatataaatataggaatatgattttgtctcgtgatgtactttcacggaatgtattccgtgatacattagatgagtctcaggatatgttactattttttaaccctaattattcgtagatcaacctaagcgttcagataaaataactccctcatctgacagttgccttacatcacggaatacattccgtagtagagtgataaaatagtgtccctataaatataatgtcccgtaattgtaatgaatgaggtgaggaaaggggagatgaggtgcaagtgcagttatgggtcagcgtccgtacgaagtgaaggcacatccatccatatcataatatcattatcaagtatatatcaacgacaaccacactgctactgcttccttcatcatccctggcttaacccctttttgcaccacctgcgacactgtcgttttgattgacacataagacatttccctttttacccctcttcttcttcttcttctctcattcattttcccaatccgaattgactaaaccttagctttcctcccaaacgtctcatcatccaaccccacaccctcccttcgcccttggatattatatactactactactactactactactaggatcccctatataataacattttccacatctttttttataattaatcacatttttatgaattaatgttgtttggagaatttttgaaatagaatgaaattaaatttataacgtatagaaaaatttaataaaaaattattaaaccttattgggtttctcattagaagtcattcatcatttacaatttcatattctactcttttttttttttaaaaaaaaatatatattatacacattttatagttatgttaataatatacatatctcataaaataaataagtaaaattagaggttgtttgacttcataacttaaaaattgttttcagtttttaaaaattaatagaagtcgttcggtaaattttttaaaaaactgagttttaaaaaactaaaaaatagaaaacatcaaaatgttgttttcaattttcaaaaataattttttttgtctaacatattatattttatatttttactcacatactcggatcctagactcgaacccgaatgggttcatattatggtatggtattaaaatattaatttttttttttaataagactaaaattaaaaatagttttaaaaaacttgtatcgaacactattaaatttttaaaacgacaaattttttttttctattgtcacttttaaaaatacaattttaaaagctgaaaactaaaaacacaactaaccaagctattaatatggtagatatatgaaaatttatttggatataacacattaaaacaatacatatatattacatgtgcatttattgaaaaaaaagtaatatattacctgattttatctatgagcctataggtatgaattggtattataaataggtatataatatatagggtgattctac

SEQ ID NO: 35032 - DNA, 1611 bp, Cannabis sativa
  modified_base (334)..(337): a, c, t, g, unknown or other
tcttcaactggtgactaaacacgtaagtatctctgcaatctgcccagtttgtaaggatcaagccgagtctatcatccatgctctcctaaaatgtccttttgctatgtcatgttggcgtacactaggtatcacttatgacccgatacaaccattatcttttggtggctggtttgagaaagcgcttacaaatcttgatgaggagattgtttcacggactgctatgctgtgttgcgcaatttggaaggcccgtaatcttgttgtatggaagaataaaacatcctcaagaactgaagctattgcatcagcacaaataactcttgatcattggcgtaannnncaagataacacttccttatcttctttattctttgaaagtagaggagatagagctaagcgttggactaaacctgaggtgaacaaaatcaagataaatgttgatgctgcactctttccacaggattactcttatggataagggatcgttgctcgagatagctctggtaagctcattgaggccaaatcgtgttattatgatggtgtctatgatggggaagttgttgaagcaatgggggtcaaagaagctcttagttggattaaaagtaaaaattggtctgatgtggaggttgagactgatagcatgctcactgtgcaaggcattcatagtaatcaatctttgaattttatttttggattgattattcatgactgtcaagatttattctcttctctaaataatgttaagatttgttttatcagacgatcagcaaaccgagttgcccatgttgttgcaaggcactcttgttttctctctggtcgtagcatttttgagtataatgtttgggatgagttaacttctctcttgtattttgaatgctaatattcaatgaagttgctatttcatattcaaaaaaaaaaaaaaaaaaacttttaactgcccactactcacctaattcattctctgatcaatatatcgtacaaaagagtctagaaaaaaaaaatagaccaaaaaaaaggaggagaaggagagaaaagaaaactctgctaaaatttatagagaaacagtacgatatattttcatcttcaagaaaattttaaaggggtaagtattagggttctcacttatcttcttttcttctcttataaattttcttacttttttctttggtctactttgatctaggctctttaagctacaaaagatcttcaaaagtgagatataatcaaagaaaaaaataagagaatttgatgtctccatgtctctccaattcttcatcaatttttatatttctctttgattcattagatttcagaacataagtcaatatggaagtgcataatcaaagaggaagatagaaatctcaacaaaaaaagaaaaaaaaaattgttatgctgccgaatttctcattaattatttttatgtttctctttgattccttagacttcagaaaataagtcaatgggagggtgcataatcaaagacgaaaataaaaatcttaaaaataaaaatgttatgttgtcaaaattcccattaaaaatcagcataatcaaaaaaagtcaaattaattaattatctaccatcttatgaagaaaaaaacaatctaattatgaaaa

SEQ ID NO: 35033 - DNA, 2315 bp, Cannabis sativa
ttaaaattttgggatgaagcatttaggactgctgtctatatccataatagactcccaacacctgtcttacaaaacagatcaccaatagaagtcttgtttaatattaaaccagactatactacatttaaaacatttggatgtcaatgttttcctaacattaggccatataacaaacacaaactctgattcagatcctcaccatgtacattcctaggctacagtatcaatcataagggctttaaatgtttagattcatctgggagaatctacatatctagagatgtcatatttgatgagtttgtttttccctatgccacaataaaatctggttccgctgctgaacagattgagtatctgccctctactttaattccaactttccaacatgacaatcgctatattggcacaccagaagtcagaaccaacctcaccattcctgagtcatctcttgatcctaacatgatcatctcacctgtgttataacccttaccataccttactcttaatgccacatctctcaatcttactcaagcaaatgacaacaaccattctaatcaaccctcacctgattcttcacaacagcctgtcctacaagaacaacaaccccctatacccccatcttctgtcccacctactcttcctacaacatccaccaatacacacaagatgaccactagggccaaagcaggaattcataaacctaagatatacctgtctgagaagataccaaaatccttcaagtctgctctacattatgaaaaatggagacaagctatgtcccaagaaatactttctcttattagaaaccacacatacactgtggttcctctaccaccaggaaaagaacctataggctgcaaatggattctaagaatcaaagaaaatcctgatggctcactcaacagatacaaggcaaggttggtagccaagggtttccaccaacaacctggttttgattacactgaaacattcagtcttgtagtcaaaccagtaacaataagagtagttctaaccttggctatctcacacaactggcatgtcagacatttggatgtaaacaatgcctttctcaatggggtgctccatgaagaagtctacatgacacaaccccctggttttgagatcactactcaacctaatttagtatgcaagcttcacaaagctctatattggttaaaacaggctcccagggcatggtttgaaaggctacatcagtgtctaccctcatttggattcatatcatccaagtcagatcactcattgtttatacttcacaccaaatcatcaattacactagttctagtgtatgttaatgatatattggttaccggaagtgaccaaaaggcactgtctgatctgatctcccatctccacaataccttctcactcaaagatcttggtgaactcaagtacttccaggagatagaagtctctcacaccagtaatggtcttactctgtcacaagaaaagcatgcaaaagatttgctactaagggcgaaaatgcaagatgccaaacccattacaacaccaatgataagtggccagaaactctcagcatctggcagtgaatactttgataatcctcatatgtacagatccattgtaggagcattacagtatctcaccatcaccataccagaattggcatacagtgtgaacaaagtatgtcaattcatgcaaaaaccacttcattctcactagcttgctgtcaaaaggatacttcgatatgttttcggcactatacactatggacttcatctcacaaagcctcaacatcttgaaatcaaagcctactgtgatgctgattgggcttcagatgttgatgacagaagatcaacttttggatttgccattttctttggatcaaatctcattgcttggacgtctcagaaacaacataccatttcgagatccagcacaaaagctgaatatcgaagcttagctaatgttgtggctgaaattccctggagtctctattctctgagcttcacattcaacttactcatcctcccactgtttggtgtgacaatcttagcacaggttttgctcactgcaaaccctgttcttcatgcccgcaccaaacacatcgaacttgacttgtactttgtcaaagaaaaggttcaaaatcgccaaattactgtcaagcatgttccagcaacaaatcaacttgtagatggattcacaaaggcaatatcgagccaaaacttcatcatttttgagccaaactcaccattgctgacaccaccaatgctgacacaaccaagtttgcgggggagtgttaagagctgactgttgtactttatggttatgttagt

SEQ ID NO: 35034 - DNA, 4409 bp, Cannabis sativa
atatatatataatattatataattatggctgtctaaccaagtaattattgcagctcaaatcaaaggcgctgacatctgaatttatagggtgcacctcatactaaatcacaattagtaaaggggaattaatagtgcagtactagataggcactatatgaagattcacctgctcataaaaatttgagaggaaccacctttgttcctaagaacactagtggtcgtaagctcctccaaatacttcgcaactagatttggatgtttgcaacaatcacatgacttcttacacaatgatgcacttacctgtattgtaatgttagagctaactttgagcttttgaatcttgttcaaaataaggtttagcatccaaaattaagtgatttatcatacctgttcaccgaaattctcaagaatttttttcctgcggcatccagaactttcacaatactctaccatctgcagtatttgaatttgagagtggtcaaatatatacagagagaggtcaattcagacctttaggaaattgagaataacctgatggaagtccgtcagagactttttcgagaagccttcctgggcattggaagcctttgactttttaccctctgcattcctcagaataaattcctgcaaaacagatagttaacaaggcacaaagctttgttgaatatacacagcattgtagaaatgataatattgcaagttattatactaaccattcttttgcgatcatctattccgtagtacaacaaacttttggagagtagttgatcacgaccagctctacctgactcttgatagaaggcttccattgactttggaatgttaaaatggcaaacaattctgacatcctttctatctatacccttgaaaatagacaatatctccataagccattaaagagacatgacatctgctctgtcaatatcaccaaaatcttaactgggacagtaaaagataaacaaagagagactgagttgcataccatcctgaacaaacactggcacttcagtaattgaatgcaccaccaaggctccaagaaaagcatagaaagaaaacaaggaatgcatcacaaaatacaaaaataaaaaagtggggcaaggaaaaaccaagcaaacccagaactgcctctccaccaaatttttaattgacaaaggagttgtgggtgcacctttcctacaatacacaacacctttaattgacaaaggagttgtgttgtgtggtaagtttaagtcttctatttgcagttgaagtaatattcatctcttcaaccaaatgttgatatggtgaattgttaaatttattgagttcattcccgccttttgtaattcttccttcaagaagatcacatattctgcacgaagtagccactaaaggtgttgtgtattgtaggaaaggtgcaccccactaatttatgcttgttttcttcttattccaagttttaatggtcaaatacatcatataggttgaaataagagaaaaacatgatcaaaatatgaatatggtgaatttatcatggattttgggggttgtacgaaatattaagtagataattcaagttttggatgctcaacacgctccgtttgtattcgaaaatcaaatctaaaacttcaagccaatttttgtttatgatccgttcacttttaggaaaacattgtgaataaaaattctagatctctcttttagctttctaaaacatcttgaatcgtccaattccgagcaatatcgagagaattatggccaaaataccatcaatcgtcgtagcaaaaaaattctaaaaaaaaaaacaataaaaagattgcaaaaaaaaaaaaaaaaagatgggcttctctagtagggttgcggcctaagcacaatttttatctttttaagtttaaattttaaatcattttagtatcttttaggtaattttattagcctatataaacatattatatttagtcttttagtatgtttttcagatgtcaaaaactcagaaactcttaattagcaactactaaatatttttcatcatcttcttctttttctttaattttgtttatattctcatttttcattatgaatgcaatggttatgaacatgattttcatgcactaattttcttatctaagggttaatggaatcactttaatttctattttatttttattttgccatgatgttctattaattcttcttctttattttagtctatataatttatgtttaatgctcgtgaatactttatcactatttgcatgtttttatgatttcaattcgagatttgtgagatgagagttgaatatgctatagttgtttagacataggtcacatattggacgagaatacccgtatgacttgtgtagcaaatagagttttcattcttaatgtcttttatatgttgaaatttattacggatacgtagaaaatttaaatatagattgagatcttatatcttgaaaaataatacgatttattttagttaacccactattaaaattagaagaagaaattgtaaaacagattagtaaaataatagattgacaagttgataaaactaataccctaggtcccatttattgatactcataatcattgtttgcttactttatagttaaattgttttcctagttttaataatatttcctcaaatttttgtttgccaaatagaaagtagaaaaataattagtggtacatggtaatagttttcatgggatgatactcgtgcgtatgcgctattattaattgatacgagacgtatacttgtattataaattttccctattaggatctgaacccagttcatgctctagtctctaagactcacccaacaacttgagctagtctcatgaggcatccaaccacaggagctagcctcaagtggcttcacatttctagtcatcagctagggagagacctcacttaacttgattaggccgttaattcaagttttattccactctgacattattagatgcattttaataaagaaatggatcaaagtcatgttaagtattaagctcacaaacaacagaagtagaaaaccaacaaaagagaagcagaaaatcatagggaaaaatgcaggaagaataaattgaataactcatatacaatcttacccaaaagccaccgtagcaacaacaacttgtatcttagaagaaatccaatcttctagaacagaactacgcagtttatcattcaaccctgcatggtaagctgaaagaaaggtaaaaaaggaaaagaaaaagaaaaagcagaatcatcagcacatgttaagtgaaaccgcttgcaaattgtcaagggcaaaatcatatgtataccagcagaagaaatgccaaattttgatagatgagcagacaagtcatcacatgccgtacgttcaaggcagtaaacaatggcacaaacatctccgtcggatttcagtacattagacaaatcagaatagacatcattcaaaaggtccttgtatcgaactgtatcacagaaaaatattatttgatgtgtagaaaagtaaacaaggacagcaatttacagcttgcaaaaatcaactttcaaaataaccagaagaagccttccatcaacaagagagcctgttgacattggaatgtggcttcctcagtgtgaattaatttattcaatctattctaaaatacaacgaacaaactctatcttagtcaagtctggaagcaagacacaccttcatagtagatattagggcgattaaaagaagacttgaggactaaagggtcttgcaagcacaaggactctataacatctttctgaactctgcaaaacaaaaggataatcaatgaactatctatcatgactcagtgattaattgtttagtctctgtactattcaaataattaagttcccatagtttacatagaaaggaattacaactagtgcttcacaagactcactttggagcggctgtagctgtcaaagctaggatgggtacacttggaaagtggcttctcaaagatgaaagcttgcggtagctaggcctgtttcaaatatttagtttaaaagacattccgttgtcatttttcacagatcaggtaacatttaactctcaaaaactaaaaaagatgaaaagtctactatatacaatagaagtgtgtccttgccagaatctaatctttttaattcttctttcctcagagccagaggtggcatgaaaaagatataagtataatttatatgaaactgatcaagtggaactaattttaagatttactgaatgaaaagtacacatcaaacatagtcatgcagagaaagaagaagtggactgaaataggttgcccctgagaggtttttcgtttttccacttgatagattcaagacaaaagagcacttgaaatttgatatccgatcctctcatagaagttaggaataattgcactttctatttggtttctgacattatgtgc

SEQ ID NO: 35035 - DNA, 1699 bp, Cannabis sativa
  modified_base (731)..(731): a, c, t, g, unknown or other
tttattgtatagtatatcattttattttagatcatacatgtttagtttttattttattatatataaatgtgttatataattttgtaggtataattattttatggttgtatataattttgttaatataatatatataattttcttaacaatattatattattttgttatattttttattgtagatatatattttttttgtatagtatttgttgtgtatgtatattatttatttaagataatatttagtttttattttattatatataaggattatatataattttttttttgtatgtatacatattttaatagtggtatatataattttgttaacataatatatatatatattttgagtattaatttagtattattataatttatttgtggtatataattttattactacggtttattaatttttagtaatacgatatatcaaatactgtggtatgtatttaataatttaatatatttattataaatatattattatgaaataaaattagaaaaattctacaatgcaccccttcgaagggttgtaccaatacatttttatccgttttactatccgaaataattttttagtcaattttttccctcatggtgatgtaaattataattatttaagacaacctgcaaaattttaagaaattcgaaaaagtttaacatgtcgaaaattgcattcaaatagagtgtgttgtacgcttgactattttattttatacgcntgtaaaatagactatttgaacataatttttaatattgtaaattattccaaatttcttaaaattttgtagaatattttaaataactataatgtacatgaatatgaaaaaagttagattaaaaaattcttctcgatgccaagacaagcagagagcgcataatacatctattttaagggagtgcattggagaatcagccaaaaaattatataacttaatttaattattatatatttttctttaaaaaaattaatgtattgtaaatatatttttataatttttattaattaatttattgtatttagctattttattaatattttttttaaaaaaatatttactaaaaataatttctaaatttaaattgattttacatctcaacccaaaaagcattggaattatcgattaaaggatttgaaaattaggacaaatcgatgcaatgattataataagaaagttagattgacgggttttcatgtcgttgtggcaatgtttattgtagtcgtcatcgtttgcccgaacaacatgcttgtacctataatttcaaaggtgctgctcggaaaaacctcaaattacctcttatttgtgctgaaaaattagagaagatactttagttttaaacattaatattttttgtacaaaaaaaatcatgaaatcaagttgtcgactgcagaacgggactgttcagtttctttaaaaaaattgtggagtgcaggacgggattgtttacaagcttctcaacccgaaaaacaaaggtgatgttatgatgctgatggtggccgcggtgtgggataaggtggtggagccgggaggatgttatatcgcaagagtaaaccaaaacagggaaaaaaggagttctaactgccacatatatagatatatagattgttggcaaaaagtatttttttgaaagaaagtatctgctaagtattactattgatagacctattaatgaacgaaagcaaaagcta

SEQ ID NO: 35036 - DNA, 1728 bp, Cannabis sativa
aacaatataaatagatgtacaaccttccactttcacaagtgaagctttcggccccagcagagagaaaatggcagcagtgttttctttgtaaaatcacctcagaaacaagagagaaaaatagagagagagttggtgagagatattgtaagataaaccaagagaaataaagtgaagaaaagagaggaaaaggttgggattacctgctggtttgtagcatggaatctccatgaacttgtaaccagttttgacattcatagtggagattgaagcgtctttgagggaagcttgacggagatgtacccttgattttaaggggaactccgaaatcaaatccttagtgttcttcattatttttctgttgtggtttttggcttttctctgctaaaccaacaaagatcgttttagatctttgttgctactattttgtatctcggttttgtatgtttgctacagatttgaagggaaacaaggacttgtccataaaagctactgttgtagctcgaagaagaaggagaaaacaaggtgttttcggctggtgttattttgtagaaaaaagaagaggaggagagtcgaaggtgactgctgcaacacaaaacttgaaggaggtgcggctagggttttctagcaagaaagcaaagtttcaaagagaaaaggaaggagaaagggaagggccgggtactagggttagagaagagaagggtttgttgttgctagggttttcagcaataaagattgcttttatactgtcataaatgcagtagggctttgaaaaaggcgatcgggttttgaaaagggaatattcccttgtgatccgcacaaagggagaaagacttttttacccctggtttttgactattggggtgttgggtgtaggggcagtttcggctgccattaatttcctacatatctttagtttcacctctcttcattatcgaaggtgaaaaatataggtttgtagtaaatcttataggtttaaatctattaaaattaaattatttaaaattaaaattcaaattagataatacaagcctattaaaattaaattatttacatcttataaaataataaaaaaaaatgtagtaactctataaattaggatatacattatgtttcttttcactttttttagaatttctttcttcaaatagatatatataggtttgtattatcaaatgtgaaatatatctacaaaatgatattattaaaaaaatattattaatagataataataaaaacgtagctcattaatctatgccctatagtcttctttttgtgtaaacaaaatatatttaaagaaactataattctcatcccattaaatagaaggatttaattctttctcaaaaaaaaaaataaataaataaaaagatataatattaattaatcaagaaaatcaatgacatttttgtcaattactttaagaaagcccaaaagcaacattctctcttttaatagagttatagatttattaaaaaaaattggctttgttcattctttatggttattatactatatgtgaaaatttagatatttgttattaaatattatttatgaatgtttaaatcattaaattaattatcaccattaatatttggttgtattttcttttcttacattgatttagttttctatttttttattcatgtttttatataaataagggttcagctcattaaaataaacaactgaaaaattctcattcactttatttttatctcttcatcatct

SEQ ID NO: 35037 - DNA, 2533 bp, Cannabis sativa
  modified_base (67)..(76): a, c, t, g, unknown or other
  modified_base (2482)..(2489): a, c, t, g, unknown or other
ttatgttacagaaccgattatattctaattataactggttttagttattttgtgttatttgtttttnnnnnnnnnnttatagaaccagttctatttttatttatagctgagacatctaattcttgtgacttttccaatgacttttatagcgacggtgactttttcgacgacgatgacttttccagtgacttttccagtgataataacttttctagcgactttttccggcactggtgacttttccggcgaaacttattattgttttacaaatatagaattttcatttttttttacaaaaatatagcacaaaaaaatctatatatatataaatttaaaaaaaaataaaaaaaaactcatgatcccataatattattaatttatgccataaaaaataaactcttataattttcccatataaatttttatttattttttttcttaacaaaaataatacaattcaattttccttatttgttttaacaataacaacaatttttctttagtggcagtaataacatcattttattgactaattaaagtaaacaaaaatggtagaaataaatcgatttggtaaagtttattatccaccatttaaaaaaaaaaaaaaaaaagaaagaaaaatcttacaatagtaggaaagcaaaactatatatctaaaatcttaatcaaagtagactaggtgaatatgtcaaaaaaaaaaaaaaaagaagtgaaaaacggttccaatgcttgtaatgataaaatatgtttaaaaacttgtaaaggtgtggggaaaatatcaaaataaataatgaaaattctcttaaacaacaaattataaattaataaatctctaaaattcaagattacatagagaaaagaagaacatgtcttaacaagtagaattcaaatataattgcttctataaaaaaaaataaggtatacaattataagaacattatttataagaatttagactattttctttttattttagataaaatattattatattaaaacaaaaaattataatgtaatagacataagaggaggagacatttcctctaaccatgaacaattagcattcaccgaaagagcatatttagctaacaaatgagcagcatcattagcagatctatatacgtgagagatttgaactccaacgaaattgaacactaaaagagatatgttagttaacaaacaataaaaattagaaacaaacacttgggcagattgcaatcctttaaccactaaaaaaaattagtctcatatagtgaaatggtagttaaagattttaagtcattgcaaactatgcctaagagtcattgctttcatcactatcagtcaaaaaaacctcaaaaaggtaaagtcatagcagctatgatctatcccctacaattatataggattgcaccgaaactaatcaatagaaataagataatcactagagctcaaagaaaataacattggagaaccaaaaaatcataaacacaagatggataaagattagaagtaaccaaatttgattgtggaaatcaaatcttcattgagcctgccacattaatattaatgttatccaaatgatctttactccaaacctttcatagattgctaattgcttctttgatggaataagatatgggacttcaagctttaaattgcttagagttagcaaaatcctagaacagttggaagagaactagagaacctatttagagagagagagagtgcaaatgagtaatcaagttattttagttctcttaacacccttattgtatcacatgactaagcatgaaaattaggagattattagcagtatattaataaattaagtagtaaattataattatatgtgcattaatatcaaaataaggcctattgttgaaaatgagaatttgtgatataaatatattgattacagattttattgaactctaggtgtgtcatatatgttatatttattaaaattttatattttcatgttttaagtctagtaacaatggaaactcgaaaacttggtcaatagtgtcactacgttacggtttagtatcaatagaattgttggggagagacttatggatagttagaatttcgagattatgtggagtatttcgttaatgacaattctactcctaactcatgatttcttagtagttaagaaaatgggcaatttagtaatttggccaaggattagattaattaaagttatcctcaactaaattttatattattgaggaatatatagtttttagattgtgtagaatcatttagctaaagagataaaccaaaattggaacactctctctctccaagctctttctctttcttggcctagacaaaaccaagggaaccaagagatttttagaccaattcaattggtattcaatagaattttagctaggattttaggaggttttgaaaccaagatcaaggtaagccgccctaagttcatttctcctctttaaattttgatgaaaatattaaacacataagagtttagaannnnnnnnattgattgcagcggaatattatgattccttccgtttagatctct

SEQ ID NO: 35038 - DNA, 1079 bp, Cannabis sativa
ccacgggttgccgtcgctgtctgatgagggttgttcgagggtttattgtgatccctggttccctgtgcatactctgctggcaccatcccgaccgcgaacgcttctaactcctaagttctagattttgttagataactgtcactttttgtgtgtaatttttggctgtattcgaccgttgtttaatatgtctttctatttcccttcttctttttttatgtaacttgtatttacaatccttgaatagacttgtgtttattacttttattgtctcttcctatgtcttatgcctactttaagtaatattggggaaattgtggctcctttaggtgtatttattgtctatcatttatgcatacaattattcgtatccattccaagagttttttttattattattatttttttttaaatagggtgccttgggaagtgggatgacatatatactctttcaaaatttgagtgcacgtgctttagttggcacgtgtttttaaaacaaagtggtgactcttcatttccttttttcttttttttttttattattttgcatgtaatttgtataaataggcttctcgttgagttcctttcttatctaagaatattcttcaactcttttttagttctctgggtcagttcaactgtgttatttgtttatccttcctgcattatgtcttctctacccagaaaccagataccctactcgaaggagccttcctcctccaacattttctcaggattgcagcctttggatcctgcttttctttctttgaaccccttctctagctttcgtgatttcgaacccactacacttcctccactgcatttttcagaggtctgcagctgtcctttctttgagcaagctgcattgggccttggaacttatgctgtttctcgcatcgatgttgcgccacctttggctatgtgtcctttcgctatttttcctcccacattgacaccaattgaagcggctaaggaggagcctaaagtatcagaaggaagttcgactcaaatgacggcggctaattatcccgagattgagtctactgcccaatctgagtacttcgaagaagtccctgctccta

SEQ ID NO: 35039 - DNA, 2619 bp, Cannabis sativa
acccgtactttaggaaggtggcagacttcttccgtctctgtccgacccaattcactcccaagggcatcaagtacctgtttgccctgtttgttctctacgccacccagaagtgggatatgccttctccccatgagattagctggttttttgatttgaagtatactctcaagcaaggcagatcaggatacttctacttttctcagccagacttcaagtggttgacgggcaccggcgataaggccattagaaaaattgggaattttgttgacgagtactacatggtggatggcatgggcaccacttatactttgttttagtagattcctgtatatcaccgtccacccctcatgcttggtctcagagatagagctcaaagactcactcagttgccaggtgctgcccaaaatatcactttgttgaccttagaggacaactttgtggagtacgggctctacccgaagcatttcattcctcaacctgtgaaggagaaaaagaggaaatctagtgctggctgggctgacggagctcatcaggagaatgaactcattcaactaaagtgtgaggctaagttgaagggaggtgcgggggctaagcagtatgcttaggaccatcttgagcaagaagatgaggctgaggaagagcaagtgaccccactcaaaaggaagaagaaacttccggctgagcccaggcctatcaaacatacaattcagatcagggagccgaatctacctactcaaccatccactcctgtagtaggaaaggggaaagccgttatggaggagcaaagagactcgtctgatgatgatgagccatcaggtcttgctcgggcaaacacttctttcgaagtgtcagacactttgtcttgcctttaacattcttgattattatgctttcatacttctgacgcttttttctaaccatgttgcttttattttgtgcagacatgtctcagaagatgctcgaagctctgaagaagagagtgggaggaagctcggcctatctcctcagaccaagagatccaggagcggtgagacaaccctgtccagagaaagggcgccagccgaagcagttattgacctctctgaggagcataccatcgtggacccttctaccccaaaagtgactaagtccaaagactcttgaggaaggagctcagacagacctgaacagctgaagggcggatccgagctggtcaggagtggagtcgaacagatcagggcccctgccccacctccagtgctgcatctggagactaagagaggcaaagatatgctcacccactacgtggctccgtcagtctttgaggtgaatgagcagctggctggagctgacaaggagctttccctagagctggtgatgggaggagtcctgaaggagtttacaagggtgagtctttcttgacagtttccctttatccttctttacttagctcagattataatgttttttttctgtgcataccggtctgaagatggcttaatcttattcttgggttaagttggctgcctccaagaatgctgccatgtcaaacaccatgagagcagaagtggacttggccaagaaggatgttgatgaagccagggttcaacttggagccgtccgaatggaactaggtgaagtcaacaagaaacttcttaatgccaagaagaaattagtcgagctaactaaggacctccaggcttctaaccaacttgaagctaccattgcctccttgtcaacagaagtgaaaagtctccaagaagaaagggaggttcttcggactgtcttccgtaggttggaagcagagaagaagtataaggaggaggagcttaaagctgaggtcgagaagtacaagtcgaaggctgaacagcagacagcagagcctgagcagagaacggaggtgacgaggcttggagagaaggtaaatgccttagagacagcgggtcttgggattttttatgacttctggaaagctaatcccaaggcaaattttgattacttgggcgattccaaagacatgtttctcgagtatttcacttctcaagtggcctatggagaatccgagacgaccacttctgcctttggacaggacattgacgtgccctctgcccagacaacagatcatccagctcctaccgacctagaagacttgtacaaagagcctgggactccagctatctgaatacttctctttttatctttttctttttttttatatctgtctggccataaggccttttttaagacaacgtgactggccaagcgatctgtaaacttggaattattattcatttttcagacaacatactgaccgggcagcctttaatcccagttttacatgcttttgttatctttaatgaatttcatcttttgtttatagtcatcgtgcaactgtgtttgttttatttttaccaaatgctttgtacaggtataggtgccccgcaagtgaccgagcaaacttatgactcttggtcacttatagttttttcgcaattatgctcttttatctgttcggggttcggggtttgaccaaaccttttgtacgcactgaatggtaaagtaacaacatgctagtgaattcaattcaacttgaatttgaaataaacatctttattcatttattgatcgaaaatgtgtttg

SEQ ID NO: 35040 - DNA, 1375 bp, Cannabis sativa
taatctgatttcttgccaaacatatattcataaggactaatattgtcaagaactggtgtgggaagtctgtttatagtaaaaacaacacatgacatggcataccatcagtaatccatgcttaaaccagagtgagccaataaagtgagaccaaattctgtaatgtgtatgtgtttgcgctcagcacggccattttgttcacttgttgttggacaaggatgctgaaagtggataccttggtcagctaagaattgagcaaaatgtctgtattcagcttcccgatcagtttgaacgctttagattagtaaaccaatttatttttctgcaagaatcttaaactttatgaacaagtctaaggcttgttttttaagtgttaaatggaatatccggcagtatctactataatcatctaaaaaatgaacatagtatttgaagccatctttagacacaatatgggaaggaccccataaattagtattgataagtgctaaacattaagtggccctattattggaggtggaaaataggaacttgtgactttttccttgacgacaagcagtacaaaactgtaataccttgattgagccagtgtgtggaatgtgtggtaacaatttagctaaggtatttttagcaggatgaccaagtttgcaatgccaatggttgatatcattgaatttagaaatagaaaatacttgtagggaattatcaaagaaacaagaaatccttttatttattccttgaggggtacaagattttgttattacactagactgacaattacaaaatgaattggactctttagaagaggtagtaaagtgacactataaggcagaactggatgcattcccaggctgatataagtcatctttagcctttcctttaagaagcactctccctattagcttgtccttaacaaaacaacacaacttatgaaattcaagaaagacatcattgtcagtggtgagctaagaaacactaacaagatacttttgaattgaaggcacttgtaaattattgttgagttgtgaaggacatgaatctgtagaggagggaatagtggactggccaatgtaagaaataagtaatttcttaccattacccacggcaagagtttcagttccatggtagggtatggtagaatccaaattgttttaaccaaaactgacatggtttgttgcgccaatgtccacataccagagatcatcatcaccaatctcaagaatcatagtagttttcagtgcctgcggatcatgaggagtgtgaagttcagttaagaaggcttgagaggaagaagaactaccatacttgggagtgacccaatttttgtcaaaccgatagtggcaaacggcggctatgtgcccaaatcaaagacacactt

SEQ ID NO: 35041 - DNA, 2376 bp, Cannabis sativa
  modified_base (1933)..(1947): a, c, t, g, unknown or other
ataccctaaatattgcaaaaatggaaaaattagggttctgaaaactaccccaaccggcagaccggctgccaaaccagaagttcagttcggtggggttcccggggaccaaccaaaattttggttcttacaggtcccactaaactggtcaactggttcagtgcaagaaacacccaaaaccacctacacaccacaatttgattccaaaacttacaataacttccaaaacacctatttgtaccataataaacataatccacacaataaaaccagccaacaacatctatatcaaaattcaccattaaagagaaaagatttagttcataaactcaaatcttgctcaatcaccaccatagccaacaaaaacaacttagaatggcttaaataacctcaatataacatcaaaacacaaaattaagtaactcttaaaaccacagaaccctaaatcacaaaaacatgcaatagaacctatcttgaacttaggaaaacaaaggaaagagagctaaggggtttaccttgagttgatacactaaaaattcagctataaatatttgaattgaagctggaaaagaccaaaattcttgctgccttaaagaggattcgagagagagccaaatagagaaaaggcgaggtatgtgatttctaatttttgataaacaagatattaacttaatgtttagtttatctagctagaataggagagtaataatcagatttacttaaaataaataactcactaagggacaaaaacccaaatggcaaaaagactattttacccttaactaaaccataaggcatccttactatctaggggtaattttgtcatttctaaaacctcaaatattctcgacattctcaatgtctaactatattgccccgctattactaaaatactaaaatgtgattttattggccaaacgtcgtgttccaatgttgtcgagcacaaaacatgaaaaacgtaaattttcatatatagcataaataatacaccctaatttcaaataaatctccatatattcataaatcataattagtaatctagtttcataattaaggcctaattatctgctaattcccatattaaaattaagtggtctttacacgtagactacttggccagttcttgttcaatatacttctctttgtactttcccctaacttcttttttcttactattgcttgcacctgcatccactattctacacatacacgctacaaataattaattaatcaacctattaacaaaatgaacatttatttaatttaactaactgtgagtttaaatattacaatactttaaaatctacaagtcattataatcatcatcattaaccgttatattattttcattattattattactagtatcttcatcatgatcactataaacaataaaataatctaaatcttgacagtgaggctgctcacggtccctgcttgtcacttcaattgggttgacttcatcacggacattttttcgacatcgtcgagttataaaagttgaacgaataattgaatactcaaagagtttatatctcgtatagtcgtgatctcatcatcattctcatctcgaaaatcccaaacattgcggggatataaacattggcaagcttccaattaacttcattgttcaggttaagattataatatattaaatttacactataacgttaagcttttaaaagtaattcaccaggattgaatttgacattccattctaccaaatgtaactctatataacaaaggtttccttgaagtgtgagcgcaataattatcatggttgtttgttgtataattttcttttaattttaagattttttttttaaaaaaaaaatgtaaattaaaatttttatcttttgaactttgacatgtaacaaattatgtcccctgaacttttaaggtcgttaaaaatgtccctgaactattgagattgttnnnnnnnnnnnnnnntatccaattttagtaaaaaaaaaacatggatgaaagttcatgggacatgatttagtacatgttaaagttcgtggaacatgatttagtagatatgaaagtatgaggagtatgattagtacataaacaatcattgaaatagtaaattaaatgaaaatagacaaaagtccttgaatctaacaatctcaatagtttaatgagaatttttaacggtcaaaaaagtttatgagacataatttagtatatgttaaaatttaagggacaaaaatcctaattaaaaaaaaaataatgtcaggaataaattatcaatacttattttttgttttcttcttaacatatgtgcaaacaggggcggagctaggactaaatattagggggggccaataacaagcaacacgtgcaaaaataaggcttcatgtttataaattttag

SEQ ID NO: 35042 - DNA, 1870 bp, Cannabis sativa
  modified_base (519)..(522): a, c, t, g, unknown or other
  modified_base (577)..(596): a, c, t, g, unknown or other
  modified_base (639)..(648): a, c, t, g, unknown or other
catttctaaaaacaattttttaaaacaaaaaacagaaaacaataccaaacatgctctaatattttaataaagttgctatttcattaaaaaaagaaacaaaattacattcttaactaaaaaatcttatttaagttgtaactacaaataaaaaatttgtgactaatacattattatttttatgttattattaaaaattttgttgccaaaaatatttaattacaaaactaaaattaaaccagtgataattattgtgcctatttatagtcatatacaaaatttacattatatatatgtaactataaaatattgccagtagaatgtagttttttttttagtttttttatttttacattttaaaataatttttttacatttttataaattctacataaaaatttctattgcaactagcattgcaatctaaattgcaacaaaaaatcgtacaaaaacccttatttcaactagtgctgcaaccactttagaaacctaaaccgtaaatttgaaaaaaaaagttaaaannnnagtatatggggtaatttcccttttttttgaacttttttcatttttacacttcaannnnnnnnnnnnnnnnnnnntgcatttttacgaaattctacatatagaaacctctattgcaannnnnnnnnnaacctaaattgcaacaaaaaatcctacagagcttagcacctcaatatcgctattggtgcaattaagtatcgagtctcatataatttaatgtaataacttttaaagattattactaaccaattacaagataatacgttttagaagatcgtaaaaatgctctattttgactctcaatgaatggaaaggcacagattccttcataactaagtaagcttcctcatttaatgaccaatattaacaccatatatagtgaagtatttctttctcacctaactcattttcctcgtttgtataactatatgagaaatactaaaaagcatcagtgatgcttaacacttttctatgtgttattatcgctattggttcaattaagtatcgactcccatatagtttaatgtaataacttttaaagagtatcgctagccaatagcaagataacatgtctacaggtgttagttcatctagtcaagaaatattttgtatcaataatatctatatattaatatagggatatgattttgtcctgttattgtactttcacagattgtaatccatgatgcacggcagccgtcagatgagagagtgatttcatctgatcggcttagattgatctatgggtagttagggttaaaaagtagaaacgtaccctgaaactcatttaatgtaccctgagacccatctaatgtaccacaaaatacatttcgtgaaagtacatcacgggacaaaatcatatccctattaatatataggataaggcttaaagatattaaaaaggactttatgtacgagtcatttttttttaatgtgtcattatttcattttatattcatatttatagtatttgtttatttgtttattttttaattatttattgaaaataatattattcttatcgtcacttctctcttttttttctttttttctctaaaaatttttaaaagttgtttttcaaataacctaaaactgtaatcaaaactaaagactttgacattttttattttaaaaatataaaagttgagactgagaagttctttaatagcaaagtcaaagaacaataaaaaaaagagtacatgtttcttctctcttattatatccaccaaaaaaacttttggtggatataatttgagatgaaattgatatttttggtggatatgatagtgtttttgataaataattatatatataaaaaataaataaggaaataagattaactaaaaatatg

SEQ ID NO: 35043 - DNA, 1802 bp, Cannabis sativa
aacttttccagccctcatacttaattgtggccaagctttgtacctaaactaactaaagattcagtccactaccctttgagaaaggccacaatataaaaagaggtgatcatgagattccaattggtcttcacaaacagggcaaatccgaggatcaagcacaacatgaagcttactcaagttgtcacgagtgagaaggtgaaaattcaaaatttgccaaaggataaatcgatattttggcaaattcaagtagctccaaatggctttactatggcaatccctgttctgagtaaggaggccattgtagagagtcgcagcgttgactttaccagttttacctgccctcaaaatctcatcactagaaaatttctgtcacaatctgcataatttttttcaataccagctcgtgtctagtttttggatgtaaggccaaaaaagaacacatttgagatcaatgagattcaccatcttaacccaaagtaaatccttttcttcattatagcccaaacatacttggatagcatagcctagttccacttggatccctctttgaaaccgaggcctccataggcttttgggagacaaactttctcccaagaagtcatatggattttgctcttttcatcattatttccccaaaggaaacctctgcataatctttccacctctttttttacactttgagagagaatgaaaatgctcatccagtaattccggaggccaagcaaaacattgtgaattaattaggctcttcctacaaaggacatgtgtctactagcccaattatgtaagttgtgcttaattttagagataacaatcctacaatcttcaaactttcatttcgttggtctcaaaggaaccccgggatacttaaggggaaagtctccctcaataagagacatatctgcaatgatttcaggttttgctctgctatccaccctaccaaaaaagatgtgggaattttgcaagtttacgagcaaccctgtagtagaccaaactcatccaacactactttgataacaagcatgtctagttcctttactcaaaattattaagtcatctgtaaagcacaaattaacaagctttaaacttttacataagggattatacctgaaattggagttttgaatggcatgttgctataaccgagttaagtattccatgataagaacaaacaacaaaggagagatgggatctccctgtcgaagccctttagcacctttaaaattgccttgaacccgaccattcatgagcaaagagtaggaggtattcctcacataaatcataaatctgttgacaaacttcctcgacaaattgtaagcattgagcaaatcttctagaaaatcccagtcaaccgtatcataagccttgctaatatctatattcaaagcacacctaggtgaattcttccttctatagttcttcaaaagatcttggaggatcatcacattgtgagcaatggatctaccttaaacagtagttccttgattttggttagtaataaaaggaagaacctttgccaacctactgcacatgagtttcgatatgcatttatagatggtagtgcggcaagctattggtctataatcaataacctttgtaggattttccagtttaggtatgagagagatcatggttctatgtagctccatggggatattacctgaatcaaagaattcattgactactctacaagtttcagcacctatattagtccaaattgacttgaaaaaaccttatccatatccatcgggaccaggcgatttcgaatcagggatactaaataaggcttttttgatctcctt

SEQ ID NO: 35044 - DNA, 1314 bp, Cannabis sativa
  modified_base (1258)..(1267): a, c, t, g, unknown or other
tcagacccaagtgtcacccttatcggcgtccacgtattttgagaaaaaacaaaggcaacagtatctatttgtaattaccatcgttgatatatgatgtgataaaaaaaatataaattctggaacaatgactgtaataatgagtgatttaaaggagttaaaatacgaggaattagttcatatactctttttttttttaattatttctttcaaatttacggtttgggttgtttctacggtagtttttatgtgggttgctatacgatttttggttgcgatttaggttttactccgctagttgcaatagggatttctacgtagaatttcgtaaaaatgcaaaaaaaaaaatattttgaagtataaaaattaaaaaaaaaaaccctaaatacgtaatctaagcatttattatttgttgtatatgataataatttgttaaattttgttaaattatttctttcataacaatattgtaattaagttatattataagtaaaaatgtgtaaagtgcttaaaattatctatatttataaaagagatatatgagcacgtgacaccttacaatttttttaattagcattatttattttctccataatttattcatttttttttaatattttattaataacttcataaatattaattgatataaaatatatatttttatttattttttccacaattctatcttttttttttagttttttattaattattttaaaagataataactcacccatttttgttattttttttttttaaaaaaaaaaactaccatttttctaaacattgaaatgacatgatttttttttctttttcaagtaattaatctcttatatctataaatacatacatattattattattcaactttttttcaaacaacacaaattttttgaaaattatatgatacttttttaacatttatttaattaaagatatttaagaaaataattatttttttaatcccttactaaactctatatatatcttcttcctctaatgatgaatattttttttcacagacataaatactcatacaaatacttaaaatataaaagttagaatttgtaaaatgtatgccgattcgatatgatttttattgataagtagatcatttttatttttatttatattttttctctattacttttttatcaatttaccagttattaaatagtctatgtatcttttatttatcctacaaaaaaattaatgcatgcgacaatttctaagtttaagaatctatatatatatatannnnnnnnnntatatatatataaatggaagaggtttcaatggttacatttttattgt

SEQ ID NO: 35045 - DNA, 2137 bp, Cannabis sativa
aaataaaatgtattttctttttctaagatactaaataaatggtaatatagttttaaaaataacttaattttttaaaagattttaaaagtaatatattcatttataaggtttatataatttatgctatttactatttgagaagtatttttaaaagttataaagaataaaaatattaaaaaattataaatctttaaagaactcaaaagaaattttaaaaaaataatagtaatcatcgtacaattaaaagaaaaagtaaataaagagacatcttttaatatagttaaaaaaaaattagaaattgaacaattctcttatacattgaagaacttaaaaaaaagaactttgatagaaacttatagaaaattcatcatagattctaaaatattgtcatctgtatctcacttgcagttattattatccatcctaataggtttgatctctacataaaataaataaaaatttgagttaactattcactttaaatctatatttattataaattttaatccttttcttataagtgctaatgataagttccattatttatttttaagaaattaatacatctttaaagttctctttacacctaagtatataaatatttttgttttattaaattttgaaaaaataaatttagaatggagagttcgttcatgattatatttacccattattatatatttatataattaaatattaaatattaaataattatttatattatataatgagaactaattaggtaggaattgataagaatagggcctataggtttttttgagatgatacgtaaatataggtatatatattttttaagagagagttacttgaattttgtttcaaaagaaaaaagaaagaagaaagatacatcgattttatataagtatatgtataattattaataataaattttttataaaaagataatgaacttgatagaccgagggattctagttacggttagttaactaattattatttatattagtttattaattattatataaaactaatctaaatagaaaaattagaaaaataatgtttggtgggattagtagttttatgttttgttgttatagatatttattaatatagatgtttttttttataaattaatttaaaaatatgattttaaaaattaattaaaaaggtgaagaaaaatatatgaatatccgtaattttgataactctcgaaaaaatgttaattgtagatattttttgttttaataattaattaaagaggctgattaagaaaaaaaaataaaaaatagttattcaatctgcatacaaattttgaaaagatattaattcttccatgagatggtaatagttattcaatctgcatacaaatttttttaaacagaaaagcttaaagtaaaataagaaaattagcatcaacatatatatttaaatagccaattcattcaaattcttcttttggttaactaattttcatatttctatgaatataatcgattaacttattaaaaaatattaaatataaaatcaatacatactaagatgaatggtataagaaacgactgaatggttgaaattgaacccataatcaaatactctaatctcataataagcttaattcataagggcatattaagtctctttggcaatatgtattagatagacccatatcaaaatttgttgggaggaataaattcgaactgaaattattgaatgagaaagaaaataaattattgggttaagcaattatatgttgtaatcaattactaaaataatatacattaataatgcacaacaacattcattaataatgttgaaaagctaaaagaaaaatataataattaaataagaattttttcaccttctacatacgtgcatgagataacaaataaataataattgtatcatcttatataaattatattgttggtgttgagacttgagagtattgtagcatgttgaatcgttgattgtagaatatgttgagcggttgagtggtgttgagcggctgagtggagaaggtgagaacgacaatagttatatatagtgttaaaagatacaaataaattataagaattcactactacaaaaacaccctttagaggcggtttttaagccctttcagcgtcggttttcgcgaaattcgctaccgacgctg

SEQ ID NO: 35046 - DNA, 1328 bp, Cannabis sativa
attttgccagaaggctttaagtttcattatgctttgaggtttcaatttgacacatcaaacaacaaggctgaatatgaagccttgatcgttgccttgaggatattcgaagcgttgaaggtcaagaatctcgtatgtcatagtgattcgcagatgattgtaaatcaggttctcggagaataccaggctaagggtctgaaagcggctaaatacctagagaaggttcagaagaacttggaaaagtttgattactttaaaatcgaaaaaatctaaagagaatgaaactctaacgctgatgctttagcaaaactggcctcgcagaacgacttggatgaatttaacttggttccagtggaggtactaaatgagccaagtatatgtgaaaaagaagatgtcgagatgatagatagctcacctacttggatgactcctataatcaactatctactcgacggacaacttccaactgacaaaaacgaggcaatgaaactcttatatacagtgccttgctacacaataatcgaaggcaaactatacagaagaggttattccatgcctctactttggtgtgttcttcctacagaagcaaacgagatcatcagagaaattcatgaaggcttttgcagggatcacataggttggcagagtctatcaaaaaagatcattagacaaggatattactggctaacaatcaacaaggacacccatgagtttgtcaagaaatatgataagtgtcagaaattttcatatatacctcgcataccaccaacggaactgaggatgatgacctcgccttacccatttgctatatgggggaacgatctaatcggggcacttcccacagggcgagggggagccaagtacgcagtggtagcaatcgatttcttcactaaatggaccgaagctgaacctcttgtctccataaccagaaaaaagtcctcgactttgttgtcaaaaacattgcctgcaggtttggaattccaatgaagataatatctaataatagaattcagttcgatggtgacttgttcactgagttctgcaagaggaataaaataattaaaagcctcttgtcagtgtctaggcctcaagcgaatggacaagtggaagccgttaacaaaaccttgaaagatactatcaagaaggagttagatgctgccaaaggtagatgtatcgacgagctacctcaagtactttgggcccacagaactactgaaaaaacaacaacgggacaaacaccattcttgctagcatttggctcggaagcaatgttacctgttgaagtgaacatatccactcatagacgagagttttatgatcaagaagaaaac

SEQ ID NO: 35047 - DNA, 1233 bp, Cannabis sativa
  modified_base (665)..(666): a, c, t, g, unknown or other
cacttaacacctaaaatggatgaaaagggtaaattgctaatagaatacgagtattgggggttttaccgcccaaatttgggtttcggggattaagtgaaaccaaaataaatattttggggattttgtcaccatttaccctaatattattaatcataatatgaatatatatatatatgtatggaacatttctatatgtagattaaattaaatgtataatcggaattataatggttattattataaaaatttgagtttttatgcttagtttttctatctaattaaaaaaatctctgatttttatattatatgagttggggttattccatcagctgaaaaaaaaaaattaagaaaaaaagtttttcgacaaaaaaaaaaaatgaatttggcttaagtattttgtatgtaaatatatttttgatatagtgtaaaattagtgatattttctattttttttaatagctaaattaagtatagaaattcaaatttctctttcattatttgtcattggatcaaaatctaataattaaatatttttaaaattaatatttatagttaaattgtttagtaaccatcaattgataatacccattgagaagtgtatatgaaagtatatataaaatatataaaggaaaacaccatgtatatatatatatatgatatatatnnatatatatatatatgaaaaacaaaacttgaaaattcaagacagagataaaaactgctctcatactaactattagactttaatataatatgaaagataaagtatgtataaacaatatgtgatattgaataaactgtaaacatatcgaaaatgtatatgtaacgaaaggatcgaaataccttcagccattgatgtttgagcttcaatccctgcgatatcttgagttttggatttcgggcttcctctttctctcaactctctttagatggaattttgctgtttggaacaaaatgagtgaagaacttagggactgagaccttatatttataggtgagatactctatcagtatcggtactatattaattgtcaggattagggatgcacattttccccatggggatggtgccccgcggggacccgcccctaataggttggggatgccccgtctaaacgggaaacggggcgaggacgagatcaaattttgtccccgaatgttaaacggggcggggacggggatgacactccccgccccgacggggacccatttaatttattaattattttttat

SEQ ID NO: 35048 - DNA, 2531 bp, Cannabis sativa
ctcgagcaccgcccaacgaactaactcagatgcaaagtccttggcctttcgccatttggggaatcaacctgatcgaacagctacccaaaggcaaaggtagtgggcaatacgcagtggttgcagttgattattttaccaagtggacggaagccgagccattggcaaccatcacgtccaaaaaagtgcaagactttattgtaaagagcataatttgtcagttcagattaccatataagacagtctcaaaaaatggcaaacaatttgacagtcaatccttcactgatttctgtgcgaaccatggaatcataaaaaatttctcaacagtggcaaatccccaagcaaatggtcaagcagtcaacaagacactcaaagacaccctaaagaagaaacttaaagatgctataggaaactggccggaagaacttcttgaagttctatggtcataccgcacaactaagaaaacagtgatcggacagaccctattttccatgacatatggatatgaagctatgctgcccgtagaactcgaaccaccatcccacaaaagatcaatatataggcaagaggccaatcatgtactcctcccaaagttgtttgatgaagttgaagagaaaagaaccacaacaaacttaaaactgatagcccatcatcaaaaagtagctcggtattttaacaaacaagtaaaagcacggaaattctgtgagggagatatggtcctaagaagagtatttttgaacaccaaagacattacagcaggtgtactcggaccaaactgggaaggaccatatcaagtggtcgaagttctagactcaggagcatacaaattgggtaagtatgatgaaaagatgcaactcgttttagtaccaaggtattggaatggggaacatttaagaaaatactactagtaaaagtaccaggtcggatgaccatatcaagtacgaaataaaagaacatttgctcttaagtgaatggccttctgggcggaccccgcctaaaggttcagataaaattatcaaatactcaggtcagatgaccacctttgaaagtacgattttattttctacaatttgttttgtttatgctaagctaaagattagatcagatcggcataatagctttgatgtaagttactacagtaacagacatatttctgaccaataaatgaataaagatgttcatttaaattcaaattgagtcaagttcattagaatgttataaatttaccatccaatgcatacaaaaggtttggtcatacccaaaaccccgaatagacaaaaaagcatacttgtgaaaaaacaagtgacaaggagtcataagtctgcttggtcacttggggggcacctatacctgtacaaaacatttggtaaaaaaacaaaacaaacacaatggcacgatgattgtaaacaaggaacgaaactcgttaagaataacaaaagcattcaagtctgggattaaaggctgtccggtcaaccagttgttcaaaaaataaaaaatatattccaagtttaaagaccgcttggccagtcaccttgtcttaaaaaaaaggcctattggccgaacatacataaaaaaaagataataaaaagaaggcacttaaatagcaggagtcccaggctccgtgtacgggtcagctggatttgaaagagccgaagtatcatcattctgggcggaaggggcctcaacattctggttggcaggagaagtggaagtggttgcctcgggttccccgcaggctgcctgagcagcgcagtagtcgagaaacatgtctttggaagcgcccagataatcaaagttcgctttgggattggccttccaaaagtcattaaatatctcgagactagctgtctctaaggcattcaccttctcttcgagcctcgccacctcggacttttggttattaacctcagctttgagttcctcctccatggccttcttttcatcctccagcctacgaagaagggtccaaagaccctctctttcatcttggagactggtcacttcacgagataaagaagcaatatcagccttaagctgttcggttgatggcgtatcctgcagttcgttggtcagctcggtaactttgatctcaaccactagaagtttcttattcacctctcccagctctatccgcacagccccaagttgaacccgtgtgtcctcggcatcctttttggccaagtctacttccgttcgcattgtgtcggaaatggcaaggttcttagcagtaatcgatttagctcgggaatatgcttatgccatcttcaaactagtctttgcagaaaaaagacattaaaaatctgaattaatcaaagaagaataaaaaaaaaagatgtcagaaaatacttaccctcgaaagttctttcaagactcctcccataaccagctccaaagacaagtcattctccgctccagctaactgctcgttcacctctgggaccgtccagctcacatagtgattgagcatgtctctgccccttttggtctccttgtgcaataccaaaggtggggaaggtgccttaacttgttcaggc

SEQ ID NO: 35049 - DNA, 2529 bp, Cannabis sativa
  modified_base (40)..(45): a, c, t, g, unknown or other
  modified_base (697)..(717): a, c, t, g, unknown or other
  modified_base (2165)..(2165): a, c, t, g, unknown or other
tactattagcggcggagtctactgctaatagttttttttnnnnnnaaaaaaaaaaaaataaataagtagaattatggcgaattttggttccgccactgatgctactgctattaggggcgaattttgcccatcgctaataatattgcggttattgataaattttattgcagtgatagtatataataagacgatgtctaacttaactataaaatattagtacgtgagtatataatatttactttggatataaattattactctctgtgtgaatatattgctctatatatataagttagttcctgaaagtttaaatttactaaataaatcagatcaaaaaaaaaaaaaatttacaaaataaatgagttatattaagtgagtgaccagtctgaaaaaaaaaagtggtgagatatttatatataagatattgtacacttgatactcctttacagctcatttcttttgtttttcttttttttttttttaaaaaaaattgctttatcaaatacacacatggtggtgctgagttgattttataagcttttaaaaaatttcattaattgtaagctatttgtgacactataaattatttataagtttgcaaaaattatatatatataatatttcaataataatatacatattaaaactcagattataattattaaagatctgaaaacacaaaaatataccaatattnnnnnnnnnnnnnnnnnnnnnttaagttagaaaaataatttttttaaaagacaataataacatttttacccataaatttatgacactattgaatgatgtctcctataatatatgacctgttaaaaatattcctcaatattatatcactgtagaaatgtgctccttcttttacttcttattaggagattttacaaaaatactagattttgggggcaattttacaattttactaccacatagaaaattttacaaaaatactattcacaccataacttttttttttcttttatactatacacaccccaaaacacatacgaaacctccatcttcaacacctacagaccaaaccactaaaccaacaccaaaacagtcggaaaataactattttttcgatgagaacataagtatttaaaatttcaattctggaacaataacataaaatattactaaaacaaatgagtaagagaggtaaacatctgttttaatcatcattaaaaaaaaactaccacagacgtaacataacccatcatttcaattatttttatactttttcatacaatataaatgtattgggagacccatggtaacaaaaaatgcaaagaaaaagtttttttttaaaaaaatgtcagtacatagtatttaaataaggcagtaaaattgtaatactacacatgctacaataaaaatgaaaaaaaaaattaaaaaagttagtatatagtgtaaaaatataaagaccgcctaagttcaatatattagattattaaataattaggattaattatgatattgaattattaattatgattttcatgtttgtggagatttatttaaattcagaatgtatcaattatgctataaatgtgaattttttgtttctggtgttctagtccggtagcagtgaaaagcgacgttgggccattagagagtcacgtattgtattatttagaatgttaatagcgatgtaccattgttaagcattgaaaatgtcaggaaagtgtcgggttttgggatgaccaaaaacccttatatgatattaagttttttgtcttttgttaagggtaaaatagtcattatgctatatatatatatcctttttctgtcttttatggatattatgggctgattaagagattagctttcattaaataaaagggaaccctagttgggacaattttagaaccctagtttttttcgtttggggaaccgatctaccgattgggacaattttggaaccttagttttttctatttttgtgttatttagagaattgccatgttattcatcgatagggatatttctagttttgattttaaatccccaagaagtattttagcatgtctctaattggaatttcaaatattgtgatttagggctctgtaaagcgtcgagttgcagttccactcaggctgaccggcacacctaagtacgaaaacgaggtaagatagcataaagtatatatatgtgaatgnatgcatgttattatctgtttacactactagcattgttaaatgtgtagttttaagggtgttaatacagtgaagggttttagggtaggtacagtgttaccaacacgagtaccaggtggtacggcgtgcatgtggtacaacactcagtaactcccgaaagtacaataatggccctaccaacacgagtacggagtcggtattatagtgcatatggtacagtggtcgtactttcgttgagaatgttcttaaccattgttgagcttggtaattaggctcaggacgacttaagcataaagccggtataacattgcttatatatgtttatgcatatcttactgagtctattgactcatcagtttgctacctt

SEQ ID NO: 35050 - DNA, 2761 bp, Cannabis sativa
tgtttatgtactaaatcatgcacctcaaactttaatatctaccaaatgacgcctctcgaactttaacgtgtgccgaatcataccccccgaacttcatccatgttatacttttcttactaaaattggacaaaaattcttaaatccaacaatctcaatagttcaggagggatttttaacgactagaaaagttcaggagacatgatatggtacatgtcaaaatttggggggacaaatcctaattaacctttacagaaatttagtccttttgttaggtcttgtctcattattccgtttaaatattgtcgtgtctttgtaaattagtaacttttccccctaaactttgacaactattaaatcatacaccccttaaaattaaaatgaaaaagattcaacattctttttagtaaatcttaaaataaataatttagatcattaaaaaaattattttaaatgattgagaaaattaaaaaaaaaattaaaactaattgagcgatttaaaaaattattttattttttcattcaataatccaattagatacaaaaaattatgttaaataatcaatatttttacaaaataattttacaggaacaagtttgactctattttttatctccaaaaattttaattagtttgagtaaacataacatttttttagtttaatgtataacttttttctaaaatacctttatatatttattgaattttaattattttttaagatatgagtttttaaatataaataagtttaatatcttataaatatattcaaagtcaatgaataatattaataagtagtaaataaatttgacacacattttacatcacctacatttatatctctccacatttatatctttctttgagtcactaaattataattgtttatttgcatgttattttaactacataaataaaaaaaaaactacataaatcaaacatttcttcagttcttgagttgtgttcctatgtgggatattttaagaaatttagttttacatttaaatatttatctacctacaccaataactcaaaaaaaagcatatcgaaaaagagaaaaaacgctacatgcacacaaaactacactgcgttttgataacaatcaaaaaaaacaaaccaggaaacacaaactgtcaccaatcacacacaaaagcttcgaacatctctgatttagcctagatctaagaacacacaacacgaatcaattaccaaaaatgaaagattaaaaaggaataggttagagatgcaaatagagagtaagaaggcacaagagattgatcaaagttcaccccaatcaaagactacgtctccgttaagctatcctctgagaagagcttaatttctctcaatttcttccttttcttttacacaatgactcactctctcactaactctctttttctttcttttccatgaacacacttggcacgaaagccttctgagtcttgagtttagcttttataggcatttggtagggtagagttcatttgtggggtgtgaagaaattggtaagagttgtaacccaagtggagagagaacctggctctcaaactctagagtataatttctctattttcctagttctactctactgttcttgttgttctcaattatttgatatggcagaaatcaaaatctaatctttccaatcttacacaagtagaaaaataaagtatgtattcaaatgagtgagtgagctaaatttcacttcatcaaaaatcaaaatgaactctttatagtctacacaagtggaaaattaaaatatattcaagtatgagtgatacttatatttcacatacccaactaaagaattaccccaaaaacagaaacaaatacctaaaaatcaataggccctaataatcttcaacatggcaattaatcaaattcataaaccaagaagataaatttctgttctctgcaactattttgtttacaaaattcagacaaaattattcgaattgaaaacgaaagtgaagaaaataaattagtcttcaccaaataaaaggcggagtcttgaagcgaaaataccagtgggttcgagggaggcttcatggagaagggcttgcttaatgttgttgatgcgattagttagggtttcttcttcttgtttgagagctgaagtgtcttcgagaagatcatgcatccgatacttttgaccgagagatctaacactcaggagtaaaattccagtcatggcgaagaactgaataaatttgtctttgcgcttcaatgcatttgccacaagccctaattttttagggttttggaggggtgaagctgaggaagatgaagacgccatgactgatggatctgagtgttagaaatatacaagagattaatggaagaataaaataagatgaatagaagacagaaaatcacaactctaagcaaaatattacaaacacaataaattaaatatagaattacaatcccaaagtacaaaatataaataaatgaaaagaattacaactcaaaacttaaagatacaaataaatgtaaactatataaaagtgtgtaaatataatagtgtgtatatatatagatgataaaaatgatatacagtagagatatattttttgagtgtagcgtaatagtattacaattaactaataactcaggcatcttgagttcaaacctatgctctctccctttctctcatccatctctcaccactaatctagccttagtagctttagtagagatatgtagtatatataaagagtgtatatatacatagtatgtaaacatatgttctattaacta

SEQ ID NO: 35051 - DNA, 1644 bp, Cannabis sativa
tttccataaacctcgttgattagctccataaacctcgttgattagctacgaaaacctcgttgattagctacgagctgctcgttgattagctacgagctgcagttgattagctacgagctgcacagcatgtttaaaaatcacgtaatacgcctatattagttagggtgttacacttctgacccttaagtttaagtttttatttgttgtttgtttttgtttttttttttatgcatggctctttttgtacgtaatatatattatgttattatatccttgtcttgtaacccttgcttgggttttaacctttcaatgagtatgtatttattacttttggtgtccctttctatgtttcgtattgttccatataaggttgggaaaactgcggctccgttaagtgcaattattatttatgatttttatatgtttattattatcattatttctttttgaatggggtgctttggaaagtggaaagacatatatgctcttcaagccgcttcttgcaattcgggtgcacgtgtttgcttgacacgtgttctgattttaatgctaaagtggctctttgtttccgttttcgtagcatccttattaactgcatgcaagcttctgtatataaataagtctttagtttagccattttcttctaagaatcctttcgacatttttctgagtaagcatttccttcttgttcatcccttttgcattatggcttcctcactaaaagaccaagttcctcactcaggagatcattcttctttttctaacatttttcaggcttacaacctctggaccctgctttcctttccctgggtcctttttcaagttttcgcaactttgaacccattacgtttcccccactgcacttctcggaggtctgcagctgtccatgctttgagcaggctgcattaggcttggggaccttgctttccttttcctggatcctttttcaagtttttctgtatagggggcctatttgttttacatttatatattttttagcaatttgtaagttcgcgtttgtccttcgatatgggtattttggcaggccactactcccccaatttttgaaatagagtgaacactcttttcacaaacttttaatttttgtaaggaagcaatggtcgtctgtttttgtagctcaacttcctcttttattaatgtccgttttacttattttcctagctttttggcgagtactgttatttatggactcaaactttatactgatttttacttttgccatcgtgtgatttgttttgtatgtatgctttatttgctgcttgtcaccttacgctttacgtggttcgcgtattttcatatagattgcctttcgtaaaaggtcttagttatgtattcatgtcgtgaaaggtcttaagtatcacagattttgcctttcgtaaaaggtcttaaaacaattatggttttgcctttcgtaaaaggtctttagaacatccgctcttgccttccgtggaaggtctttgaacgattatagttttgccattcgtgaaaggtcttaaaacaattatggttttgcctctcgtaaaaggtcttcaaaacatctgctctgtggtatttcatctgatggttgtttccaattttttctggaaatatttgagtagtaaataatttcattgattatttaaa

SEQ ID NO: 35052 - DNA, 2419 bp, Cannabis sativa
tttaccatgcgcgtttaaaaaacttcaaacctattttcggcactataaactattcgaaattttcaaaaatttgcaaggatgatgttgtaagtataacgaacattccgtaaaaaaaaaaaaagaatatatttcgatatatattttcgagcgtaaaaattaactaagagatcataacaggaaattcacggtaattgagacgatagctctattttacatatatactcttccattttccaatatccagcccatatttttagctaggcagctcttggtataactatcattttataagtagacatgttgaataatgacgtatgaggtggccatagaatagacactacaaaaaggtatacaataaaataaagaaactcactaatttattaagcttaattagtatatttcttttttccactacttgatccgtattttaacttaaaaagcaaaagtgtttatatttttaaacataaatagacaaaccaaatttttgaggtgtcaatattatgatttcttggaagttaggaccaatagaatgatagtaatttcagtgcttaattattgttttaatgtgggggatcagaagattgaacattatctattagtatctcatccctactcctcattgggactaaagagtagtatatagtggagatgacgatgtatatgatggaatgcttaagtaagagtgagaggaataaatgagccttttttgggggcaaaagaaaatgcatattaaaatataatttaatgtttatacatgtagagttttgattggttgctatagtaccataatcatcccatgtgaaataaaagataataataataatagtaaattaaacaccacaagagcaatcgtcttaggtcccatacacctttcgagtatatatataaagatggtggaccatcccatacttattctgagtaaacaatttcaatatagtctagtgtttgttatgtatttgttttatttgtgtatacattacatatgaattaatgtgaaacactcatattctttatataaattgagtgcgtagaaggaactagtccgaaaagatgagttaatatttataaagaagataataaaaactatatgtaacacatttgaaggagatgatgcgtgaaaacatggaattggacatagtcattttcttgccatgataaataaatgcaaatactatgataccaaagaaagagcctttctgtggggctatgcatgcgccttccaaaggatcaaaatgcacattcaaccccacgtgaaaatagtactaaccactattgatatattattatatttatatatactacttctttattgtaattaattaattactattgatttgatctattaatcaataatcacgtttattactattattatcaataattgttccctctctaaaagcattactatgctaaaagcttgttatttatttttttttttatttcaaatgtgttttgaccaatataaataacatatttcttttttgaaaataagcgtattgtattggtgtcattaaataacatatttctaaacatatgatacttgtatttttagagtaccagtcatatgcttagtagttagtataatataataattattaaattaaaatatgtgatatttaataattattctattactaaaaaaatactcaacaattaattgaactaatagtaataaaaacatcttagtaacatttatcatgataaaaaaattaaaaacattaaactattattagtcattcaatgttccatatatgttgacctttaatttaagtgtcgcttttaataatagtaaggtaattttttctttttctttttatcaaaatggactaataatagtaattagagtaatatataggtagctagtgtgagaatattctttaaggcaaggagagttgatgaggtgtcacacacacacggccataataataataagaagaagcgtgtgagtgtgatatcaacaacactttgaagcagctagcataatcaaaaatcaactattattatttcaatttcaattaatatataaaattaccccacaaacaagaaaaggtgagctagccaaaaaaacccacttgtatataaaggtgggtgcgtgagggggcttcacttgttgttgtgtgtcttgtgtgtgtaccaaaatatttgctatacctaagctaattagtaagtatactatacttctaattaatcaactctctacactagcaataagtgatcacctatctctattaagggaaaaaaggaattagaagaagaaactatgggaaggcaaccttgttgtgacaagcttggcgtgaaaaaagggccttggacagccgaggaagacaagaaacttgtgaatttcattctgacacacggccaatgctgctggcgggctgtccccaaactggcgggtctccgccgatgtgggaagagctgc

SEQ ID NO: 35053 - DNA, 1800 bp, Cannabis sativa
gttcattaaagaaatctcactagattgctataaaaatctgtaatgcagctgctgttacagatattacaaggattcattctttacttacttaactgtgcatctcctctacttttgttcctaaagtgtggtgtgacaatctataacgcttgttgcaaaccttgttttgcatgcctgaacaaaatacgtacagataaacctttactatgttcgagaaaatgtgatgcaatctcaatcaaaggttcaacatgtccttgatgttgatcaattagtagactaactcaccaaggctatataaatttctagtttccctattctcagtgacaaactaagtgtgtcttcatcttccacaattagtttgaggggggttgttattaaacaagtcacttaggttgttattctgttagagttaggtataacttctctgttttgttagttagtttaaccgttatacaatttaaataacattctatttggtagtaatttgttgagatcaattaataaaagcacactggtttatttactttgcttcgttcctctcacaggaaacagcttgacgagatctaaatacctattttagagttcctaaagtcgaccagagcgaaaggctagagacccctcataggtcgatcactattactcaggaccactcaacttcgtatactatgaaaaataagattttatagatattagaacacaaaatgttctttttacaaagaaagttatacttttgatcctcgtttttatgaaaaagtggaataaaaagggttacttctatctttttcttttctttaaataaaaattaagactttatcccgatttccattcaaaaaacaaaaagattttatcccaattttcttaaaaggtcttttacctcactaacatatatcccagtttccattttagcaaaaattgggataaaatacccttaaaaactgagataaaaggcttcgtctcttgcaataacatcaatagtcaaaactacccccactctatgctgcgtcattcaaatgctcgactgccctgattgtcacccgatgctcaagccctatccgctcccctctcgacatctctttcttgcaccactcctccttaagcgagcctagagcagtagatctctttctctctcattttttctccctttcgatctctctctatctctctcattctctcggtattgttcttttttttctcgtccagtgagggactaaggtggtgtttgaataattttttattttatttttttgtaaatttgtatttttattttgtaaaactgtatattttgatttgtgaatttctatattgctcaaactgtagatttgagatgtatcttagatttgattttatttttatttttattttttagtttgtgtcggtacaaaattgataggaatggtgtaatatttgatttttacactattcatgttggttccaaagggacattatattttaatactgacgatggaaaaatgacacaaaagtaaaatttttccatctattatatatacgtcagtttatagaatagacgatataagtttaaatataactttaaaatcgatggaaatttgctattatagtagtgctcccttattagtgatattgtatctaaatgtaatctcaaatcaatttttatttttatttgcaatacgacattagagtctacatcattatagggaaattatagtaattgccccaacttaaaagactatgttagtttatatcctcatttcaaaaaaatatagcaaatgaccctaaatcataagattgtgttagtaaatgtcctcattttttttttttttagaa

SEQ ID NO: 35054 - DNA, 2078 bp, Cannabis sativa
tagaattaataattaagttaataattaagtttcctctataattaagtttcctctatacttaattatttatttcttaaatttaatacatttaattaaattgaaaatacctcgacctactctacatgggggttgatttcaaatcaaaaagccagttggtgtcgtgccgggatggctcaccccatccctatgaggcataaagaatgaatagggtggatagatatttgatgccctttggagtgaattgggtcgggcagagatggtagtaatccgcaattctcctaaagtacggaagcaagggcagcatatcaccctgcttagtatgggcacccgaccaagcacagtaccccttccgtggactagtcgcccagtggtttggagagggaaggaagcatttgacatcccccaagtaattatgcttctgaaaattcttcatttttgcctgggtcattattgatggaggagaaacccaccgagctcctactgcactttatcttctctaaggaacaacctcagtgtattcctcagtgacatagtcctcaccgcccaccagaatttcgctagtctcagacacaggttgtccatcttcattgaagccaccaaagggcaacctcctagtagcaccttcctcctcagcttcagaaggagtatcaggacagacctccccttgattctccatctcttggacttcagcgtccgcctcaacatcctcttcctctgcagcaggccaagcctgctccgcactcggcattgtggcaagtcgagctatgtgtgggtcagttagcggagactttcgcactgtttgtttagtgcgagccatcatcctattcatggacgaagcctgatctgtatgtctgaaatagttacagtgaatgtagtaatgggcgtacctacaacagtaagatttggacggcctacgggtaaagtgtcaactacatcaagtgacaatatatgtctagttggacggtaaatatcgcctcaccccttcttgagctcccagatgaaacgttcgtagccttcacctttgatttagccggggtaaaagtggtgttccacttcgggttctagagaaggtgtgtgttcgctacttatctcccaattttcgaagcttgaattagaaagactgtcactatatgaggagggactagctcgaagacgaggatgatcctcgtacaaaagttggaaaagatcctggtcgattcgatgtttgcttccccaaaactcaccagggttcatctacaaagggtaggacacaagatgagtatttggctaggataacaaacacaaatagattggttataccgaccaggtccgatcgaaggatcaaaaatagaaattttgcatggcattgaggtttacaacccaaaatttcaaaattacgaattaagggttgattttcagtaagccccaaatgggcaagtgaaagtgaatatcatggaatcgaaatcaaaacgcagttataatcaagcagcatggttaagcatagtcaatatttcacattcctaaacctaaattgtctttggtcttcctagaacaagttcaagaataatcaatttttttacagtggaaacccaaaaaatcaaatattcaagcataaaagaggaaaaagatgaagaacttactcattgttcgaagctttcgagttgctcggatgatgttgttcggtgtttcttcgtgattctttgaaggatttgagagaaaaggatttcttgctctgattcttctaaaacaaaaaaggctaaaagtggttgattaaggatttcagccctatttataagctaattagtgaggcaaggtaatcatttcaaaatttgaatacctcgattatcccccaaaactgtacgttaagcacttaattacctgaatggtaaccgtcaaaacgtgctaatttttaggcgtggttcgatgcgtctgtcagtctgcattaatgagctgaaaattgaagagatccttggtcagagtcacgtcggatcatcaagggacacttcgaacacgtgccacccgttcagataaggatccagaccgagtgaagtccacgtgcaaccataaaggtcccgcgcagacttggggggcaaatgtta

SEQ ID NO: 35055 - DNA, 2787 bp, Cannabis sativa
aattttcttttattattcattatttgatcaaaatttaataatttaatatttttaaaattaatatttataatttgatttatttgataattattaataggtaataccaattaaaaaatgtttcatatctatatatatatccaattaaataagactgataatagttacaccacaccacatgataagagtgttcgcggtgtgggcggtgcgagtttagactatcatatggtactttcaacagctatcgaagccatataagcatcacagtaccacaaacaagcccactattaatatcaatcaaccaatttggcttgcacattgatgctaaaaatcctattgaataaacatatttaaacttgttagtatattaaaataaattttcaagagtaatataaaataataatattgcaatgatgcaagtttatttactaatattttgaaaatgtaagccaattaaatggggaagacattcctaatatactaatattttaaaagtaacataggaagtaaaataaaaataaaaaataaaaaatattaggaataaacttgcatcattgcaatatatattattattttatattactctgaaaaatttactttaatatattaataagtttaattatgtttattcaataggatttttagcaccaatgtgcaagccaaattggttgattgatattaatagtgggcttgtttgtgggactgtgatgcttatatggcttcgatagctgttgaaagtaccatactagaaggtactatataactccactcatgaatttgttactatccaataaatacttaccaatttttttggtaactaattcaagttattaaatggtaatagtctcaatactattttcgcttatttaattaaattatgacaatatttatggtaacattttttgaaaaaatacaagtatatatatatatatgtgtaagtatatattaagtatatatgtgtaagtataaatgctgtgacatcttatttttgtgtttagttcatataaatcttattagatttttcttaaccccgatttttttttttcttacaggcagacaaataaaaatgaagaaaacagactacatagtagctgaaaatgaggaaaagcatataggaagttattggagcttggagtcatatttttagaactatgtaaataaagataaagtataattagggatttatacttctctccaaaagatgtctaattatcaagttttcttaaacactaatatattgcatccagtatttaattataaattatactatttaagtatacataataataatcgcacctaataacaaataatattttttctttaattattaattgtataaagtaaaaaatactagcataaaatttaatatacgtgccagatacgtagtttttttactactagttacatatgcatgcaagtttaaataaaataatttgcgcgtgataaacaatcgccggagggaatctacgtttggtggatgagttccgactgaacaaattttacgatttccgaaaattgttctgttttttattaagaaatatgtatataatttgtttttcaatgtaggatgaacacgtcaaaggttttagatattgttgtattttacaataagaattaaatagatggcatgtgctcaattttcttagtcaaatatgaaatattaataaagttttcgttcagtccaaatctgaagtaattaatcgctgaaaaaagttgatatcagtttacttatttcaatttagtctattttataaaatgtgtaaattatatattaacaaaatacaaagatagatatatcaaattttcataagcttatcgcatgttcatccctgtaaatgctatctgcctatggtaccaagagggtcgggggcggcgggcaatgccgtaaaccttctagggtctgtcgggagtgtcagtgagtggaaggatctcgacaagattgttgcctggcaaatgcgagcgtcttcaatgggattttacgacccggatttgagatcgcaacgtgaaatctacaaatcgataattattcatggcaatatatacagttcatggtggttcgtactcgataatatagtggtagttggttcgtaatctagagtataagagatgatatcggtcttattagtttttaacgttttttccgatggaggtggaggtggcagagcttaggaggacgatggttgtacgcggttgattagccggacaaagtccatgcacgtcatagaattgaatggtggagaaaattaaactaagtaattaccttatatattttaatttattaaaatttgtattcatttcaaattattttacatttaattatcctatttcgttatcaattagatttttattttagtaattaacgggttgatttgtgcatcaattatgtttgtataattatattaatttcattcacatttttaaagtcttaaacaattttaagtcaatcttactttttatattttattaattatttcttttaaattttttttatattattgacagtcaattagcatttataattatattaacaataatttatgtagataatattttattttctaagtttgatttttacaagtttttagttttgaaacgtaaattttcttttgtgattttttggtatttatttagaacatttacataattagtgtgtgtttggaaataactttgtaattactaggtcgggtaattactaaggtggtaattacacagtttagtaattacactatattttaaaatgcaaggtgtgtttggatatgaggtggtaattgttaaatttatcacatagat

SEQ ID NO: 35056 - DNA, 1079 bp, Cannabis sativa
attaaaaaaatcatgtccaactaatatagattaagagatacgcatttatatatatgtttttgtaatatgacctaaaaaaaatttagcaaaaaaataaaaggagaagatataataatttgtccaatcaattatttggaaagaaataaattagttttatttatttattgttttttgagaatgaacaactttattaaacagccacacaacaaggcttatctgccatcaaattagcagcagcagcacaagagggcaaaaaatcagtccacaagcaagaggaatgagtcatgcgactccaaatttctaaagcattagctacagcattacaatctctaggaacataagaaaactgtaaaaaaagaaaatgttgctgaagtgaaattatctctcgaaccaccacgccccagtccgagattggaggggaaatagacttcagagcagcaacaactcccatgctatctgctgaagcaatgaccttcggaagagaccatctttgagccaatagaacccccaagcgaatagcagcatcctccgccaaatggactgaaagaatgcctggaagaaataaaattttagcaacaatcaagtttccgtcatgttctcttaccacagcacttaaaccacaacccattttatcttgaattatggaagcatcagtattaagtgtcacataatcaggtggaggaggttgccatttctttttgacccgaactgccaggtcttgtcgaggtctcaacacctccccaaaataatcttccaattgctcactagcccacctcacccaaacatgaacctcttgagctttattctgaaagaggagtttattcctacgctgccaaataagccaagaaatacctatgaagtaaatcatctcttcattagataatttgccccataagtgaaacaacaaatcatgagcattcggcagtccctgaaaaactagattagcgaatccaaaaagcttccaaatcctttgaactttagtacacaaccacaaggcatgacaaatatcctcatcttcctcgttacaccaatcacaagtagtatcaaatgacatacctctttgttgggttttgtgccct

SEQ ID NO: 35057 - DNA, 2496 bp, Cannabis sativa
ggtctattttatcatttaaaaaaagagagggtccaattggtaacttttgcaaaacatagggtctaaaatggtatttacccttcaatatttgattttgatatgttgaaaaagtacctaaaactgaaactcaaaaaataatttaaactaggagctgttattccaataaaaaaataaagaacattgaatttgagagagagatcagagagtagaataaagaaagaaaaataagaggatgtacaagaaaaagagaaaaaaaaaattcccaataccttcaatctgaaaatagaagatggtgcttgattgatgttgttgatgagaagagagctcgggatggagagatgagagaagaagagagtgagagtaagagtgactgagtgagtgagattgggggtcgcggggtaatggattatggggctttgagtttgaagccctaaactatagcagaaagaaaatgagaagaagagatagagaaagagaaggtgagtgtggtgagtcacgagataaagaaagagtttggaaagagagagtcaagtcaatcactttaataactttattaataaaataataatatattatatataatcacttatcagtatacaatataataaataaagtaaaaaatgaaaaaaattatatatgtataaggtattttggtcggtttcagttttattggtcggtttacgatctagaaaaaaattgaccgactattggcaatttttttggtttttggttcctccaatttcggttccagcggtgttcggtaggtcggtttgaacagtttttttagttttctggattttatgctcagccctacttttgccatttcagaaactctagaaatttttcaagcttttctgcagaaaaacaattcctagatttacccaaaaccttgcatgccatctctgtcattaatatttttcctacgagtttcatccgatttgattttcgacttcaagcattcgaagagatctttgcgtcgttcgttgtttcgtagattacagatacgctcatcgtccctaaacctaactccaaacagtaagtgacttttctccttattatcttacatgtttgttatgttgtatttctaggtttaattacccatttcttagtcagcatctttgttacctcatttggtttacttttagggcttaactgtatttgggtaaatgttagggtttaaatcgaacgtaagttttcgagattctccaatttaccaaattttggtttgataaatttcttcaaggaattgggattgctttctccttgcagcaatgtcccaatctggttcagaagtttatggtccagaagattcagaaatagagtatcctactgaattcgccatcccatacaaacctaaaattccaaaacccaaatgaaaattggagataaataatgcgaaatttagggaacacttagtgaaaaaccaccaagatgatattgctagtcaccaaaaacgcttcttgcaagaaattacagaaggcaggcgccgtttcttgagagatgttgcttggcctgaacatctcagtatgtcttctattcctttggctaagcctctatttttacccaaggtcacaattgcttttgaaccaaatgacttggactttgaaattatgtcttccaagacacataaatcaaagactctccaagaccctaatgtcacattcgaggctgagctaatagagtaaaaggtgcgagccatcggagactatgtaggtaacaccttgaggacttgtggggtcgaatataggcgagactgctgggttagattggtacgtgtcggcgagtacacttgctacgctccagtgcgtcttacaagtgaaacattcgagggggccagcggtgagaccagtacaactggctcgactgggatagtcgcttggagccttgagcacatcaaggctggagtaataatccccctacgagactacttcaaggacttcctaagccacctcaggctggccccattccaacttaatcccatttcatatagaatccttgaaggtttgagggttttatacaaaatcttgatttggaagtgccccactctcttggaaatagagtatctctactctgttaaggctgttctagtgagaaaaaatgcagcatgggttttttactattgtgggactcacacagggaatcgcaagatcattgtagatttgccaaataaaacttccttcaaggatgaattcttctagatgaccggtcgctctcccatcggcacaaccactttccacattataagtaagtgattatttgcacaagacttggttaaattaatccttaacttttattcgggtttagctgattctaacattgctttattttttacagctgtctcaaaatgacctgcccctactcctgagacggccgagcgacataggctcttgttgacactcccataaggtcttaggtcatgcgactttcttcgaaacgagatcaacctaagttctgtggatctcctaactaacaaggagtttacttgtgattattgtt

SEQ ID NO: 35058 - DNA, 1557 bp, Cannabis sativa
aatttgcacgattcacattaatagaaagagagaatgaaagaaaaaacaaccagaatttgcttgagatatttatgcactatgaaagaacagctagaacacaaatttaaggatgaactttaaaaagtatacaaataaaataaaatatcattttgcccaagaatatcaaacttttttgtgatttttttcttttatgtgtcatttatcaaacagtgttgggtaatcattatttcttattacagtattttctgtacatgaataagttattttagtgttacttcttatagagatatcattaatcattctcttatatgggtataatttaacattaccccacatattttattttaaaaatatagaaagttttaattactcgtatgacgctacttctttgtagtgatgttaaattctattagtacttaataaaaaaaattataaactatataatggaaatatttatagataatgattaaaacatactcttgttaaagttatttatttgtttctgaatttgtcctttcaatcaagagttcttaatttatttatttatatacatactagctatttccaaaataaataaataataaataatagaggaaagaaaaacttaagattttttttttctttcattgctttttaagaaacttctttttttttttgtgaattaaattttgtgttatttggtgtagatggaataatataaaagatgatttaaaccaattataagtagggtatatttccaaccaataccaattgtggacagttaaaaaatatattatagaagtatattttattttattttttgaaagagaaaaaaaaaaagcctcatgtttgagaccatcccctattgcctcccatcccctgatgagcaacttcgagaactttcctatggaccactttctcctcctattccccattcctaatttttattttttatttttatgaaatggccccatttctaattttatattgccaaatgaagaaagaggtagtgacaaataaaaaaaatatatatttatatattaataatgaagaacatatacatataaataaaatatttgctccacaagcaagatctagaactttcttccattttttttaaccaaaaatctcttcctatatttttgaccctttgggcaccaaatccacagcttcccacgggtccttaattaaacacactattatccacttcatataacggcttcaacgactttcccaaaagaggtaaaaaaaaaaactgcatacatacagttaatagctctaagaaagcagaagcagaatcagaagcagccattaaagctttcaaattttctttcttttttttcatatctttcacagttttctttctcttcttttcatttatatgctgttgacttttagctactgattctcataaggacatactttattttattttttgaaaaaaaaaacccatttgagttcttggtatgtttgacctatatttcaattcattagttcctaatatcgaattgttcgatcaaaacccatctgacccattaaggccattgaacaaagtaaccaaaacccaagaaaagtttt

SEQ ID NO: 35059 - DNA, 1589 bp, Cannabis sativa
  modified_base (407)..(410): a, c, t, g, unknown or other
agcttcgtaaccaacatgagactctattgttataaagtcatgccgtttgggttgaagaatgctggggcaacatatcagagattgatcaacgaaatgtttgcaaaccaaatcagacggaacatggaggtttacgtcgatgatatgttggtaaaatcaataaagagtagggatcataccactgacttcgcggaatgcttcaagatattaaataagtataacatgaagctaaacccgaaaaaatgttcctttggagtttcctcaaggaaattttttggattcatagttaacacgaggggtatcgaagcaaatcccaagaaaatcaaggtattaatagacattccatcaccgacaagtcctaaagaagtacaagctctgacatgaagaatggctgcacttaacagattcannnngaagtcaactgacaagtgtgtgccgttcttcaatgtattgcgaggcaacaagaagttcgagtggacaaaagaatgtgaagaggcctttgagaacataaaaaggcatctagcaacgcctctaattttggcaaaaccaataattggagagatgttatttctctatttagctattttgaaagaggctattagtgcagctatagtgcgagaaaagggtaagcagcagctacctatttactatgtaagtaaaaggctactaggggcagaatctagatatccccctctagaaaaactcgctttgtgcctagtccacgcgtctcgtaagctacgcccatatttctaggcacatgccataaaagtgttaaccgatcagcctttgagacaagttttatcaaaaccagatgcttctggaagattgataaattgttcaatcgaactaaggcagttcgacataacataccaccctcaaatatccatcaagggccaggccttggccgacttcttgatagaaggtataacttcagaagaaattctgcctgttcaacgagatgcggaaacctagaagttatacatggatggtgcatccaacgagcaaggttcgggtgcagggtaatattaatatcaccagaaggctttaagtttcactatgctctgagattcaatttgacgcatcaaataaagaggttgggtatgaagccctgatcgctggattaaagatagctgaggcgttgaaagtcaaaaacctcatttgccatagtgattcccagctgattttgaaccaggtcctctgggaatatcaggccaaaggtttgaaaatgatgaagtatttagagaaagttcggaagaacttggaaagattcgattacattagaattgaacagattccaagagaacaaaactccaacaccgatgccttagcaaactggcctcgtagaacgacttggatgaattgaactatgttccagtggagatgctaagcaagccaattatatgtgaaacggaagacgtcaagatgatagacagttttcctacatggatgactcctattatcagttacttactcgatgggcaacttccaatgacaaaaacgaggggcaaaaactattgtattcagtgcctcgctacacaataattgaaggcaaactatatagaagagggtattcgatgcccctacttcggtgt

SEQ ID NO: 35060 - DNA, 2080 bp, Cannabis sativa
cgatgaagaaatagaaaggttgaagtgttgtgagaggtaagagtaagaagaagagagaggacagtgaactgcaatggtggaataaagagagagaaagagagagaactaaaatctacattgtctctaaataaaataaaaaaaaatccacataagattatgattttttttttttttaaaaaaactatataagattaatattataatcatgggaagataagataaatagatgagtattatggcagagataaaagtacgcatgacacaactcaatgctcctcctactttcccacaaattttgttgaaaaaacattcagaacattattacaaataacagatgctcgattctagaaaaataacaactaaaaacagagattcgatcattctaagtctataaacgttaccttgctttattaataaaacgatatatacatatctcattcgagaagaaataagatcatggcagatccattaacaataaatcaagtattaacggtagtagtggtgttggtggtggtgtgaacaatctcttcttcttctggatcttcgaagtttggatccttaacatccatgacttccttctggaaacccatctcagagtagttagctatttaaatgtacctcattcatgttcaaacaatttttgtgtccgtttaaacatctctttaacagtataataattaattatttagtttgaataattaattaattggtaattataaaaataaaatttaaaaataaatataaattaaatatgtattttttttagaacaaacgctccaaaagaacccacctctcatagcaaagaattccaaagaaagggggagaagacaagtattcattaattaacaacctcagctataaatacaacttggtaactacaccaccaaaatttgctaatatcgaccattaaattatacataacaagggtatgggctacaccattaataattctaaaacaatgagaaatactggaaacttgaaaatgaaataaactacaatcaaaatactgaataattaaacccagaaggaaaccaaagaaatgttattattcatttttttgcacaacacttgggtaatcaggttcaaaatgaaccttgtcaaagcccaaaaggcaaagcttgagcccaagtgtttctcaaagctagagctttagcaacttcaggaataaagataccttccaaatgtcaaatagcaaacacaaaaactgttgggaaaaccttatacaaggtcatattatttttcatgaaaattattaacatgttatctaaaactctaaaattatatgagtaacggaatacttaaagtgattattgcacatcagaaaatatcttctttcattcaatgacttaacccttgttcatatctatcccagaatattatcaatcattaaatttggatttccatagaacttaccaaaatactaatttcatcacaatcttccacaaagattaatcaaattatgtgattatatgtattttatgcattataaaccctattttttttttaatgaaaataggtgttatgattattatttctcagttttggagattttgttgaatataggtgtgatatgcatgctatatgtgaatttttatatttttacatttttgtgctcggtaacagtaaaaatgagtcggatggcaatttgagtcacatgaatacaaagttgtatcaagtaatttacggggcaatattattgaatctttttgataatcagagtttagcaaaataatagaattggactattttacatctagggttacaagataacttagtggggaagtaagggcattttaatcttttttccctaagtgattagtcaccttatttgaagcttttagaaggttgtgactcaccatttattggtgaccaacagcttgggaagaaaacaaaaaataaaaacgaaaggaaaagaaagtcaaaagcaaaagaaaagtcaaaaccaccaaatcaccttcttcttctccctctccttcgtggtttctgaaccagggccaaaactagaagtttctaccattttcaagcatatttcttgcagaagttgatcaaagagttaaactcctagctcctccaaacttct

SEQ ID NO: 35061 - DNA, 1218 bp, Cannabis sativa
atcatccatgaacacctcaatgcacttcttaatttgatcttaaaatatcaccatcatacacctttggaatgttgctagagcattatacaacccaaatggcattctccgaaaagtaaaagtgccatatggacatctgaatgtcgtcttctcttggtcttatagtgcaatggctatttgttgataacctgagtacccatcacgaaaacaatagtactcttggtctgccaacttgtcaagcatctggtcaatgaatggaaaagggaagtgatcttttttggtcactttgctgagttttcgatagtctatacaaattctccaccccgtgacagttctgcttggaattaactcatttttctcattcttctccctcgtcattcctcctttcttcggcaccactttgaaagtactcacccatttactatctaaaatagaataggccacgccaacatctaacactttagaacttcttttctgaaaatctccttcaccagtggattcaatcttccttgagcatcaatggttggctttgctccttcctccatcaagattctatgcatcacagttgaggggctgatccccttgatatctgccaatgtccacccaatggctctcatgtgtttccttagaactctcaacaacttttctgtctccatagtagaaagggaatccgacacaatgacaggaagtgtcttattttctcccaaatactcataccttaagtgatctagcaaaacttttaattccattttcggtggcttctcgatagatagaactaacttcgttggaatgactcctaactcttcataatattttctatgtaatagcccataaaagtcaagccacatagcatactccatcacttatttaccatctttttcaaccatctcctcttgcaccaaagctagattaagagggtctttaatgtgttccttcgactgtaccaacttgtccacctcatcaattgaaaaaaaaattatcactagcttcaagataagtcatcgccttgagtacgttaaatactatatcatctccttgaactctaagctttaactctcccttttgaacatcaattagtgctttacctgttgccaagaagggtcttctctagatgatacgaacattgctatctttttccatgtcaaggactataaaatcagtaggaaatatgaattttcccaccttaacaaggacatctttgattactcctcttggatgggc

SEQ ID NO: 35062 - DNA, 2104 bp, Cannabis sativa
attttaatgggtattccaaatctgtaaattatgttcttgacgacaaagttgagaactttcttccaggttatgaaaactagaggttcagcctctgtccactttgtaaagaagtcaacagccacaactgcatactttgctcctcctcgccctgtggggagtgccccaatcagatcaatcccccatatcgcaaatgggtatggtgaggtcatcattcttagttctgttggtggtacgcgaggtatatgtgagaacctctgacatttatcacattttttgacaaacttgtgtgtgtccttgtttatagttggccaataatatctctgtcgaatcattttctttgacaagctttgccaacctgcatgatctccacaaaagcccttgtgaatttctctgataatctcgtttgcttctatggggagaacacattgtaggagaggcatttaataacccctccgatataattttccctctactaatgtgtagcgagacactgaatacaagagttttcatggctttttttatcagctggaagttgtccgttgagtagatagttggttatgggtgtcatccaagtagatgagctatcaatcatctcaacttcttccttttcacatatactcggttcatttaacatttccaccggtaccaaagtcaattcatcaagttcgttgtgcgaggccagttttgccaaggtgtcggcattagagttttgttctcttggaatttgtttgattttgaaataatcaaacttttccaagttgttccgaaccttctctagttattttaccatttttaatgcctttgcctagtatttgcctaaaatttgattcacgattaactacgagtcactgtaacacagttgttctcaaaatagctatcaaggcttcatactcagcctcgttatttgaagtgtcaaactgaaatcttaaggcataatgaaacttaaagccttctagaaaaatttgtatcacccctgcaccctagccatgtacattggatgctccatccacgtacaacttccaagtgtccgcgtctcgctgaacaagtggattttcatctagagttatcccttctattaggaaatctgccaaagtgtgcccttgatggatttttgtgggttataagttatgtggaactgccccagctccattgaccattttatcaatcttcccgaagcatttggttttgacaaaacttgtctcaggggttgatcagttaacacctttatcggatgtgcctggaagtaaggccttagtttgcgagatgcatgaattaggcacagtgcaagtttttcaagaggtacatatcttgattctgcccccaataaccttttattaacatagtaaataggttgctggtacctcccctcttctcacactaatgctgcacgaatcacattctccgagatagccaagtaaataagtaaagtctctccagttattggtttagccaagactggaggagttgacaggtgtttctttatgtttgcgaaggcttcctcgcactcggctgtccatttgagctttttgttgcctcgcaatacattgaagaatggtaggcacttatcagtcgattttgaaatgaatctattaagagctgccattcttcgtgttaaggcctgcacctccttcggcttcattggtgactacatttctatcaaaggcttaattttctctggatttgcctcaatacccttcgcgtttactatgaatcctaaaaattttcctgaggagactccaaaggaacacttttttgggttgagtttcgtattatactttttaagtatttcaaagcactctgtgaggtcttttgtgtggtccccactttttatctacttcaccaacatattatcgacgtagacctccatgttcctccctactgcttttcaaacatctcatttactagtcgctgatatgttgccccaacattcttcaaaccaaaaggcatgactttataacaaaaatgtcccatgttggttaggaagcttgtatgctcttgattagggacatgcatcttaatctggttatatctagaatatgtgtccatgaacgtcataagctcgtgtcctccaatttaatctaaaatttcaaaattaaccataagg

SEQ ID NO: 35063 - DNA, 2527 bp, Cannabis sativa
aattcacctgaggaaaatgcaccaatttccgaccttgatgcaacttcatctcatcaaaaaggcattcttcgaaatgtgattgacaccaacacatatgccctaattcctgatgaagtaccatccacacctagggattcaacaaccaattctcccattacttcaaaaacaggaagaatattatccaaatctaaacatctttctaattacatttacaataccactgctattccttccactgctcaccctattaataaaaaattttcttgtaataggttaacataatactttcgacattcgctcgtcgaacccactagctacaaaatggcagccaaagaccctgtatggaaaaaagttagggacattaaaactgatgctcttgaagccaacaacacttggattgtcgtcactcttcctgacgaacaccgctcgattggtagccaaaggctataattattgattactttcacacctttgtccctgttgtaaagtttaataccttaaaattactgcttgctattgcaaccattaacaattggtctatgtaccaacttgatattaacaacgcctttcttcatggagatttacatgaaagtatctacatatcactccccaagagatataaacctaaaggaagtattcctccaaatgttgtatgtaaactaaagaaaagtctctatggcttgaaacaagcctctagacattgatttactaaactcagcaactaccttttatccactgattttactcaatctctttaagatctcacattgttcattaaaaattacaaatgcattttcttgccattttaatatatgttgatgacattatggttacttcaaataatgatgttgctgttatttcatttaaacaacaaattaattcagttttttaacttaaggatcttggccctttacgattttttctaggcttggagattggttgctctccctccagaatttccatatcccaacgacattcacctaacaacttttgactgacacgtgttatttaggagcttctactgcttctacaccaatagaacccaaaatttggttgtcattcgatgttggggaaccattataaaacctaaaaatatattgtaacatcattagaaaaactcatttaattaaccattattcgtcttgatatttcttttactgtaaataagctaagtcagattttatctaatccagagctcctcatcttactgcatctcatagaatattacaatatcttaaaggcacctctggccaagggctattttttcactcaccatcttctattaacttatatgcttaagctaaaactaatatgtccaacacagactttcatcttaagatttttctagatgttgattggggttcttgtagtgacactcgaaggtctatttctgtctactgtgtcttccttggcagatccttaatctcttagaaatccaaaaaagcagtccaccattcatcatcctctggagcagaatactgggctatggccaatgccacatatgagattacctagttcttagccctccttgaggactttggcatccacgacaaagatctcgccatcttttattgtgataatataatcgccatcctttattatacgccatccacattttcgagaaccatatattccatgaatgaacaaagtatattgagactgactgccatgttgtctaggagaaggactaagaaggcacactgaagctaactcatgtcaccaccaaaaacaacatcactattatttttacaaagcttctatttcctacttatttctgtacacttgtaaccaagatgaatctaaaaaatttatatagttcatcttgtgaggggtgtaataagacttagtttaggcccaatacatctcaacccattttattattgggcctttgtattatatatacattcttttttttttgtaaaaatctaatcagttaaagtcttttttggctgtacaatttcaatatatcaaaggtttctttctctttaaagtgtaaaagagatcccaacccaaatctgactgatctcatctgaagcctctcaagactcgagtgtcgctgcccaaattcgaccacccctggaagaagaagtagaagaagaagaactataaatttttggattacttgataaaataaattaggatttaatttttagtttttttttgtttttcttaattttaaattgttttatttttattttaaaattaatttattaatgtttaaatatattaagttatgtggacttagtgagaccaatataaatatgacacgtgtatatgagtatacacataagcagtctatatcgataattaacaatagtaattggatgacaccttaaatttgaaaattgtttaatagttttgaaggttttaccaccaagatttgagtttggagagttaaatgcaagtgaaataataattgagatggtttagccgccaaaaactcaaataatatagtaaagaaaaatatcaacaatatttttcttaaacaaaaaaaaaaagccttgaagccgttaaaagagataatttc

SEQ ID NO: 35064 - DNA, 3117 bp, Cannabis sativa
  modified_base (1043)..(1043): a, c, t, g, unknown or other
gcgatttcttttctgcgatttcaccgtgggtcgactgccgccgtcaccgtcaccgtgggtcgactggagttggggttgtgatggggtcgtgggtcgactggggttggggttgggatgaggtgggttgagccgaaagtgtgttgagagagaggaagagagaggctgatgagattagggatttcaaatgtgaggggtatttttgagaaattaggaatgtggtcatatatgaccaattttaataactatgcatttagggataaaattttaggatattgtaagtatagaattttaaatttcccttgtttaaaatataaaataataaatgagtatagaaaaaaaatgagggtgtataatttttagatagataatgatcaaccatcgagtatataggttcggtctttttacgtttgtatacagtttaattacatatatgcactaatgtaattatgaataaaattaatggttgtgatattgttaacaaattatttaggattatttaagttttttctattattttagtattttatattagttgtttattcaaaaaaaaacttgcttactagttgtattatatactttttgactttacaattaaataaaactctaatctctactttctctttatcttttattttttatttatttttcttcttaaataattatcctaattcatgacaagaaaatgaaattaaatccaagactaaaccaagtcatttgaaattatttgttagtcagagtcaaacacatttattcatcaacaataattaaacaattacaaatacaaaaaaccaaggttatttagttgaatttaatcctactaattatacttttgagtcaataagaatagtgacagagcacatatttgaattagttttcaatccatttagataacttgtatacaaattcgaaaattgtatacggtctcttattactagaatacttttttttttatgaatttcataagagcataagcaccaagtgctcaacaaacactctgatgtgacacattataattaattagtaattttttttttattatttantaaattaaaatatgtaaaatttaatattaaaatacattaataataatatgtcatttcttataatagtttctagtaaaatcactaaaacacaactataacttaactaatttatttattattttattttggaagacttttgttttttcagatttgatcacactataacttataaaccttataacttactcacataacacacaggtcattcttttatccaattacaagttttttattttttttatttttttatttttttaattttgaaaggctcaattttattggatgcttctacatacaatgcaccccaaaaaaacggtaccacaatatatccctcattgttttggcatttaaaaaaaaagttttcaatccatttttcaaaaatatgtactttatatttatttaaaatattttgtaaaattttaaaaaattaaaaatgatttacaatattaaaaacactacatataaaataaatagtttttttttttttttttgaaaatgaatcattttattaaacaaccacactaggtttatctgccattaaaggggcagcaacacaagagggcaaagaatttgtccaaatacaagaagactgagtctttcgactccaacaagctaaagcatttgctacatcattacaaactctaggaatataggaaaactgtacagaaatgaaatgatgttgaagagataaaatctctttaatcaacaagccccaatccgaggaagtagaagaagtagaattcagaccattgataactcccaaacaatcggaagcaacaatgatcttcggaatagacttgttgtgagctaatgaaattcccatccgaatggcagcagcctccgcaagatgaactgacataatacctggaaggaataaagtttcagcaacaatcaagtctcctttatggtctctaatcaccgcacttaacccacaacccatagacttttgaattaaagatgcatcagtattaatgatcacaaagctaggaggaggaggaagccatttctgaattactgttggagtcgtggcctgttgaggtttcaacacctctccaaaatactctttcagctggtttaacgcccaaatcacccaaccgtgctcatcttgaactttattctgaaaaataaatttatttctacgctgccaaatgagccaagacattcctataaagtgtattagtttgtccttagagagattcccataagaaaaacaaaaaatcaggagctgttgtaattttcacaaacaacttggtatcaaacccaacaagcttccaaatcttttgaactttaggacaaaaccataagccatgacatatattctcctcatgttctttacaccaaacacaagtagtatctaaagacatacctctctttgtaagctccactttcgtaggaatccattcattgaacacccgccaaatgaagtttttcatctttggtatgagtttagaagtccaaataaactgccaccaagcttttaaaggggtaatgtttgaacagccagcaatgtttgggtcaagaaaacgtaacttatatccactagcaacagaatattgtccattcttattcgaactccaagagagccaatcgggttgggagatgatgggaatgatgcccaacacccaatggatgtcatcaatatgaaaccagctataaatttcatctatcttccaatttccttcattgttaatcaactagtctaaagtggttccttccggaagaaagactttagaacgaagagtgaacgggattccccttgggatccaagcatcttcattgactcgaatagagcacccatttccaacacaccaccgggagcctttaagtaatatctctctcccccaaataatgcttcgccaaactatagacccatagtgtcctaagcttgcttctaaaaaagtaccatgagggtaatatagagctttgatcactctagacattaagcaattaggatcggtcattagcttcccttgcgccaacatagcttggttaaaatcttctagatctctaaaacccatacctccatgctccttaagtttacacaatttcttccaattaccccaatgaagcttgt

SEQ ID NO: 35065 - DNA, 1156 bp, Cannabis sativa
agcttactgtcaatcttgaaggtccatccagcaaggaagccatgtacgtacctagaaggctcgtgtgtttatatagcttccagattattcgtactgaaagcgtatttttcaagatgatgtggattattattgctggtgatgacatggatcctttaaggcggtgtaaatgtgtcacgataatttaggagatagttttggcaacaatgtaaatgtataaatagttatgaatctttgtaacttgtgggtgaataagatcataattgattgagtgaaaatcgtgatagtgtaaggttgagagagaaagagcctatactagagagagaatcttcttctcgtaatctctaacagtttgtgaggattcttgtaaccttgtaaaaactgatatccataaagatatagttgctactgttcagaccgagatatagagcattgcacatggcacaaactcgttgaacctagtgttattcttttcaattttactgcttaatgcattacttgaatcttgagatctcttggtatattgtttctttattgtgttgtgtgtttgtttggtatggtaaactaaatcgtaagtcattgattatttttgttttgcacaagacttttgcttgttggaacttgttgtgctacaatagaaataccaaaataagaagactacaaacactacgacaaataatacaaacgacaaaatcatggattaaataatattacagtactaaacaaaatatacacataaaatcgagattaaagagatgaagagaagaattacaactcaaagcaataagctactcataaaacaaaatatataaatagcatgtatatatatataagagatgtgagagtaatctcaaaatcacatacacaacaagtgtatagtaggggaaacaccaaacttcaacaaggtcttacaagttacaactttatccaaaagtttattttcccctaccacaagcacttagggaaaagaaaagaatggaaatagctttctggatttattaagcctatagtgtttcttgcaatgtgctctcttgatagaaactagttgtcttaacaaatgaactaaatacctctatttatagtgtttaaggaatcacatatgaaaatcaaaatttcttcaccacatggttattacctaaacattaattggtaattatta

SEQ ID NO: 35066 - DNA, 1182 bp, Cannabis sativa
ttttttcttttttttttttttggccaaaaatggtatttttttttggccaaaaatgatattttttctttctttaatgaaaaatgttagtaaaatgtcaatttatataatattttgtaatgaggaaatggttttataggaaatagattaccatggatgatccaaagtcaaaaagaaaaacaattatttgaaatgttagaaactaaacttattatgtactcaatgttggtgcaagaaagtgggtttttataccaatcaatttttatattatctctcaatgctccattacatgaaatagattcataattcaatcttgtttggtaatacatggaatagattttatgttgttgtgaataatttgtcatgtgaaaagttttgtgtataaattggtaatggaaatagcatatgtgtttgttggtattaatttgatagtagaatataggaatatgtatttatgtatattgaaatgtgagactagtgaaatagtcaagaaaaattagtgtatagtattaatggccttgtaagttttttttaaacaaatattttttaagaatttgtaattagttattctagggtaatgtttattcattcttaagtgttgcaatatatacatatatatatatatataaattagttaaattttattttgtataattatgtaataattattttagtgtaatattaattttaaaagtttttatatcactagtttattagctaattagatatgatacaaattaaaaactttttaaatgttcaatgtgtagaaaatgcaaatataattttgttgattaaactttaagttgtatatatactaactttattattttgtgtaacataaaattaaaaagtttagtttgggatatgtatattagtgattacaattatgtaacgtcccgatttcccgagacgtcacacttactagtccgtttaaaaccatttaagataaagataataaaagacttctttaataaaaaaaactaagtacgagatctcattatttttaaaacaaaatatttatttattcataacctttaaaatataaatcttcacaacattatttgaatcataatatttaacgaaatattcttaaaccaaaacattgtgacaatcccctaacatgtaatccatgccttgagctcgccatcctcactgtttaggtttgcctttacctgcacacagagt

SEQ ID NO: 35067 - DNA, 1509 bp, Cannabis sativa
agcttacctccaaactggagcctcgttagaaaacaaaaacaaggcatgcaaactaagaagaaaagctacaaggtacctgatcctagacgagataatgtacagaagaagtttctccatgcctcttctgtggtgtatcaccaaagccaaagatgatcggcttatgatagaagtgcatgaaggcttctacgacaatcatgtagtgggcaaagcttgtccaaaaagatacttcgataggggtacttttggcaaataatgatcgaagactcaatggactacgttagaaaatgtgacaagtgccaaagattttagaagataccaagagctctatccaatgagctcgcgatgatgcagtctccttggcccttcgtagtgtggggggtagatctaattggtcaactcttgaagggaaaaggaggggtacagtttgctgtcgtcgtagtagactacttcactaaatggatagaagttgaacccctaacaacaaaatcctccaagaagttacttgactttgttgtcaagaacatcatatgccagttcggccttccccagaagattatgtcaaacaatagcaaatagttcaacaatgaaatgttcactgatttctgcaatagacatgacatcatcaaaagcttctctgtcgtggcccatccataagaaaataggcaggtagaagctgtcaacaaaatcctcaaggacaccttgaagaagcaccttgaggaaacaaaaggcaactagcctgaactgctcccaaaggtcctatggtcgcataggacaaccaagaagactgccactctggaaactctattcactctagcttatggcaacgatgcgatgttgcctatagagctagtgacaccgtctcaaaaaagaaaacttatgacaaacaaatagcaccctactggaagagtccctagatgaagtagaagaaagaagagaacaagccaacttacagttgtaggcctaccagcaaaaggtagcacgacacttcaaaaaacacgtcaagagaaaaaaattctttataagagacatggtgctccgaagagtgttcttaaacactaaagactcagcagcaggagtgtttggacctaattgggaaggcccttatcatgttacagaaataattagaaagggagcctacgagctgggaaggtacaacaagaacatggagctagttctcctaccaagatactggaatggagagcaccatcacaagaactaccaataacaagcttacagaactctactccaatgtagcgattctatctactcaaattagagtatagtaagcactagcacccatgacccttcttgattggggtctcccactgttcttcaatagtggcctctatttcaataggtgagcaggaatagccatttgatatctagaagctaaatttatgtaatataggcttgtagattcagtttatgtaagttgcacacagcaaagaccaattaatggacattataactgttggaaattattttgccaggatcttagatctactcaca

SEQ ID NO: 35068 - DNA, 1706 bp, Cannabis sativa
ttttaattgtatacaagcagttctatagtaaaagtatataccttacatcacaataaccacaagatctaaaatcaacggttaaaaagaaaattctctaccgaaagagaacttttgccataagtattaccctatatatatttataaaaataaatcagcataaatatagtgctatgcaaaatttaaaagtctatggcacatggcacgtgctacacgtgtgataaatatgtatataaattaatattttaatatgattaaaaaaaaaagaaaagaaatttaatttgatttatttagatttttaattaatttaagaaaaaaaataaagttaatattattttggatcttctgttttgcaaaagttatcgattatattatttgttttattaaatgataatttagagcttatattttttaaattggtacaaaaccctaaactcaatttttaacaagttttttttaatataactaaattgaagctaatatttagcacaaatatatgtaaaaaaaatataaccaatctaatactaacatgagtcgggttattattaagtattgatttgacaatcattttaaaaaaacatagggtctgaattattatttaataaaataaagaatttaattgataaattttgtaaatacaaaatctgaaatagtatttacctcaatattaaaaagaaaaaacaattacaaataaataatacttaagtattgattacaactttacatttattaattttataattaaaatttatttgtatgtacatatattaataattagattaaacaataatgagtgaacaaaatttttaaattttttttactatcaatcaaatcacataattgacatgtttaaaatactaattaaaaatatttatttgaaaaatataattattatatatatttgaattattggcagcaaaatttcattttttttgcagttagtgacacttaaatctgaagcaaaaaactttgtggcattggcgtcttccgtcaatcatttgtgctatcacatctctttccatcaaaaagtgattatagtcattacattagtatatttgtgacaaataccctacactttagagttagtagcataaataccctcaattaaagttctagtgatagttatactatattgatcacaattttctcctctttttttttcttttttttgaaaaaaaatgtatccattagaagtaaagcagaacacgagacacaaaatcatacagaaatatcaactcgttttcaaaaagcttcctgatctaagtttaagacatacttggccagacgatgagctttttcgtttgctcctcgagatatgaagccaataatagcctgaggtagagaaaatagcaagcttttaatttctatgagaaatttgttcaagtgtatgttatgggaagcattactactaatatagtctataagaattttacattgagaagcaataaaatttggttgaaatgaatgagtgatacaccaagtaagtgcattgtgcaatgcgtgagcttccattaacaatggtgaatggattccacggtgtgactagagttaaaaaaaaaaattcactatttaaaaaataaaaaaatatttattaatttgaaaaaaaaaaaaacaattaaattatggaaataaaaatatatatatattttttttttgtgttggaggtataatttcatgaaaaaataactaatctattaaaatatagagtt

SEQ ID NO: 35069 - DNA, 2338 bp, Cannabis sativa
agataataatcctcaagaaggaatcaatcatcgccctagaaaagaaccattcagtcctcagggatttatatagtcatcgcatgatcagactgcaagccccgagaaaacccaatattggggtccctggcttgatggaccttgggtaaacaacaatcggtcacttcctaaccatgttgatgaggagggcgcctacgacccaaccaggtacagaccaatcgtggaattagaaaatcgtcatcttaggcatcgattggagaaatcaaaccgacgtaatgatgagttagagcgtgaaatagccccagtaagggcagcgcatgagaatggtacccaaaatcaacctgaccttaggataagagattcacggggcaaacctcgcagctcgcaaaccaaggggcatgagatacacctaaagaaactgaggaaaatctggggacgcagcctgggatatgtggaacatcggacgaaaattgccaatcctctcttcaggatcatcagaaagaaactcgcgcaaacccttttagggagaataaggtgaatcacaccttaagagaaagagcaaggtccaaccgcagtcacaggagtgatctatgagaacatctaacttgaagaagcctgatctttgtcaaaaacttggttcagagcaaaaggattcactccatttgcgaatggacgagttggagaataagttcagaaggcatcgagtcacgaaacccagaagaccagtggggcatgatactgttggagaatttgattcggaagcctcaggatcaaagggaaaagacgattccaaaaggctgcccaaggataagaaacacaacaaatatatccctctttatgctgagtataccgagctcagcgaaactcgggaaaatatctacctcgcacatgtacaggaagtcatttttagcgagccaatacttatgaaacatgtgaggcgtaaaagggatccaactaaatagtttgaatatcatgtggatattggtcataccacagaagactgtcgtcagctgaaatatgagatagaaggtctcatatcgcagagacactttcaacgatatgtaaaggggcaggacgatgtccatgatcagctcgatctgcccaataacttgagcgaccaaggattataaccctcctctataggaggaagggacgcctcggttatctcgagagggagcaagtcacaagaatacaaggggtagttactccagtaaagcaattttgtaaaaaaaaaattgcgatgggagtagatatcgacccattatggttgctatatcaagcagccgcattgaaagattatcatcaaccagtagcagtcaaagacaaataactaaaacaaggattacttcacctctcgggatatgtcagggatcatattgaaacaattgtgggagtatgttagggattgaccctgaacatcaaaacctgttttatcaagaccagatgttcctggaagattgataaaataaacgattgaactagggaagttcttatgagattaatgattgtaaatcacattgctgatgaaaattttgaacttctgttgtgaataaaataatcatttctttcaaacaagtaattataaagcgtaaaccctttaaattacttgaggggcgtatatgtatgattaaccggaattaatctggaaatacatagaacaatgaaaacccaccatttcaaaaaataaaaaaaatgaaaactttttaaaaggtcctccaccaaacctttttgacgaaagaggggtcaaactgttataactccctctccaaacctttttgacggaagaggggttgaatcgttataacaccttgatcaaacctttctgacgagaaagggatcaaacaactgtaattttttgtttaaaacctatctgacgagaaaggaaaatcaaaatttaggattagcgcataaagttgaatactaacggctcgcgctaagggaaagtattaaacaagacgtcaaagggtcttgaaaaaatacctaaacctaacacgtgggtagagaatctaagtactcatgtaagcaatgaaaatatatacaagatgacaagttcattaaaaatatatttgagtttgcttaaaataagatcatttctgatgatcgcgaggaggaatcagtgatggctcccaggttgaaggtcgagcagataagctgctcgcgcgcaaagtaagaaattaactacttagcatcagaggaaaatacgagcagtggaaacccctgataaactttatgcatgtgattgtgtaaattctgaatgaaacacaagaaaatatccgcacattaaagttcaaacttaaaagtatgaggcataaaaaaaaaaagagtgccaccaggggcaaac

SEQ ID NO: 35070 - DNA, 1319 bp, Cannabis sativa
  modified_base (1255)..(1258): a, c, t, g, unknown or other
attataactctatataactctaatgtcctctaatgtccattgtccatttctaacaatgggacccacaaataattaaatccacaaatactataaaaacatcaaataattagtgctaattgcctttactaatccatattataaaatgcggttattacagttgagaaccaattttacacattccctcattattccgcaagcctataacactttgagagaacctttagaatttcatcttcatcaagctttcaagtattcctcactccaaggtagaaaaaactttttttttttattttctcttcttctcctcctttgttggtcttattctaaggactatcaaacttccaaaaacccttgaaacaatttttctaatatctccaaaaatcaaaaacactctccttgtgccttgaaaaattccaccaagttactttgactttttctaacccaattttgacttttcttgagtagtaaccaacttgagttgttgagcttgagatgactaggatgaagagaagcagaagattacctaatgaatatgatccccaagttgcttagttcattagatctaagctgatggtcgctaagtataagaacttagacaaggcacatggtggaaaagtgatggcaatgagcttctcaaagctgccataaagagtgatgatctgagagatcgagccttaaagcttaggcctcttctagtacccttaccgagcttcaggctcaaaccattcggggtgattattatcttcctaaaattatcgttcgtaagcctcgatatggtgctcccaagagttcccataatacttgtagtgcctgtagtgcctggtcgagattccacatgaacacaggtgcttactttattgggattttataccctaaataaaacacctttcaatattattttattcgttaccaatagaagattagaagttatttaagctaacatgttattttcatgattatggtttaatatataatttctgataaatccaaaacatatagttatttacaattacagtgatatcattgttgggcttttttccctaaataaaactctttttaaatgtaatattttatatttatttatcattaaagaaacaaatttattttcattacttatttaatgtgctatttggttcatgtgctcatttagttatttatttgacttataagttcatccaaattcttatcacattgatattcttgtttattgtgctgttaaaacagtggaaaaaaatcaagattgtgtgattaaatnnnntcctatgatttatcagtacacaggatttaactgataggataatctgttgggttttatgccc

SEQ ID NO: 35071 - DNA, 1183 bp, Cannabis sativa
actacgtattttattgttgttgttgttgaaaaataataatagtagttcgtctttatacacacaaaagacggtgtttctaattatctaacttatcttatatatatacatactctttacccataagaccgaacaattgtgatgtatattcaagtgaaataaatgttagctcatgatgataaaagaaaatataattactttatattattttataatttttttaaaaaaatttatagttagagttgctctaatggtttttatatgttgctacgaattttagttacaatttaggttgctccattagttgctatatgagtttctgtgtgaaattctgtgaaaaaatttaaaaaaaaaacgatcttaaaatataaaataaaaaaaatccatttaaaaaataataataaaaaaaacaaaaaaatattcataagtgtcgtaacaaataaaaattatattatttatatagtatactcttaggtggcgtttggttagtggtaataaaataaatagaatagaaaaagaaataatctttctgtagggtaaatactattttggaccatctgttttgtaaaagttaccgattggaccttattttttgttaaatgacaaaataaactttgtatttttcaaaatggtaaaaataggaccctaagcttaattttttacagttaatttttgaatataaccaacttgaagacaattcctactacgaataactactgaaaatataaacagttttgtcataacacctttagatcagattattattaaatttattttgacaaaaaattagttcagggtcttatttgtatcattttgataaatacagggtctattttgtcatttaacaaaatagagggtccaatttgtaacttttgcaaaacacatggtctaaaataatatttaccctaatctttattctattcttttgtttagttgtatattaaaatattgaaatgtgattcgaatggaatgacctttctactattttggtggaatgattatttcattttgaaatataaagaaagactatttcaatgtatgatgagaaagaaattaataactttttttattcaattcgtttatgcattttaaattttattctattctattcttattctcattttcatttccattcttatttttatttttatgttttcattcatcccaatcaaaagccaacttaatt

SEQ ID NO: 35072 - DNA, 2940 bp, Cannabis sativa
tatgccttttggtgtccgaaaagcagtgagctcttcgtcctcgggtgccatttttatttggttgtacctagaaaatccatccatgaatgataaggcatcaaaaccaatggtagcatctaccaataacttcgtgatggggagtgagaattcgtcttttgggcaagcccgattaagatctcagtaatccatgcatatgcgaagttgcccatttttcttcatcataatgacgatgttcgcaagccaagtaggatattgaacctcccgaataaaccagcagtctcttaacttatcaatttctgcctcgactttgggaagtaattctggtcgaatccttctttgagattgtttaacaaggatagcgtcttttgatactgccaacctgtgcacaacagcctttgggttcaaccatggcatgtctcgatacacccaagcaaaaacatctttgttctcacaaaggacttgtttgtactgtggtaactctttttcagttaataaagcgctgacaaacacagcctttggatcatcctcagtcccgaggttgatctctattaaatcatccacagtttcttatcctccatcttcgaattcctgaggtgctggttgaaagatgtctatagaatcctcttaagggtttgtgctcgagccttcatcttctacggtcaaactttcttcaaaagagaggtaattgacttgagcaaaattttcttcatcttcttgtgtttcatgcagctgaatagtaattctcaaagatttcttctattttggcacccactgtttttactttttggtttccttgggctgtggagcactttggaaaacaagtctttcgaatgttgacactcgtgtggtggatgtgcttgcttcaagtctatcaaatactgacacctgcggggaaggtgtaggaacatcgtcgctggaaaatattttttgttccttctctgttaactcgtctggttcaaaagaagcttttaaacaatcactattttgatggattgtgactcctttttgcttcttaaaatgaaacttttcttctccgttttgaaggtttttggagttacagaagtggatgaatttttattgacggtaacaacccttttatttttcttgctatctttactaaaggaagctgaaatttgcattttacccttgggtagtgactgattgattttccttagtggtaaagtaaagcttgtcatcagggctgtcatcgaatcttctatcggtgtcaaatctttttgccatactcctcattgacttttagggatatacttgaaggttcgtttttggttagataccttcaagttctcctctttgggctgaggagatttcacaggggatagttgcttaatttggagagagttttgtgcagttgagctttcatgacattttctctcctcaagtttccctttcagaacagtgacattagctggcttgtaaaattttgcatcagcataattcacttgttccccgtaaaagggatttgggtctgcattgacacttttgacttttccttccttgtaaaacttaaatcattggtgaagtgttgaaggaatgactccatattcatgaagccacggtcgccctaacaatacattgtaggatgtatctgaatcgatgacatgaaataaggcctcataattaaattcgcctattttaatttttagtgtgatacttctccttactttttctccagcttggttaaaaccttaaattgtcaatgatgttggagacaattgacgtggttgtaaaccaacatttctcaagatttttaaggggagtacattcacagccgatccacaatccaacatgatgcggcttacgcgaatatcagcaaccatacctgtcacatagagaggtcgattatgtaaggcagctcccaactgacaatccttatcattaaaagttatgcatgtcatacaagaggtatgtgtttcaactgatgtaggtttcactggttctattttctctgtacaaaattcaggacttgtcaatgtgacaacaagtgcatttctatgctgaggagacattcgcagtgcatcataaatgcttaaaatagcagggatgcgctttagatgagccaatatatcatattttgctcgcgtcatttcatcttcaccagtgtttttgcctctttgattgtcattagtgaattcttggttggacgaagatgaaggcttttgaaggtcttgtttagctttttcaagctctttcgcttctctttccttctttgcaaaaaaactttgctgcatgtcttgcaaggtaatttcatctacttctttttcactttcaagtgaggtaaattcaggatcttcttttgttaacaaagtcatgcagcaatctgacacactgtcatcacaaccagttgccttgtcctgtaactcttttggtaaaaactcctccagagttactagattttgttttggttgtttgaattcgtttcttttggaaacggtctttttctttccgatccttttcttattcttttgatcctttatatctggtctaccccgaaatttgactccagagtttccagatggtttccgagatggaaattttgcaggttttttccaagtacatgtctgccatgtactttctaaatcctcttcactatcataccagtcctcccaaatttctagattaggctctatcatgagctcatataacctaggaatatttggatttcctagctttggcatgtctgagtggacttggactattgtaacttccttgttaacttcaaataccacagaaattatgtccctttgtgtgggatcgtttgttatttggtcattctcaattaaggagcttgtatttgtcgccgctttcccaagagcagagtcaatcttaatctcttttctcttgatcatgcctttgataatgtttttaaggatatagcaatccgatagtggatgactcacaatttggtggtaccgacaataa

SEQ ID NO: 35073 - DNA, 1504 bp, Cannabis sativa
aaattcatatttaggatggtaaacaacatacttgttagtaaatctaagatcctagtaaaatatttccaacaataaggatagaagctgtcttcgatcatgagttagagatctcccagtgatgtacatatcagtcgtggtgtcttggcttccagactccattttctatatttgaaaatgtaatcttacttttgtaatagcagttttgtaaatttgttataaaggaatttttataaacaggggatccccatattataatggtacttttgtatggaagttttattgtaatttaaatttgaaagggttttaatttaaactacacttttcataaactaatagattagtgagaaataggtttgtaaaagcatacacgtagcgtccctgagggtcagggcattacagtaggcgtgtgagagagaggaagtgaggaagagagagagtttattagatacttcgagctttagattaggtttctagcttagaggaaactttcgttttcagcctaaggttaaggcatttatataggagacctaataccctaggtttacaattaaaatcccttagtattcgtatagttttttagatatttataaaagaccaaagtgtccttgatcataaatagtatttagctattctgttgggcttttaggacccaattcatagcccatagttgttgtccagatgtagaagtgttcaggaatgcctatagtgcactcctttgctagccaggcccctgtggaggacaggctgaccgaccaaggtgttgtcccaaggctgactggccatagggctggccagctcgtgagagggagctagtttttcacttgatgcctgtttgagtgctggggtcgtcgtttgttcaggtgctgacttggtcttccttttagtgagctgtattgccaagtcatgagaatgaaaattgggataacatttataatttttaaaatctaaaagcatgttttgtaaataaaaattttaagttcttttttgtttattctaaaatttacttatagttgatttatagctatcgtaatgttgatttctagttgcttttagctatttttatatttttaagaaaaatatatttttataatttttagaatttaaaagtatactttcgtaaataaaaatatttagtcgtcaaattataaataaaaaaaatatttgtaaaaagttttagaataatgcatatatatatatatgggtgcactcctaatgggtattacccattaatagataaaattagaaaaatttgagtttttatgcttgatttttctatctaattaaaaaaaatctctcatttttatattatatgggctgagattgttccatcggtaaaaaaaaattaaaaaaaaaagttttttagcaagaaaaataagaaaagaaaatgttaattttgagttaaatatttatctatcaacatatttttgatatagtgtaaaaatagatattttttgatatttctttaattaagtagttaaattaagtatagaaattcaaatttgtg

SEQ ID NO: 35074 - DNA, 1131 bp, Cannabis sativa
tcctgcaccggagccatgctcattgaggatccatccacatacagtttccaagaaggcccaaggtcctcctgagttgcagtcttaggcgtgtggacctagttttcacacaccatgggggtcgtcttcttcgagaccaatgtatttatcaatgaagtttgctaatgtatgtcctttaatagttgcacgaggttggtaggtgatatcaaactgacctagttcttccgtccactcgagtagacgtcctgatgattttaacttcatttgaacttgtcttagtggttggtcagttaacactttgatcaaatgagcttggaaatatggccttagttttcttgagctaagaccatgtagtaagctaacttctcaatggagagatacctagactcatctctaatgaggcacttgctgatgtagtataccaggtgttgtatcccttcttcctcatgcaccagagcagcattggttgcatgctcggtgatagccaaataaacgaacaattctttaccatctattagtttcgataagatgggaggcctatctaggtgatatttgagagcttggaaggcttgcttgtattcatcagtccattaaaacttcttgttgcttccttttagcaaattaaagaagggaacacacttgttaatgcacttggagacaaattttctctatgcagcaattcatccagttaagctttgcacgtctttgattcgtgatagtgactttatgtcttgcaaggccttgatcttttttagattcgcttcagtccttcttgagttgataatgaatctaagaaactttcctgattggacactgaaggcacattttagagggttaagcttcattcgatattcccttaggatgtcaaagcattcctctaagtagggttgtacatatattttcgtaaaccgcctaaatcgaataacccaactaaaccaaaccgaaaaaaccgccaaaaaaaaaccgaaccgaaaacccgacccgacgaaaaaaaaaaaaaaaaaaccgcccaatctgtatattgggcgggttgaaaataaagtaaaccgcccaatgaaaccgacttaacccgaaataacccgaattatactattaattttcaattttatatttttttaaaatattagcagatta

SEQ ID NO: 35075 - DNA, 3067 bp, Cannabis sativa
tgcagggattgatagtttagttattactggtatgtccaatactcaatacagaaaacttgcttgggttgttttattcatgttttgggtaatagattgctcttgagtgaaagggttgtgattttgtgagttaccatctttaggtgttcagactcccaactgcataagacagacagtttttgatgctgtggcgctagattacccttctgttaaagttattgtcgatgctacggctgctgctacacctgaggtacacgcaggtatgagctttctgacgttgaagattagtcattcattgcgctttgttatgctctttgattgtagtaaagtgaacatggtggtggtcttcatatcatctgatatattgatttttatgttcttgaggttgctttgagtagaatatgttgaaggtgtcttgcaattttatatagtgaaactagtaaactacaaaatggaaatagcccttcttactactttctctgttttctgaaaagggtttgtaatgaaaactaggaaagcaaattgttatgtttctaatattggtttacttggaaactagttttgggaatctcttacttctcattataactatttcctaggattagtttctatgcctaaaagaaaaagaaaaccagacaagaaaatatagtagaacaaaattgcagaaaatcaacttcaattgccttgccattatagacttggatgtgtccattttcagggtaacacagaaacaaagtttaccagtgttactagttacacacccatcacccatgcctgcattaagttttgaagttcaaatctcttaagactcataattaacatggcttgctaatttcgtcctaatttattgtttgaaataaagttataggaatgcccattaggggtaactcaattgtgaaatatgctgtacttttctcacagatactaatacaccatgattgatatggaaatctctctttttttttccctgaaccagctaacatatttgatatgaagaatgttggagttgctacaccaaccttgaaagaatggtctgagcatgatgcttgatggtctatggatcaacttgggattcagctcactcggcctcggtgacaaataaatggttatacctatatatcatcttctctatatatatgtatgtatgttcctgtaaagaagtgtgtgctagttttgtgttatctctctacttatgttgtaatgttcatttacagataagcttgtaatgtaaagaaaaaaaaaaaagtgtatgcacaaattgtcttttgaattcaaatttctttaaatacaaatttgacatcatttagcagttgtaatgtctcggtaaatatgtacagggaatggaagctagtatttttaaaattaaattcttactaaaatattaattggatatatcatttttgtaaaagctagtatcatacttaaaaaaaaatacatttagggcctgtaattaaaaactttgagaaagtgatgcattttctaaaactcgacttatgtattcaaaataattttttagtcaatttttttctcatgattatttagtttataattatagttatttaaaattaaaattttaagaatttcaaaaaaatttaacacactgaaaacaggattcaaatgatatattgaacgtgtgagtattttattttatacgcgtgtgaagtatattgtttgaacactgcattctatattataaattattccgaatttctcaaaattttgtaggtatcttaaataactataatatatacgaatatgaaaaaataaatggattaaaaaaaaaattagatgccgaaacaagtagagactagagagtgcatcagtgtattctttttaaaagagtgctagaatcaactatatattgattatatttgctaagttatacattcgtcgatatgtccgagtggttaaggagacagactcgaaatctgttgggctttgcctgcgcaggttcgaatcctgctgtcgacgtttcttttttcatttttttttattaaacataaaaataaatatgtatttttaattaaaacgctactggattcgagtccattccattttcaattccaacccttggtttttatctcagtactcatacatggcgacttctcttcactcaaaccgaacatcgttccttcaaattcttctcgcaaaacccaaactcaacaacaaaaacactcctttttcaacctacgttccgatacggtgcggtccacggagtaacagaggaccactcgtcaaaggccgagtcctaagcatagaagccattcaagctgtccaaaccctcaaacgctaccaaagatcagaccccacaaatctccaaaccacagtctccaaaaccctctctcgactcattaaagctgacctcatagctaccctgaacgagcttctacgccaagatcagtgcgttttggctctccaagcgttctccaccatccgatcggaataccagccggaactatctctgtatgccgccatggtcaaagccctttcaaggaatggcatggcggaggatattgaccggttaatcgttgatctagaggaggctggaggtggggttcggtgggatgataagggagtgataacactggtgagagcggtgattgggtcaggtagtagggaatcaacggtcaggatttacggaatgttgaagaagagtggattgttggggtccaaagatggtgaatacatggttggttctttgagtaaagggcttagaagatttggtgaggtagctttggctgatgagattgatagagaatttgggaggttttataagggaaatgtggtcaaactcactgtgtaatactataattacttgtaatatatgatccactttgtggctgaatctgaaaagatttgtcttttaatgatgtgattgccacaaattacaagaacaccatcagagctttgaacttacaacaatggcaatcatcttatattccatccttattctttccaggtaatctgtttgtgaaaaggaaaatagtgcagcatcagagttatgtttatctaaatgcagatttattaaaaacttgataggactctatatggtgatgatgttgctggtaac

SEQ ID NO: 35076 - DNA, 2149 bp, Cannabis sativa
catatagtgaactatataataatataattcctccattatacataattatctagttagggtttttgctaatccatttcttaattccgggtattacaatacctagagtatagaccatgtatttcccattttatatttcttgggaatgtgcggccctactgaaaaaatacagaaagacatgtagctcggttctagggatcaccccacaaaaacactataaatacccccccaaacacattaagacgggggttgagaattttgggtttcataagaaccaaagagagaaaaactaccaagaacattctctgtaataaatactctcataaatgaaaaaagactcgtggactaaagctcattaatgcccgaaccacgtaaaaatcgcatgcattaaacttcctacagctttcttatatattatttaattggctaccgaaaacctcggtcaacagctaaaactttagcttcaccatatggtgtcttacaagaatgtagaggcttgttaataacaatttctattgattgttgttttgttaaacggtctgctaattaccttgcgcatgttttagcgcaggcttctctgtttgaggttgaccgtgttcttagtggaaattctttacccgcttgttactcttccatagttttggaagacttgaatgaataaagctcttttatttttatttttttaaaaaatgtattataaaatataataagaggcagctcaattttcacaatcaacgtgatattaatgaacaatataaggacataggtaaataattctaaactgaacatttatattaatgaacaatatatataatttatttatattttatcataaaaacttaatatattatatatgaagacataactttccgagcttgaaattacaactagcgcaatagcaatagaaagagtaagaaggaaataagcgaagagtgcaggaccaggagcaaggatcgataaggttaatcttatcactcggagcagaagcagccatgggtcccagcggaatctttggaataaatggaatactactatttaatgtcttctgatcaacaacattattttcattctcattctcatgtagtaatttgttttctgatttctcaaagagaaatcgagcattggctaaggttgatgaaaacaacataatgaagcataaaatcactattgtaacattcacggccatgtttcacaagtaagtgttttggatttaattaggagtctcttgctatattggtgtatttatagatactagtggtgtgaaaaatagttttaaattaaaggatagaggttaatgtagtagcaatgttgcttgtagtctgtttctttttaatcacaagttatatgcatatgtagaaactatatctcaaattacatccattcaattgttatggtatgttgtgctttaatggcttaattataatcaaaagattaacttttgttgttgtccaattacttatttatttatttattttgttatggtttttgccgtttcattatgcactctccaaatgaattaagtagttcattaattagatattcaatgctatttataactaatagactgcgagaggtaatgaattactcctattaattatatttgtaatactgaaccctattaattatccttaataatatcgatcattattattagggttattagtggtgattagcagtagtataggctgatggtttaaaaataattaataatattttataataattattaaattaaaatatattaaacttaatatttgattatacctataaaaacacaatattttgtaggggtattagatattaatggcgctatttagcatttctcatttaccgtgttttgggtgatattttacaataattgcaatatttttagtttttaaattttttatactaatctaattaacatttttttaatcaaacccaagataaatattaattagatttaaaaaaaaaatcttctaatctaatccatttaagtgacaaaattaaatttaatttgtaatttaattaatttgattttttttaattgggattttagtttagaaagtaaattttactattaacttaaactaatacgaaaaaattacataaaacttaaatattattaatcatttaagtttaatggtactacatacaattatcagatttatag

SEQ ID NO: 35077 - DNA, 4150 bp, Cannabis sativa
  modified_base (321)..(322): a, c, t, g, unknown or other
gattcaaggtgtgagcttgaattttgttgattttgctcaagctttggagctttggttgttgattaatgttggaattgatgttattagctctctgttgtggcgatttttttgtctgtaagaagttaattttgggtatgttttggttgagatttgaatgtatggaaaagttggcatttttagaccttaaaattttgtttcctgggtttttcgaacccagtggccgcggccgaattattgctcgccgcggccaaaacgtagcagagagccatcccattttctcgattttgttttggccataacttttgactcgagactccgttnnggatattctttatatcgttggaaagctcgttttgagctctatatattaatctgtaaatggaattataattatgtgattattgagagtggaattagggattaaccctatatttgtgaatcccgaaaattgtgactaggattaccggcacttggccaggagcacccgggattcggaatgtccatgttttgcgggacatcaggtaagatagtaattagcacatagagttatacgcaatggtgcttatactgaatatgatatatgtgagtaactagaaacaagggttagtgttattaccttaaagtgagcggtttattggccgagggttattaacctactgaattgataatgagtattgatatgccatgatatatgtatgtatattgagattatggattgtgcgtttaaggcataaataagctagactcggtaaactagtaccttgagtttaattaaatgcagtctagggttattacccttgaatgttatggaggtaagaaagcaatgatgtatggtaatattgctaatcaagtgaaaccatgaattaggattattaccctcaataggtgttattttgagcatgctgcaatatgttatatgagtagttattttagtatgcaagttagggctattaccctaagtgtttatatatgatagtatatattgaatgcatgcttatatgccaagagttatgtgtataaggcataactgggttagatctggtatatatcaccagaataaaccaccaaaagaacgtaatgtatggattacgtatatatatgaatagggttatgcgagcaaggcataaccgaattaggctcggtaactttaaccgagataaaccctactaaggccttattgtaaatagacatgtgagtgtaacacgtaggtctatactacatagacataaatagacgtgtgagtgtaacacgtgagcctatgccacatagacatatataggcgcgtgagcgtaacacgtaggtttgtattacataggcaattagtgcggtggcaccattaattatgtgttatatatttattgtgtatatggttatttatactgtcttgttgggcttggctcacgggtgctctactgtgtaggaaaggataaatctgtctctgatcagccatgagtgcgagagctaggcaatgtatgtacatgttcgggccacactagaccaagcggattggggtctaccggtgatgtacttttgtaactttgattttccgcttaggtcggctagtgaaaaggacttgtaatattttgtaaaaatattttttgggatcccgaattatgtcacttttgtttgtaaagtttaaagttattacaagttttattttcattctgttttagataaaagtttaattttctcgcgcttatctatctagtaatcccgtattgggggattagggtttcttaatcaccttgggtagcgtgcctaattgttagggcgttacaatctggtaatcactatgagtgaaataatagcttataccaaaatgattgataaggctccccgagctaaaggtgcagtaacatctcttcaggagccttgagagtctccaagtgtttgtggaaccctcgctctttctactcttggataaataatagtgattccaccactgtttggaaaagaaagactacccggggatctggtggttcgggacaaaataagaggttccgagcgaacctaagcataggtggattagggttattcttaccctgagtataggaggttgagtgttgagctagtagagctggaattaacagagtttgataacatacttaggatgaattttctatttaagtattcagctagcattgactgtaagcggaaaatagtaacttttcaaccagagagcgaagatcctattatttatgttgatctgtttaggggttttgaattctggttaatacagctttaagggctacaaatttactttacagtggatgtgtaggatttttagcagtcgtaattgactccagtagacctgaacacttggacctcaggtggtctgagttgtgaaagaatctctcgacgtatttcctgaggagttactggttgccaccacaacgagagatagattttattattaatttgacacttgggactgaacctatttcgaagacgtcatacaggatggccccaataaaaatcaaggagataaaaatataacttcacgggatgcctgatttagggttacccgacccagtgtatcgccctggggagctctggttatttccaaaaaagaaggatggtttcctccaaatatgcgtcgattaccaggaaataagaaaactgacaaataaaaataagtatccattgcccaggattgagggtttgtttgaacggcctcaagagaagactgtatttttaaagattgacttgcgatttggttatcatcagttgagaattcaggaagaacatattttgaagactgcatttcaaaccagatatggtcattacgagtttttagtaatgtcattcagattgaaaaatgcttcagcagtctttatggatctcatgaacagagtattcaagaatttcctcgataactatgtcatagtgtttatcgatggtatccttgtgttctctcagacagaagaggagcatgagcaacatcttcaaatggtattaaaacgactcagagatcataagttatatgcaaaatttaaaaagtgagaattctggttgtcgaaagtgttctttctagggcacattgttggaaaagatagaatcatggttgattcgggaaagagcgagtaagtgaaaagtgggctgaggccaagaaaagtaactgaaatgcgaagttttctcgggttagcagggcattatcagcattttgtcgaaggattctctaaaatcttaatgtcactaaccgggttaactaaaaagaatcaacaatttatatggcctgacaagtgtgaagcgagtttgtaggagttgaaacagtgattaatcacaacatcagtgttagctttgccatcagatcaagaaaagttcgttttgtattgtgatgcatccagagagggtctgggattcgttctgatgtaagctgacagggttataacttatgcctcctgacaattgaaggaatatgaatagcgttacccaacgcatgatttagagcttgttgttgtagtttttgctctaaaaatatggcgaccctaccttttatggtgaaaaatgcgagatttactctgatcataagagcctcaagtatttattcacttagaaagattcaaatatgaggcagagacagtgattggaattggttagggattatgattgcgagattctgtatcatcccagggaagccagtgtagtgacagactttttgagtagaaaaggctctaggtaagttttcaatactgtgataatagctcctcagttagccacagaaatgattatagttgaaattgaatttgtggttgggaaattacacaacttgacacttcaatcagagttgtgagagaggatcaaaaagatattgttggatgatcctgaactagttaaaattcgagatgaagtattggccagtcggcctaagaacttttttatctcaaataatggaatgatactttacaagcacgggtttgtgttccagataacagtgcgcttaaaaagggaatccgtgatgaagctcacattacaccttactcgttgcactcgtatggcttttgtgccatatattatggcttgtctctacttatttaggattgttttgtagtatggtcaatgggcaagagaattaatctattttgtgctcatgatttctacttcaacgattttttcacttttaatagataagtatttcaagtcttattaa

SEQ ID NO: 35078 - DNA, 2401 bp, Cannabis sativa
acatttcttgtagtgactagtttatgataataaactagcaatttagatgaaaatgtgatttaacaaattatttttaaagaaacctgtcaaacaatcgactgaccaccccagctagaggactagttgagaacgatcctccacagtcgtgataatttgaaaaatgatctggtcgttaatcacactctaatcgaacggtcatgattcatccaccaagtttggtttcttgtctccttaaaactcaagaaaacaaaggtacttgaacagatcatttgtaacgttcccgcttcaagcctctatcgggccttcccccacgaatttatggttcttatacacgagtacgtcactctggcagcaacctggactgacgactggccttacaaatcaatacgagtattttcagcgtgctttgtcctcactcgcacgctttttgaaaaaactttctagaggtcacccatcttgaaattacctcgagtgaagcacacttaactgtggagttctttcgtgatgggttacttagaaaacaagatacaccttgtcatctggtagcccaaagaactccacagttaattgtgcttgacctaaggtactttcacgatgggtgacctcttacgaagtttttctaagaagtgtgtgagtgaggacaaagcacactgaaaatactcgtgttggtctgtaggatcagtcttcaattcagcagccagagtaatgtacccatgtataagatccatatatttgtgggggaagtcccaatagaggcttcaagcgggagcattacaatatggtatcaaaactttgacccagccggaagtgtggttgacgaggacgtcagatctcgtaaggaagggtgacagtcagtagttcctaatccataaggagaaatatccagtaagttgtgtaatcctacactgcttggtgtaaagtgcgagccaagatagcacgttacaaggtaatgcccataaggtgggcaagtggtggtcaagtggtgagctggtgggacatgttggtgacatggtgatgcttagtttgtgcgatagtggaattttcgtaaatatttttaatattgtccagatcaggatggcacttggtatttgctatttatttgggtctatgaatacaatagtgcaattgtatttgagaaactctgtgatttggtatatggtgatgaccatatgtctaccaaataaaaatcatatatgttcctagtagaagactaaaagcttagaatgctcttttagggggagtacctagtgttagctctccaccacacctggcaccttagtgctaagtgagctactagcctactactagtcagtgtgactagtagggcagacatatgaggactatgaggggactcatatgtctccatgagttgaaatactcatggacactatcgcgccaacccggtagtgcatctaagaatgctccagccaccttgtgatactttacaaatttttaaattccatcatagatgtgaggagttgaaactaaatcatctgagctttgtagatgatgtaatttaatttggtcatggtgatttcaaaagtatccattatatcttgcaaggtctaaaattattttcttgttcttttggattgcaacctaaacctttgaagtcagcaacttattgttgtggaataaaggatagtgacgttcaacgtattgttaatatttcaagtttttgtaggaaagatgtgccattcaaatacttaggcattcctatttgtgtcaagtggatttcaagcaaggagtgtactattctagctgacaaaatgagagctagaataaaagctcagagttctcaaaacttatcctttgcaggttgtgttaaccaattcaatgttgttgtccattcatttgtattggagctaagacatgattttactaaagaaagtacttaagggtatagaagctatttgtcaagcttatctctggaagggccaacatatgttcccaagatcaagtcctatagcatgggaaattgtttgttaatctaaggcagcaggaagaattggttttaagagagttgtatagactggaatactccaactattattaagtatgtttgggcaactgtaaacaaagaagacaatttgtgggttaggtgagttcattgtgtctacatcaaaggagaacattggtcggggtatcaagctcctgcacaagggagttggtattggagaagattagtttctgtcaaaaattagcttaaaagccagcttattgaagtgcaacaatttactcgtgatagatatcagatttctaaatgttacaattagcttttatatcctgttcaaaataaggtcactaggagtcaaaaagtgtggggtagactcaatatttcaagacatagctttactttgtggatagctattcaagacaggttacaaacaaaggagaagct

SEQ ID NO: 35079 - DNA, 1181 bp, Cannabis sativa
aaaaaatcagaaaaaaaataaaatattttttttactttttttttctttttccttttcttttcttttctttttctttttttttcttcttcttttcctatagacccagccctcacagaactcccagccgtctgcaacccccttgtgccccttgtgcgacgtcgaccaaccccggcgatcacccccaaccacccccgacccccttgtgtgacgtcgaccaacttcggcgacctctctcgacctctaattctaccataattggaaaacaaataagccatatagtaaataaatcaaggagaaggtggctttgtagacattgttatggccatgaacaacatcaactctataaatcattggaatgaaaagacatgtagataaagatcccttttgaaaatcattaaccatgtcaatccaagcttctggtgaagctttcttagaaggaacacttcctcctccactcaatacactacctgcaatcaatttacttagttatgtgtgttttcaatggaaacaaaaaatagaacaaagatagtgttgttgcttttgtgttttattaccaataaagtacttcttcatgacctcattggaagcaacatttctgtcaatttgtgtcatttgcccaatcttttcctccatagtcatacgcttcagtaagtcatttattcgaacatttatgggttgttttgggtctttatacttgtagtaactatctaatgcatctgctatggctaaacacagaatcaatagaagaaatccctaaaccctaaatcgaaaaattgaaactgaaaaataataaataaatataaagattatgaatatttgttggctagggtttgtaaagggatgaaatggaagaagccattggagaggggaagcagggagagcttaaaccctaaatcgcaggggcctattcaatttcaaatcaaagagaaggtgtacctcggtttggtcgacgtcacacaagggggtcgaagtggtcgtcggggttggtcgacgtcgcacaaggggcacaagggggtcgaagagggctgggagttctgtgagggcttggtctgtaggaaaagaagaaagaagaagaagaagaagaaaagaaaaaaaaggaaaggaaaggaaaaagaaaaaaaaagtaaaaaaagtatttttatttttattttttttttatttttgatttttttaatatttat

SEQ ID NO: 35080 - DNA, 3154 bp, Cannabis sativa
  modified_base (930)..(936): a, c, t, g, unknown or other
  modified_base (1039)..(1065): a, c, t, g, unknown or other
  modified_base (1128)..(1131): a, c, t, g, unknown or other
  modified_base (1206)..(1217): a, c, t, g, unknown or other
  modified_base (1493)..(1493): a, c, t, g, unknown or other
ttaagggatttaattatcttttttcgtaattcaaacataagataaaaaaatgttatttttcctattttaaaggtatatctttacttctttgaattaggatcttttgtaagtcttacaatatataaagggtattagatcacataaaaagggattgaatctaagtcacacacccacagctctctctccctctaaagctccacatgcacttatggctccctagactataagtctatttttttttcataagttcttcatagaatcctgccagttctttatctgtaacatattgttctcacaattataatactgaagagagccatagctagaaattaaaaggtctaggcctgtaatcttcatggtattatctcaagagtgaatacaactaaaaagagagtaggtcatacacattcatcaagggggccaaacttctataaattcatgtattattttttactatttattattcttatttacatgtagtgataattagtaattaataaggctttacaatcagttgactaaatctcgagtcaacacgtttcatgtccagcaatatgaatttttttttaccgtggggccactttcacatctagtattgctagacatgtacaataaatcatgaccacattacttcttttatatttctggataccatgtccaaatgaacaacaaagacttattatcatgtacatttttaataaaagtcataaaatgaattttttgtagtagtgactagttaatcttttgggcccgtttgtcacaacttttggaaaagctaaaagttattttttaaaaaggttgtaataaaaaagtgattgtaaacagtttgaaaataacttattgaataatttatagagaagctacagctaaaagctaagttggtacaaccaaacttttagaaaaaactctcactacaaaaaattttacttnnnnnnncaacaaaatttgtgactaaaagtgaaaaaattgtgactaatgataaatcatgattcctatgttgtgactaaaaggtctatggctaaaaatattagtcacaaannnnnnnnnnnnnnnnnnnnnnnnnnntttttagtcacaatacttgttatggctaaaacaaaattagtgacaacttataactaaatactnnnntttagtcacaaataacattttgttatgactaaaaagtcacatttagtcacaaaaagattatattgtgactaaaannnnnnnnnnnnaagtaacagttttttgtagtgtcttttgattaaaagatcctataataaattcttttgtgctaaaaatctatttaattatttattatatattacaaaaatatatatatttttaaaaaatatttaaactaaataatatttaaatttcttattttttattttttttgaaaaaatatttaatatttatatttttattattaacaaatcacatcaacctaaaatttcttgtaaactacattttttttttataagtgattataatttaaaaatattataaantatttttatcaaatgcatataaatatatatatatatattatgggaaaaaataattaaaaatgtataaaaaaataaaatttttatatatataacataatttttttatgtatatttatatgattataataaactaaattataataaactaaattataacattattattatattatcattattataatagaatcttaataccttaccacacttcaaaatttataatttactaaatacacaaattagtttttttcaactctgctgcacttattttttcttacagcagaggctaaactggccctttatttgttttgatcgatgttggttttatttttttatttttctaacatttattattcatgtgtatttaaacttcatatatagcaataatattaataataaattagactacatacttcgtcgtatcagattgcataaatatattgttctcttttagttgcaatgccaattgatatacgtatatacttttaataaataatgtttctcatgaattatttcttttcaaaaaaattaaaatatatcatgaaagaaaaaaggagaaaattcccagcgatatgtagattaatgtagtgtaatatgtgaataatgtcttaattaattatagtgtggtaacttcataactagaaaactagcacgtaaactcgcagtatattataaatatagctatatatgtatagatcctaactagtgcaaagccttccataatttatatatatttatatgtttttcttctgaatatgtccctatagctatatctttctttcttggaaaagctaggtataatgtcttgcaatagtctcatcgactttctgaagattaataaaaaaagaaaaagaaaaaagaaggaggatataataataagttcaacgctatggctaacatttgtagttatacatttcatctacaaactaatggcgaatggtccaaacaaagctagctattatagaatataagaacttataagaagtcaatcagtacagttacactctctctatacataataaatataaatggaccacactcatcatgaataattaaactaaagggatccatgtatgtggtaatattaaaatctatggtccaaaccaaggatatatatcggcatgcatgtgccgtaacacatccatatcctacaatttcaaaggtggaaacttataataccatatataaaaatacatgagcttatttgtcatttgattttaaaatgaaattaattttatgtgttttacaatatgcacaccctacctattctatcctattaaccatatacacttccaaattcttataattaaaaattacaactcatatattttaatttaataatatactaaatcatgatcaccaaaacgttatgtcgtgatggataataacttaattatgacaattatgctttatatattatatacatatatattgatgagtcatgactgatcactccatctgtatagctatatatgtatatatatatatatatatagagtctggcgggggttgcaacatgtaatggctctggatggcatggctttcacgtgaaatctggaccaatttaattacgtctccatttcacaacccccaaactcaaactcaaagtggttggaattggaggccgggtcatgcacaactctactactactctacatatt

SEQ ID NO: 35081 - DNA, 1973 bp, Cannabis sativa
aaaaataataaaataatatattatgtatatcttttctactatcaaactacagttgaggtaggccttaggcccataaaatttatatcatatacaatatataacataaattaattgattgaatgagtataccaccaaactcctacagtacacttgcatgacctagacggagacaagctacaatatattaacttaagtgttatattctaaattttacatattgactgctactatttctacaattattcatataaattgattgctaatttatgcaatatttatatattgagtgctcattgttctcacaatcaaagtaactaatacttacattgaattacaagttgactgcatcacatcattaacttgagcattacatcaagagacaaaaaaaaaaaaaactggtactattactttgtttattacttaatgttaactctacaagttgactgctacaatttggaacttagctaatctaattacgacatgggctctcaacatgactgctactataaaagcaaggcacaccattctcttgaaccaaatttctcatttcaaccacttcttaaagcctaattgggtgtagtcaaaattagttacacaagttcaaatgacacaaatatatctacacttaaacacacacgctaacgtgcccgtaaaatgggacacactgtataatacaacgttcatgtttcaaagtaccaaaagtgttcaactatgctagtcggacattctccgattcaactaaacatagaacacaaccgggcaaacaatatatttcaacaagggacctcataatttaggcttttcacaatcaaaattctaaagattatttgagtccaaaatttatactctttaactcgagcaaagctcaacttaaagagtaggaacaaactgtcgatgccaaaattgggctcaggctcaatgtcatatgtgataatcccaaagaatgctcaaaccagattgggttaggctatttgacttaattacgatggtacgcttcacaacaccaagcccaacaggcccaaaacaatacaatcaagtcacacattaaattacccatgacccatcattgagctcacaatgattcgacccgtatacgagaccgagtcttatcactcatctaacaatctttgaagaggtcagttaattgaccacgtagataacgatctccctcgtaaagtgggagcggagcacttcacaagggaggtgagcggtcatgagtaacgcctttccatggatgcctataagagccactcttagttactaagagagatatataaaatttaagtcatctcaatacttcttacttatcgttcaatctcattctctctaaaatgacatacttatttccgcagtcaagataggtggtaacttagttcgatcattgattctcatcaattttattacgttgttaacaatcttgctgacttgaccgtcagagtccctttggtcggcaccatcccagtgtcccaaggtttcccggttactctcttctttgttctataggttgtcggtgcccgcgtacgatcatctttgattgattgtggattttagcttcgacaatcagtatttaaattaatttactacttaaaatctaacaattatctttgttaaataacgaatatacaaatcatggtgataggacctcattatatgacgagtattatcttttatgtattatgatatatttattacataataatatacttaatgtggcaatgtacttaagcgaacaaatcctaaactttatgtttattctggtcatcttacgataatttctcaaacgaaattaaggtgcacgtaaatatgagaaaatatcaaaattagagtttcgttgaataatttttagttgtacaactaaaaactacataaggagtagctaaatctcatatttactttacaatccttaaatttatgttgcaccttgactttagtcaaggatatgttgcatacttaatgaccacttatcacacctt

SEQ ID NO: 35082 - DNA, 1211 bp, Cannabis sativa
  modified_base (29)..(29): a, c, t, g, unknown or other
tcttgcttatgacaatgcaagtccaatanatgtgtaactctcatagtccacttatctcaaattactagatgattatctcttataatccaataaaagatgtaacttttcaaaattcatcttttattatctcataaagtgagatgttcaccaccaaattaaaagaattcaaaactattctttattcacaaaataagtgataatcattttcacatcaattgtaataaataatattattatatattattatcataattatataattcatatattaatataatatgtatgttactaattaacatctcatatgtaactatacacataatatatatattaattacacaattatatatgctacatacctcacagatatataacatttatatacactttaatatacatgcatgatatataatatgtactatatatatatatgcacgtcttacacagaaaataattaattttacatatttaatctcacaatatatatgtatattatattatatctcatcatatatacattacacatataaacatgttgtaaatttaaatatcatattctatatcactatatataacaatatgatataaactcataatcacatatatatgacacatatacatatataactcacatatatgtaattctttatatattaacatatacaacttttctatctcaacaaagaaaaatatgttaatacatagattactattatttaaaatagtaaaatacaaaataaaaaactacaatgcttatctatggatgattttcacttaaaatctcttattcttgtattctcacaatcttgatttatctccttttctattgaaaatggataaacttttgattattagagattttattataatggaagacaaatcaagatacattacaactctattgtaaaataatacaaagattaagataagagattgattaaataaacattacaaaagttacaaatgtgttactaaagcgataatatataatctagtggcgaattgttatattatttatcaataatataatgtaatattgtaacatatatatttaatcaatatcttattttagaccttatattattttacaatataattttaatgcatcttaattttcatccattgtaataaaatgtttaacagtatcaaaaatataaactttgatatttcatctatcaagaaaaaatatagtatatctttatatattaaaa

SEQ ID NO: 35083 - DNA, 1318 bp, Cannabis sativa
cactctttccctacacgacgctcttcctctctctctctctctctaaaaggaaaacaaagagcaatttaaaccttattcagcaatttagcaaggatttcaataagaaattaagtggggatttgaaagaaaaatcaaggtaaaccataagatattttcttctctttcaatttgtaagaaaatattggttttatgtgtgacttgaggaattcagttagttttgtatgattttttttaagttagaatttgtttatggttagtttcaaaggcaagtagcagttgtaggttggtttaagtgagtttgagtttttaaactcaaacatagcttaataatgatagatttttgtttcagtggatttttggtatctttaattgtttaattttatttagaatgtatgtttttgatgttttggaaagtttgagcaagtttgggtaaaagattgagtttgtaatttctgcacatgatcaggtcactgtttgaccaggcaggactaggtaaatggttacccgtttggggtaatttttgggtaccttaatttttcaacttttcttgatactgagggtattgcaacactatttatcgatagggaaacttcaaattataagtttaagtctccaaaagtattttattgagacatttactagttttacattaatgtagcttagggcctctgatcgttgagcattttttctacttaggtagaccgacacacctgattatagaattgaggtaagattagtaacacatattcacatgtttagcatgcatgatctagaaatccaacagattaatatatcagggtattgtgaacacagaattgcactcaaatacaaacagatatatgtgcagcgttgcaaaaagtacaaactaatgctgccaacactagttcgcctagagtactaggtccatgtagtattatggtttgttatgcttgtagtatgaactagtattattaccaacactagtacgcctacaatattgagtacatgtggtattattgctagctgtacttagagtatgattgatggtaccagcactagtatgcataagagtactgattgcatgtggtaatatagttaagaacgtttgagactcatacgcattagaagcgtgttatagactaaagctaattaggtgtacggatgcctaattacaagtcagatatatgtttatgttttacgcttttcttatcaactcgcaaatatattttcatgtgtaggtaaaggtaagaataaagctgaatcatagtgtttggagctcagtgaagattgtacatatctaaactaatagacatggtgtgttcggatcttcaaaataatg

SEQ ID NO: 35084 - DNA, 1897 bp, Cannabis sativa
  modified_base (1106)..(1111): a, c, t, g, unknown or other
tttccccaaggaaagctgagatgtcaataagagactcctcgagtttaaacctcgcctgagctaaactcagcgagatgatgcgaatacgaccaagtctaattgtattcacgaggctcgcattatgtagaaccaagaaacggatttgactcgcatatatcatgatatatgcgagtattctctcgattctcctgcgaaaaacatagagatcgattctctataaagcgagctggtcttgatgacccaacagcctcgataaaccgatatagactcgcatgtcttggttttatcagctcgttatacgatatccgtaaatgcgactatacaagaacgcagacatcttagactcaactaagtgttaggtgtattctaagcccacgagcttatgcaagaatatgaacagccaactcgcacattagaagtcgcatacgttgctgtatttagtgaatagaaactgttctttatttattaatgtttacgttttttagcttaattattataaatcaatgcacaaacggattgacaatgaatgcagtccttgtgtaaataatcggacacttgctttgtatataaaggagtgatccaccgtgaaatgggacacctagagaatccttgtaacagtggactaagcagaccgtgatttgactgaaccactatattcccctcgtgttcttagtatttccagttttcattaagtatttgtgttcccagtttgaatgctcgtcattctaagttgaatactcgcacttattcattatattactattataattattattgctattatttatttggtgttgtgaaattctttcaacaacaagaatcattaatcatatcgaagatgcaaatttctttttgtttttgcaaactaataaagtatatgcatggatttttggaaaatgtaaaagtcttaaaataattggataaaaaaagttttagaaacgtggtgcctttagattatttatgctgattattaaagaaaatgaaagaactcatcaaaaatgattgttaccaaaagtttacggtgtttgtattgtattattggttttttcatatattccagatcttggaaaaaaaaaaaaaaagagaaagatttttttttttttttnnnnnnttttttttttaaaaaaaaggagtgtcacatcaaataatacataatatattaattacaattttaaatgaataaggcattagggtggatggagcaggtgagataaggtttcaaataaaagcaattggtttttctaattcttaattaaggatattaggatactcatcatatcctaataatgcataactttaatcataataatggagcacaactttttcgtatgttatatatttgtgatatctcgccccaaatattattttgaagttccatttatttattttatcaaactaaaataaaatgtatgtatgcctttcaaaataaataatatcactacgagaaggattgacagagccaaaaattatatagagccatatacaaaaatataaagaagtaaaattttgataaatgtcatgcaaatttattgcacaaaatatggcactaaaacaaaaagaaaaaaaaaccttttaaagcatgggataaatactcatagataagaagaaatacataaaaatataaaaactcagtatataaattttatttttatataatcaaaaccaatttcttgatgaggaaataagtttcgtgatgaaaaaattaatttcttgatgaaaaagttagttttttcataaaggatctttggtgagttttgctctgacaaatcgtcaccggataggtaaaaaacttaaaaactcgtatgtaaattttatttctatattgttgtcgctaaaaatagccaacaccagctcatcgaagaaatcaaaaattataaattaaataattatagggtct

SEQ ID NO: 35085 - DNA, 1505 bp, Cannabis sativa
atataatgagaaaagctgtagaaattttaatgcatgagatttttacgtggttggggcattaatgagccttagtttacgagtctttgttatttatgagagtgtttgggatatttgcaccctatgtttgcctaggagaatccctaaatttttcatctctggcagacatctggagggggcctctctccagcggttggggacccccattccctccttttatgttagggtttggtttggggctaactgttggatttctctttttcagaatcttactaatctcaaggcatgtctgtccctacgaccgaagtgaaatcctcaagcaaaggatctaacactatggccaccttggaggaggtgatgaagggacctgtggtccaggagaagtacacttgccgatccattggttgggaggcagacgagttgcactcaactctgacttgtgcccaccaactggagaagattgtcacagttgccggaatcaagccctctgcttccggagtcttccatcgtcttcccagagacgattacacccaaccgtaactacggtggctttgggtcttggagtcaaagccacctcatgtccggggcgatgttacccctttatgactattttatagatattttagtttttattggccttgcaccttacaaacttatcccccaagcttaccgtctgctctcaggcttgtacgtacattttctatgttgccaagcccagcccggttgaaattctttattttttatgaattatcatctgtctccaagaagggggacaaacttaaagacggttttttcaaactttaggcccatcctgccaacgagggctcggttcctcataattttcaaaaaaatgttaaggagtatcgccatcgatttttcttctcctccggcttcaaggccattgagcgcctactcaacttttccttcggcacgccaaggtcttttccacctatgataaggacggactgaatgtgggggacttggttacgactccacactgcaggaaggccaagttaatttcagagagccagtcagtggatgactttaacctgtcgaaggttctctgccccaacgttcgtaaccctgaatcggagaaggcgctccgggatgacatcatcacgtctgctgaggaccgatacaagaagtacctctttaagagggaataggagttggccagcattaaggcccaggcagccgcggggagagcccttcgaattgaggctataacggagcagacgacctcccggcccaagcttccattctcggtccctaacactggggctccaaacaccagcacttccgaagcttgtaagtccccactaactattcatcgtgtcccttccgttcaggactattctggctgtaggccagtagagtttgatgaacagcttcagaggtttaggatgcccccttttcgatggggtgatcatgccaacagtttattttttttccaaccttggtcacttcttaggccggtcccggatggggtccggtcctcccgcacctat

SEQ ID NO: 35086 - DNA, 3360 bp, Cannabis sativa
cccccagcctctagaggtagtggccggctagattggttgttctttggccaggtagattgttgattctatggccgaccagcctgctgtggccatggttggccagccctttggatgccaagtggatgctgtagtttgatcctttttacactcaattggctttggcccctgatattattaccgtagagcattttatgcactattgtcaatagttattcaatttgtttctttgtaacacttcttagaggtggtattgcgataccacatctatgtgttatgctgtccaggattggacaccgagtagctatcctctatgcccctgctttctcgtaagatttttgtttggatgtatgctattgtaggtatacccatattggatgtctagcatgtctatctctttcgaaatagggatgcttagttctttgaagaactaagcgggtaccaagtttgccttggctgtcaaggtgcagttggctagtcaatcgagtgcatcgattgttacatcgactatgggtacatgccttttagtacaacctttgagctgaaaagtcttaatattagctcaaataggtcatcatctttttacattgagctacatattcacctaggacatgatcgatgacttgataaaactcgtggtgtatgtctaggtgttcagctcgtactttcaatgctagcttgaggccagcaatcagagcttcatatgcaacctcgttgttagaaacttttcgtctaccctttattgccttgtgcaaccattgcccccaagttttctaaggatcatgcttgcatcgggcaggttgtcaatgcaccttctaggttgagatgtcttggtcctgctctcactttttctttggttcttgcttttatgtttagccatgaagttggtgagagctaggtcttttattgacattcaaagttgacaggtggccttatattggtcgagccttggtggttcacttaagtggttggccacgtgcttcaagttttgatgaaacctattgccatgaccggttggcatgcattgctttgggagttttggtaggagagtgaagcatgcacacttctcctccttctcctttaaacttcatggcgtaagggaatcgttgaatttcccttttttgccattattttggccagagccatcgttgttgcgcttgcctctaatattctcattgttggagaattgggagagatcttctatgttggtgggcatgtctgacaggacttggggcaatgtgatgccctgtgtctattcaacattcacttgccctcttgtttgggcttgccgaatagcttcttccaactttatgaagccatcaacttgctcaaggaactccttcatgttactcgttaggatctttttgatatctttccagaattcactcaatggcaagattcctccaagtatggtcgtatatcgaccttgttctgttaggcctttgaccttggtagcctcagccatgaactgttgaatttagtctttctaaggttcagcttgccttgctttatctctaaaagatcctctaattgtgaaggtatttttcttgagacagagaactaaacatagaactctcgagagaattcttcccaagaattaaatcttccgggggctagctcgaaataccactattgggttatttcagtaagagttgctgaaaagatttgatatcgcacatatcttgatacttgttggagatctatttggatctcaatatatttcaagtgtattagaggatcttcttccctcgtgtacatcttttaagttgacatcttgaatttaggcaagggcaaggaactggtgtatgccgagaaaggtgaaccctttaacatattcatgttaaggtttgatggttttgggctagccaagcccttgagcatgtctagtatttaattaaactgtgcttgcatagagggatttattgcttgaagggcctagttaattggcccgtctttattgagctacatccttggattggccagagcctcgtaggccattccttgggagagggtatattcaatgccagctagcccagagcctggcagctgttcatggtgggccatccctgtactgggcaaggcgtagccgcccactcttccttgactggctggtggagcctattcattgacatggggtagatcacaccaattgctggagtttggtagatctaactatctgaagtgattatattcaatccacgagttgttattgtcttgggtgtttccacccattcccaggccaagctagttaaagattggcctttgggttactccctctgggatgctctaggttaacaactcaccctgttggctagccagaggttcacttctaaggtgttggtcgaccatgggttggacaattgagggtgttgttgtaccagaggtcactagccggcccctagaccaatggttgatagagtttggctgctctcgtcactaaatcttcatggcaagacttatcctcctttaggcaggggaaggtctatcctggttccaaaggaaattggttggaaaatttttctatagaccctccttgatatgttgattagtctcccttggagaggatctttaatgaaatcttgacctattctagtagttctttcattgatctgccatattaagtcatcaacttctctatttcagcaatctaattctacctgttgagatcagagcatgtactcttggtcatccatccatctaaaaaattcaagtctctattgtacgaatgtattgcaaccaacagcgcatgatttttcagtttggatgacttgacaaacggcctttctatgtcttgctaactcgagatcttctgctaagtctacatgtgactcgcaattggttggcttgccaactcttggcctcatccctacaacataatactagcggccaggtttagttgtggtgcttgagggctgctctacgttggtccttcctttagtgggggcgccagtggatggtcctctctaggaggcatgggtaaattattcaaacctacaagaatggttgtgtctacctggcaagctgtggtgactagattcgtggtgcctgccgacgtggtagggttggccacatctgtcgggtatgtggagattccaaatgtgactagaatatgaacatcaggatttgcagtcattgggtcttgaggaagacaagatgaggctgaagttgtagctagatttctccttctattaaccattgcatttgatcagataaattgacaactcgctctaaatgaaagcaccaaactgttgacctagaaatttggcctactgattggggagtcatatttaatattgatgcttgccacatattacacaataagaataataataaaaaataagacacaggattttataaaggttc

SEQ ID NO: 35087 - DNA, 3557 bp, Cannabis sativa
  modified_base (3342)..(3345): a, c, t, g, unknown or other
tttatacctaccaactaatatcccaccaattaattctgagagttgagatatcaatctgcaaagaattgtaatttcaccttatctataattttcatatctgaaaacttcaccaacataaggtaataagtaagacttgtttgatctctgtcaacattgattgtagagtaatattttggaatgtttgtaatcttcattttcactcttttgatattgtgtacttaaatttttgtccattagctagatacattaatcttcaccccctcattatattattataaataaaaaaatttgaagccaaaacaaacattaatatatgtttgtagcccattgcaaaaaaataatatatatatttggttgttctattccaatacatttattttcccaggagactagcgcaatgagtgggtgcatatgagctacaacaagagacattattgtgaaaatatcccacatcggaaacagagaatagaaaccaagtgaatcaacaactataagaacacaagtctttagtctgaaaaattcacgcagtcacgcggtgaacacagagcgaactattctttcgccttttactaaagaataccgtgtgttcgccgctattagtggcatacgcctatttttggagaggtttcttcattagaagcctctataattttagttcacaatgcaaaatttcctcaggcgtatttacatcaaattttaccacgaacatatcaaattgctcaaatcactcaaatcatctgcattgcactattgagaaattgaaaaataagctagttggtttgaaaaaatggtcaaaaaacggagcaacacgaacattcctagccgttaggccttagtgaaaattataagaccgtttctttctagaaccctcaagccaattggttttttttgttaaacttgagaattgctaggagttagtctaagtttaaggcaggaaaattgatggtatgactaaaaacctgataagagaacttgcctttaagaccctgcactaagaaaaaagcttatgcaatttaagcagagaaaagctatttctttttaataatcagggtgtgcaggttccattcaattcagcttgatgcaactcaagtagcctaagaaagtttgagactttttagcttctcttttatctttatgaacttactctactgcttttggatcgttatagatatatgataactactgacaacagtgattaattgttacaattttgtatggcaaagatgccatcacattcaccatgtgaatatttttcctttgggaatgaaatgaaaatgtcccataaaagcttttctccagtgaatcgtttttatttatgttggtaccactttctaaccccatgatagagttttgagatgaggattagtctctggtaataaaatttattgcaagctcatttttgaccccatgtctcattaaactaattaatttcggttctaatttggtagaagctactcccaaaggaaatgaaatacatattgtgagtttgttcctaagagtccctgcaataaaaatacaactcaaaatataatggaagatgaaagctaagttatgtagtaacaaacaaaatagaagcacatgtccaaaaaagaaagaaaagaaagttgtagcacccatcaaaatcagtttcttcatttcaacagatctcagttcaagcaatgcttgtgagtgattgagtaatattattttttacttaattcttctcaaataaaggccagtgagctgagctttgaagttggcaaagagtgacattgattagaaaaagatatggcagcaagaaaaatggaatttaatttaaatatgaacaagttttaataaaatgagtcatttctatgtactagtttcgcaacctttttctaagaaaaagtgtaaaagtatgtgttctacaaaattgttttctgtgaatctaactatgtcaacactacaaattacagttatcagttcaactgagatgttttggagtggttgaagacttcaaagttgcttctttgatgcctgaaagcgatcttcgaagagccttcttaccctgaacaaagccagataatccaaaggccatgttgatcttcctttgtgtgtttttctctttagaagaaatattactattagagtttactaaaatattttgtagtagagaatgtgagaacttgatgattgagtatggaatgcatacctatctaaggcttgttaaataagtggttctaaagacatttgataaggtttgaaaaatttgcaagagacgtaagtatttgaagttcacatggcattgtcttctaagtcaatttatgaaagttaagttgtaattgagacatttatacatgtgatctgttcagccattaccaagagaacaagcaatattatagcccacttgtcctataagatttgcaacaatgacacatatatgatgaactagctcatctgatctttttttttttttttggttaaaccaaaagagcaagcaagttaccctaaaaaaaaagagcaagcaagttatgtagacaaattagaaaactagggtgtaaatcgcaaaagaaaatagttaagggacttttttttttttaaatggctattacatagcttagtggttccacacttttcataaagggtaggtcgcaagttcaaaaccccctccccaatgtcaagaaaaaaaaaacagatctcatagtcattcaaaataatcgttactggtattgttgataattaaactataagaattatattttgggaaaaaactcacttagccatattataagtcgcaaaattacaaagtttaacaaaaaaaagaaatatttcaacccaaaaataaatttgagagtctattatattgatgcacatacttatcaataccccaactagaataggatcccttcagcattttgataactgtctcagagttgcttccaattagcacaaaaagatgcttccaagaagccaccgtccgtctccatgaataacaaacaagccacaacctcgccgatcaatgggccagaaaagctgaacctattggtagccacccacaaaaccaatcccaggtgatctctagctaacgacaccacacacatagcctcattcctcaccttagcgtcacaatcgatcttgatccaatcttctgggggttgggaccaaaggagagaagtaacaagtggatgagatggaaacaaacaattacttataatctgcataacaatgagagatagaattaatataatattggaaaattttacaatgcaccctcataaatgggttgcatcggtgcatccccatctgtttcgtaatccagaagatttttttagtccaattttttttgtggttgtgtacgttgtaattatttaagatattctgtannnntttgagaaatttaaaataatttaagatgctgaaaatagggttcaaacaatctattgcactcgtgtaaataattgttcgaacattgttttttacactgtaaattattctaaatttctcaaaattttgcaggatgtcttaaataactataacttacacaactatgaaaaaaattaaactaaaaaaatttgttagatgccaaaataaataaaaaa

SEQ ID NO: 35088 - DNA, 3640 bp, Cannabis sativa
  modified_base (3581)..(3594): a, c, t, g, unknown or other
ctacctctggttatggtaggggtggtagtggctcaaccactgatcataaacgaaaggcactgactagacccgatggcctaagtcagaataagaggttccgagggaaccagggacgaggaaactgtgagggtagttttgaaaccagatacacttacccagagtgccctagttgtaaaaagcatcatctgggtgagtgtagggggcaaggatgtttccagtgtgggttgccaggacactattaaagagactgcccacagcttaagaaagaagaatagaagactgatggaaaacccgctccagcaagggtgattgctttaactcaagcagatgtaaaggctagcccctcagttgtaacaggtcaactctcagtcaacaactcttacttctctgtattgtaatattcagggccactcactcttatgtggcagccataatttttagtaagttggaacgaccgcaatagttatgataaagggtttggaaccatactgcttggcggagaattagttatctccaaaaggtggattagctctatgccgatcagaattgaggatagggagttgagtcctgacttaatagaaatgggtttagcggattttgacattataaatggaatggatttcttatccaagtactcagctagtattgactgtatttggaagatggtgatcttccaacctgagggcgaggaaccgtttatttttgtgggattagtttagggatcccagatcccagttatttcagtattaatagctagagaatagctaaaagatagatgtttagggtttttggccgtggtattggataccacacgacctgagatagttctgccaggggatattagggtggtttaggaatttctagatgtttttccagatgaacttccaggtttaccaccgcaaagggaaataaattttattattgatctagcacctagagcagaaccggtttctaaggcaccttacagaatggctccaacagaacttaaggaattaaaaattcagcttcaggggttgcttgacctagggtttacacggcctagtgtgtcaccctggggagctcccatattatttgttaagaagaaagatagatcattacgcatgtgtattgattaccaagaattgaataaacaaactgtcaagaacaagtatcctttacctaggattgatgatcttttttatcaagttaaggggaaaacagtctacgagaacataaactatatgaatttttgtttatgtcttttggactaaacaatgctcctgtagcttttatggatctcatgaatagggtattcaaggatttcctcgatatctatgttattgtatttatcgacgacatccttatgtacactcaatcagaagaggagcacgagcaacatcttcggatggttctacatcggctacgacaacataaactatatgccaaattcaataagtgcgagttttggctatctcaaatgtcttttcttgggcacattgttagtaaagatggaatcaaggtggatccgagagagattgaatccatcaaggattggtcaagattgaaaaacggttacaaaagttagatgtttcctaggtctagctgattattaccgtcagtttgtagagggattctctaagatttcaacacccttaaccgagctcactaaaaagaatcagcagtttgtgtggacggacaagtttgaagcaagctttcaggagatgaaacagagattaatcactgctctagtgttagccttaccttctgataaagaaatatttatagtttactgcgattcatcgagatagggtctggggtgtgtactgatgtaggccggtcgagtcatcgcctatgcctttcgtcaattgaaagaatataaacattgatattcaattcatgatttagtacttaccgcggtggtatttgctttaaagatttggcagcattatctctacgaagagaagtgtgagatttacactaaccataagagcatcaagtacttctttactcagaaacatttgaatatgagatagaggcgttggttggagttggttaaggattatgactgtgaaatcctttaccatcctaggaaggccaatgttgtgggtgatgccctgcgaaggaagggtcccgggtaggtaactagtatgattaagatttcacctcagctagcacacgatatggttagctctagtatcgagtttgttgtaggcaaactttataatttgatgctacaatctaatctgttacaacgaattaaaacttctcagttagctgatgcaaagttagtgaagatccgagaagaggtttcaactggtcaaaccaaagattttacggcgtcagatagcgaaatgctattgtttaagactagggtttgtgttccaagaagtacagaacctagaaatgagattctcaaggaagctcatactactccatattcactgtatcctggcactaccaagatgtaccaggatcttaaaccctacttttggtggtgcaggataaagaaggatgtggtagaatttgtatcctagagcctaacttgtcagcagatcaaggctgaacatcaaagatcgacaggtttattgcaaccactggtgcttcctgagtggaagtgggaggatatcaccatgaaatttatggttgcggtacctagaacaacaggaatgtatgattcgatttggattatggtagatcgattcaagaagtttgcccattttttgccagtaaaaacaacctttacaatggatcagtatgcagatttgtatgtgaaagagatagtgaggttgcatggcattccaaattctattatatcggatagagatccaaagtttacttcgaagttctggcagagtctgcagcgggctatgggtactaaactgaaattcagtacagcattccatcctcagacttatggacagtctgaaagaacaattcagatactggaagacatgttacaagcctgtgtaatggatttcaagtacctgccgttgatagaataacagctgccaaagaacaatagggatggctccctatgagttttggtatagcaggaagtgtaggtatcttattcactgggatgaaatgggagaaaagaaatacctaggtctgaaaccagtgcaacagactaatgaagctataaaaaagattaaggccagaatgcttgcctctcagagtaggcagaagagttatgtagatccaaagcgcagaaatgtagaatttcatgtaggagatcatgtatttctataggtgtctccaatgaaggggatcaaacatttcggaaaaagaggcaaattatgccctagatttataggacctttcaagattctcgagaaagttggactagtggcatatcgtctagctttgcctccaattctatcagcagttcacaatgtgtttcatgtttccatgttttgaaagtacatttcagatcctgctcatgttctgagttatgataatcttgagctgcaaccaggcctatcatacgaagtacgacaagttcaaatcttagacaaaaaaaaaatggttcttcagcacaagaccacagctttggtcaaggtgctcaagagaaacaactgatggaaatattttaccaggatctnnnnnnnnnnnnnngtatgtttcattaacatcctactatgaattctaaaacaataaaata

SEQ ID NO: 35089 - DNA, 1027 bp, Cannabis sativa
aaaattaaaaaaataatatatgggataattttccttttagtaattaatttatattatatcgttttaattctatttttaatactaaataatatagaggaaagttgttttttgctccattcttcatattctctatcatttctatattttccttccatccttcgaaccaaacataccttaagatgaggtgagtggagggagagatcgggggcagaatgacgggagaagataacgattgctcttgtttgacaagagagattggaagaaggaagagataattggatggataacaaatccttctaaaatcttaattttagagtctttccacttatagaaagatcatacactccctcttcaatggttggaaacaattatactcttttaatatggtattcataaagatatttaaaaatacaatataataatttcataaataaatattctttattctttcaccactacactatttctaccaaacaatttaaaatgattattactttactcttattttctcttattctacatctttcatcaactctacatttcttctaccaaacataacctaagaccaaaattaattagcaaagagatgagagaccaaacctaacaaacaaattcaacaaaataaccttattaattaataggaggttgtagaattttggactgaaaaaagattaataaatttttatttgtttattattattgttattgtaaaatagaatgcattaaacatgttcatatagaataaaagcgtggagagtaggggttgaaacttctgttaagaatatttatttaagaaatagaatagaaaatgtcaagtctctctttagttcacgaatcttacacatgaaaaaagaacacttttttggtagaagtgtatataatttgtttataactttagcatttggaatgtgactaaaggggtatcacatagatataaaaaaaaaacctttagcatttagaatgtgactaaaggggtttcaacttttgtggaagaggtagaatacacaccatggctacctcatctaac

SEQ ID NO: 35090 - DNA, 1910 bp, Cannabis sativa
cacacacacacacacacacaccaacgaggccgataccccaagatctccttctctcgtctctctcttgattttcctttgaagccccaaagacgaaagccatatccaccaccaaaggcggccatccaccactgagaaacctcattcggagcgacatataaccaccaagaaacccccatttgagcgatactttctctcactcttctctctatctgttcgctccaccaccgaccattccaaaccacagtcgtcgtcctccttgtggccactggtgcccaccacctcctataggtatatatttaattctttattaaaattaatttatatatattttatatatacatacatatttttttatttaatacataattttaaatttaatttttagattaattgtttaatttgttttagatttaggtattaataaaaatatttagtttagtttaattttttagttttagatttaggtattataaaaaatattttgtttgattaattgtttagctatgaattttaggtgataaaaatattatttggtttagattatttgtgcaggtattaattagtttttatataaaaaaatatttagtttatacatttatacctatttatttaattaatagatagttagatgaattgttaattaattattttttttagattttttgttggtatttaaaaaaatatttagtttagattaattatttagtttttgatttaggtattttgaaaaatatctagtttaaattatttgttgttatgtaataaaaaaaattatttagaaattttgttgttagggaataaaaaatatttagtttagattatattaaatatttaggtattaaaaaaaattagtttttatcaattatttagctattagttttatttccctttaagtttttatttagtcgttttggattttttttttttgtttagattatttatttttatttaaattgttatcgaaactttttttatacatatatatattgacttttttagccattgtcaaatttcatcgagctccttcttctttttttggcggtctttcgagagaggctccttattattgatgatatatatatatttttagtttatacatatttatatatagatgttgataaaagctgtaaaatttagaatttaatcaatattaatttttattattttttaagtattgaataattggtgttgattgaaaagcgcaaaaagtagctagctttattagagaaaggtaaaatcactaaaaccttaaaattctttataaagtggagtttgaatatcttagatattcatctgttgcaaaatagataccgcgatgaattgttctacggtcagatgggtagataatttttgtattaaattgttaatgttattttattttatttttattattttgtgtacgttttgtttcttattttttgcatatttacaatttttagaaacgtcgattacagttgttatgctaccgaaatttttgtaaaattatgatagatttcacaaaaatacataaatattagagaacaagcgttatattggggtaaaacagcataattttttttttcatatttgtaaatattttgatttgaatgcataattaaatattttgatttggtaatttttttaattaattttttatttttaaaattataaaagtaaaaatattttttaaaatcatgttctataactgtttttactttttaatttgttaattaaaatctaaattaatctaaatttaaaaaaaatttaaaaaaaaaaatcactttcaaaattttttaattaatattttgcactccaacccaacttagaccttggaaactgaatctaaacccgaccccagacttggacctgtcggtcccgacctcggaccaggccgcgcgcgaacccgtcttaaataaaatcaacaaataaaa

SEQ ID NO: 35091 - DNA, 1872 bp, Cannabis sativa
  modified_base (617)..(622): a, c, t, g, unknown or other
ctccaaaggaaatattgaacatgatctaagtcctttgaagttgcagacaaattgtgttttgagatgagagaggttggtttttttaataaaagaataaatatgaaaatttaaggaatacaagcaattgttgatatatttaatttttgtagggagtgatgttaatagtgagttttataacactttttttaatcatttttttaatgaaaatattttcttatgttttataaaactgtatttatttttaaattttttaaaaaagaattaaaattttgaaaaagccacttttaaaatttatttaaatatttttttctttttaattataatttatttgtattttgttataataatttgcgacataaatacttaggtttaatttatagttgcaaataaatacttcctttaatttttgacaataataataagttataattctaaaacttataggtacttgcctatttagtgtcaggtaaattattagtggcaattcctgattggtcaaagtcactaattttttatttaaaaattaattcaaatattccaattagaaaatgacacatggataatgacttgacacttaacgaccagatatttacagaagttccagaaatataacttannnnnnattaccgtaaaaaattaaacttagatgtttatttacaactgagagttaaacttaggtatttacgccgcaaattacttttttttttatcattattttggacatggacctcagtttaaactccaatcccgaatcatgacccgaccgtgggcccctagacccaaacatagacttggacttggaccccagaccctaggcttgggcccgatccttgaccctagctcagacactgaaccctgaattgaacctaacctcagaccttggactcgggcctcaccccaactctggctcaaaccctaaaccttgacccctcggactttggcttagaccccagacccgccttctggattcgaactcgaccctagcccttgaacccgaacattgaacccccaaccctcgaacctgaacatcgaaccccgccctctagacccgaacttaaccctagcctttgaacctggactccgaaccccaaactcagacctaacctatggccccgaaccccgaactcaatgtcggatcccgacctactttctctcaccttagtttctcattccttatttaaataaaaaacataaaataaaaataaatttataaaatacacttttgtaaattatgaagcaaagtgtagattggatgtacttttactacgtgtaaaattaactaattcaatttatactctttcttacaaatattttaaagcattccgtatgaaagtgcaatattttaaaagtgtgtatttagtcactagcactatttagtattttgaaatattagttatgaaagtgcaatattttagaattttaggtgtaatattttaattagattgaatatatttactgtaaaaaaatttgggtataaaagtgtaatgttttgaaatattgagtatatttattaaacaaaaaatatttgatataaaactataactttttgaaaatattaagtattttagtctcaatttactacaactaaaataatatgattatgtttttttttacaaataccgataattaaagggtgcacttaaaatatgcaatgaaatattgtacttcataaattgacacaatttttagtaattaaaaaaatattatattgaagtcgtgaagagagaggatatatcgcttagaggagagaaggaaatatcgagtattaattccaattaaggttttttgtttcatttattaatttactattattaggttaatatcaattagtatttttatggtgttagaattataaggagtacattccttaat

SEQ ID NO: 35092 - DNA, 1839 bp, Cannabis sativa
  modified_base (1793)..(1808): a, c, t, g, unknown or other
gatgtctcatccaatatccgatccgatccaattggatttttaaaatttgcatccgatcagatccaattataattggatattcgattctattggattggttgagattggatcggtcggttggaattggattggatgactttctgcacacccctatctataaatatagacaaaaacaatacccttctataaattttccaatattatgcataaatatttatatgagtttagatctacctgctacattaaaaatttgaagatatctcaatagactttcaatgaaagtttaattatgatatatatttatatatataataacattattaggaataatcggctaaaaacacgctttaactaatttatattcaaaatttgaccctaataatagtgacacaattttccaatattgaattgcattatagttgttattataaatgaaatgggagcagaaaataaaggatatatatacaaaataaagcacatgcatccactcaacacactaccctttacttctcgaccttataattaactcataattaagtatataatactttaaaatgaaataaaaagaaaactaaaagaaaaagacactatgcttgcatcataacatgacactatgcttgcatcataatggcttctcctggaaagccttaatataaatggaaaatgggagaagccgttgggtctgcagtggtcattgggtccgtggctcgtgagggtcgtggggtcgcggtggtcgttaagagaagagaccgaggtggttgttggttgtgcatgagggttaggtagattagctagagagagagactacaaaaaatcttacttttagtcacaacaaaacttgtgacaaaaagtaaaaaaacttttgactaattataaattatcatttctatgttgtgactaaaaaattcgcggctaaaggtatttggttacaaaaattataatttgttatgactaaatgtatttttacaatacttgttgtgactaaaactaaattagtaaaaacttgtaactaaaaactatattttagtcacaagtagcattttgttgtgactaaaagtcacatttagtcacaaaaatattatattgtgactaaaaagttatcactaaaaaatattagttttttgtagagagagagaaagagggacggttgtttgaaatgggaaggatattttgggacttaaagtaaagtgtacctatttttaacaatttggatatatttaagtttagagttttaatttaagtatatataaattatgaataattactgaaaatttttcttttaaaaagtcccacaaaaatccagagcatcatcgtgttatgccataaaaaaatataaatcatgttgtgttgtttcatatgttaataattttatagggtaattttagaattttcatgtcatattatactcaagatatgtgtttctctagactctaattaggtggctcaaattcgtactccacgtttttatatttttatgaaaaatattgagctacctattaaactaaatgtaatttttatagtttcaattaattatttttatataatttctaaattacaattcataagaaataattataattattaaattaatttttaagtttattttaacatattgtgtttttatgttagtttattcgtgcttatgtgtcatccatatataagttcatatttttttggtgtagcatgtcgacatacccgaccaagtctatatattttcgtgccataccatactccactgccaaaaaatacttctagtgacaactttttagtcacaacataattttttgtgactnnnnnnnnnnnnnnnncacaacaaaaagttacttgtaactaaaacat

SEQ ID NO: 35093 - DNA, 1265 bp, Cannabis sativa
  modified_base (668)..(677): a, c, t, g, unknown or other
cggatatccgcattttgcggattggattggattggatcgtacggattggattggatcgtacggattggattggatcagatactttgtaaacacccctaacgactacccctgttttacttgaggtttgtctctctttcttaccttatgatttatttgtaatattttttttatttatgagaaggtttgaatgataagagtgaaattttcaggcattgaatccgtttgtaaagattcaattgtgattggagtttataatgtgtccatgttgattaaactcaatatgtataagacatgtagtccattgaggaaaatattctcctctctcccatgttgtatatcacaaatattataaatatactcatccaatcaaatttggatgtaattattattattattattatcactacatttttttagtaataaactttcttattaaataatttcaaaaagaaaactttcttatttaaaaatcattttttattttagtgattttctataacaaaaatatcaaacactttaataagaaatatatataaaatttatataataaaaattatgtataaataccaacaaaaatattaactaataaacaatatttattcaaatacaattatacgcaattaaaataaaaatggtttcttttcaattttttaataataataataatnnnnnnnnnnataataataataataaattttaaactcacatactaatcaaaatatagctaaaagcatattctactatacatctttacaaaatacttttcttagagaaaaaaaatctaaataattttctctaattataaattaaaaagagtgaaataacatattctctttttagtcttatattttctctaattcataatttttttttctaaattttctatttaataataatcagaacatgatgtaacaatcctataagaaataaaactctacaagtatataaaaattctatttattttgattgaaaagatatattaaaagatttatgtgatgtagtgcccccaaatataatctctagggatgcacatcttctttacagggacttgtttttaatgaagcgaaaatttcccgtttaaataaggaatggagtggcgatagagattactttttattaaacgggacaggaacaaggatcacactccttgctccgatggagtcccgtttagtattttatcttatatttctagtaatattttataatttataatttatgtttgtatttttttagtatattagtatcttttttatgaattttaagtt

SEQ ID NO: 35094 - DNA, 1370 bp, Cannabis sativa
tacctgcccaaccttctcgagtatctcaaatggccctataaacctagggcttaactttccctactttccaaaactctttacactcttcattggtgagacttgtaggaaagcatgttctcccacctaaaattatatgtctctgcatttgggatcagaataacttttctacctactttgagaagcaagcatctgagccttaatcttgtctattgcatcatcggtcctttgaactagcttaggaaacaaatactttctttccccagtctcgtcccaatgaattagggaatgacatttcctaccatacaaaatttcatagggagccatccctattgtactttgatagctattgttgtaggagaattttatcagaggcaattatttactccatgaacccttaaaatccatgacacatgctcgcaataaatcctccagtatttgtattgtcctctcgggttgtccatcagtctgagagtgaaaagctgtactgaacttcaactttgtacccatagctctatgaagacttacccaaaacatcgatgtaaacttcaaatctctattcaaaatgatagattttagagctccattgagacaaactatttctttcacatctaattccgcatactgatccattgtataggttattttcactagaagaaagtatgctaacttcgtgaaatagtccactatgaccaatactgaatcatacattcccatgattctgggaaaactaaccacaaagtccatcatagtatcctccccttccattcaggaagtgctaatggttgcagtaaccatgctggtttatgatgttttgccttaatttgctgacatgttaagcacttggacacgtattccaccacatctctcttcattctgcaccactaataatagggtttcaaatcttggtacatttcggtagtacctaggtgcaattaataaggtgtagtatgagcctcatcaagtatttcttttctgagttcatcactgcttggaacacaaactctagctttgtaaactaacattccactgttcgagactgagaaatccttagcctgactagctaatacctcctctcaaattttaactaactcaaagtcttctaattgtgcctctctgattctttctaataagtatgactgaagtgtcaaattatgtagtttcccaaccacgaactcaatatcggtcctaaccatatctaaagccaactgaggtgagatcattatggtaccaaaaacctgcctgagatattttcttctcaaagcagttgccactacattggctttcgcggagtgatataaaatctcatagtcataatccttgactggctctaaccaccgcctttgcctcatattcaaatctttctgagtgaa

SEQ ID NO: 35095 - DNA, 1388 bp, Cannabis sativa
ttttttttactgtatttggtcctactgttctgctgactaacaatctcaatagcaataccattaatgatgctcttagtacgaaggggacaaactaaaatgctttgttttttttacctgaaccaaactcagaagtcagaccccaatttattttctctcaatttactttctcacttctcatttaaataacaataaaaaaaatatgatttttttttttaaagaaaacaaaaacagttataaaacatatttttttgtttttcgaaaataaaaacaaaaaattttatttttattttataaaaagaaaatattaaaaaacaaaaatattataaaacataccctttatttttatataatatatttatcaataataaatctttaactgaaatgttattcaaataataaaactagacaatatattttttttttgaacaaatcacttagaaaatatcattaatttttattcatttttactataaaccatacatttttatactaacaaaaacttacctcgacaatgtatttttatgaacattttagcatcaattatgataaaaacaaagttggaaattttataacttaattagtacataagattttcttttgagaaaagactagttgagaccttctctatataaaattgtaagaagactatcaattatttaggttagtacttagttagtagcaataattctaatttatattcgctttcaaaaaaaaaaaattataatttatattcttttttatctagcttttatcgatcaattaattaatttaaataatagtaataaaaagtaaaccaaatactaaataattaaatcaaataaaacaatcatatcaaattttattttcagaataaagaaaggaacatacaagcaaaaaattgaattattaaatgaaaaatactaaaaagttagaggtgcttatttgcatgtctaatataatttaatatattaatttttataaaatatcattaatcaatccagttcgtaaatagagttgctcatagcattattcgtagctcttacttttatcccgtttgtatttttgccgagagtcacgtttcgactcattttttatctattgtaatagttgaagcattttattaataaagtatccatctccattcaaaaaaaaattgtaaattgctatctttggatggtactcatattataggtacttaatagtaatatttttattatttaaaaatatgctaaacggtaccactgttatctaatactctcatacgaagaattgttaaaagtgtcactcgtgctattaatatcattttcggtatcatatattaggttttatatgacttgaaaaataacttttaaaaattatcgttaattaatcaaacagtactgcctataaaaaaaacactaaccacccac

SEQ ID NO: 35096 - DNA, 2898 bp, Cannabis sativa
acattattatttaattttttagcaacaataattttttagttttaatttttattaaaaaaataatgatagcatcaatgctacttactgtatggcattcatacatatttcctagaatgatatttttttccctctaatgatatagcatctcaatattttaccacttcatctatccacctcagcaagtatcccttaatttttttaccattggagatgctctaagggagcaatttaaatcgcaactttaatccacattgaaattactggaacaacccaaactgtaaaaataaaaataaaaagtaaaaaaataatatatgaggtttatattattaaaaactaaactaatttagtttatatgtgtgatacattagtgattgttctaagattcgtttgattgttattaaaaactagttttgtttcaaaaaaaaaaaaactagtttagtttatgtgtttaaaaacagttactctggtaactgaatttcttgtcagtgtagtgcttatttaattgttaaaattactttaatttagtgttagagcatattttttattagatgaactatattttacaagactaacatttcatatataattataccaataaaatacatattgatataaaagatgtgtcattgtgtatattaagagctcctcatatacagggccggccaaagagtgggacagccggggcctaggcctcaccattttagagactcccaaaaaattaaaatatatatacacacaaaaaaaaaatataacatatgtattttaatttaataaatatcataaaaaagttagagtaaaagttgtaagtagggagtatgtaaatatggggaagcttgagtgctgggttcgattctccaattagtcttttacataccatataaggtatgataagagacagtccttgtttttattttcaaaacttgtaaaattcagaaactataacccacaaccacaacactaagaaacagggagcaatataattagagcattattatgggacactaaaatacttagcactactataagatgtcgttctataattagttagcggttctttaaaattttattaatttaaaataaatatgatctaatattgaattacactaaggtagcgtttagttggaggaaatgaaatgtaatggaatgaaaaagaaacaacttttattctattcctttatttgattttattttaaagtattagaatatcattcttattctaactatgttttcattcattccaattaaaccccgtttaatggggtgtttgttaggtgagtttgagttaaaaagaatagagttggagggagtaaacttagaaggaatgtgaatccatgcgtttgaggcgattaacattattaacattttaatttaaaaagtgagacctacttgaaaatacaaactacttatcattgaaatttaatttaaattttatgttccattctcaaatctaaacctcataccaaacaccctttaatagtgatattattccttacaaaagtactaggaaccataaataccttttagcatttctctatacaactatacaagtacccagtaaataatgttgtacactaagtagaacaacatataatttggtttaatgttagtccaatccaatctttgtgatctttaaagtggattgcaaataaattaataaaaaagaaaaatatgatttgaaagtgagagttggaaactcagaagaacatagcaccagagagtcaatgaccaattgaaataaatcagtttaattcatttgcagagaaaaccctactgcactttcttcataatatcatcagataccaatttgatttgataatcaaaattaatcccacttcaatgcacttgttccttaacataattactttatgtccacaacttgaaatacaacaacaattaaaggactcactcacttccactttctcccagctttactgtcaatcctaattccataaacagaacacgtgaagttaattaggagggaaagtgaaatttaggtatgtgagatcgttgagcattagcgacgacctttaaagttattaggggcggaatggtccgccgctaatagtcctttatatatatattcatgatgaaatcatctataccctaatctttcattttccttcttgaatcccaacctcaccattattctcacctgggttagggctgcctatcacagaggtaatctctctatctcctttttccctttagtctttctgtccattgaaattgatacactgtttttccttttagataaaaattgatacacttttttttttgatatatatatacattttttttgttaagttagattttgatttgtttttttctttaataatcttataacttatatattttttattagatgaaatatattttagaatactaaaattaatttagattatatgacattagatgtacataccatcagcatatttcttaaaaaactaactctttgtatatacatcttcagtatcaatatattttgaatttggatataaaattatttggctctaataatcattttgaattggaagaaattcataaaacaactcgtatcatatggcatttcataaaatattattaataaaacattataatttggtaaacatttcataaaattttataattagggtaaatagcggcataaatacctaaagttttgagtttgtaagcggtataaacctaatgattttttttagtagcacccaatgtttgtaaaactgtaatttttctctattttcgtcagtacagactctgttttaaatgaaagatttggaagtaacggatatttcatattctcgtccagaacaaataatctagaatttaagtcttatatgtgtcctgtttaagacaataacggagtctgtactgatgaaactagaaaaaaattacagtttt

SEQ ID NO: 35097 - DNA, 1481 bp, Cannabis sativa
aaaaaaaaagttttttcattttcattttaaaacagttttatttatttatttatttatttttttgtatttttatgaaattccacacaaaaacactcatagcaactaacagagcaacctaaatcgcaaccaaaatctgtatagcaacctacattgaaaccaccaaccgtagtaaaaatttgtttgaaaaaaaaagttaaaaaatagtatatcgagtaattcccctaaaaattcatcatactatttcttattattacgatactacccccaatcagcacctcaccaccgtcatcttgaaccatccttggttctgttatttttctgttgtagcagccgagttggttattttccgaactaactcagctccctacctatacatattaccttccttatttatgttgtaatggctagatactatacagattaataaagcattttcaaagcttttgtctactactctattttcactcacatggtatcagaacaaattcaagccactttttcaatggcgagacccatcactcgttcttaggatggcattccccatccacctccgagaaccaccaattggaatccaatcccgatactacttccacaccaccaatcgtatatacctctatggcacctcgatggaatcccaatccaagaacacgaattcagaatgaacaagacaatcttgcaccagctcattcgtcctctgatccagttgttaacattcctcaaccccctgttcagactcgtcgttcatcaccagttgatagattggtcatgaagatgtctcaagtcctttcttcctcagcatcacggatcatcctcacttggtcttggtttccttcgttcttaatggaggtaattaccaatcttggaaaagaggaattacaatggccctcactgcaaagaacaaattcgcgttcattgatggctctcttccttgacctattaatggtaatacccttctccattcttgaattcattgcaataacatggtcgtgtcttggcttggaaatttcgttttgtctgagatagcacaaagtattatgcactttgattttgctacaaatatgtggcatgatttgcaagaaagattcaatgagggcaatggacctcgaatctttcagcttcaaacacaattaacacgtttccaacaaggtgatcagtacgtcacctcatactttaccaagctcaaatccatgtgggatgagctaaaagaattccaaccaaacaccacttgcactgtggtgccatgaaattgttttttgaatattacaatcaaaatcaagtcttacagtttcttactggcttgaatgagtcctatgcatccgttcgtgctcaaattctccttaatgaacccatccctgatctatcacgggtgtttgttatgattgttcaagaagagaggaaacacactcttggttcttcagatgtttcatctctggcagcatcaactcaatcatcttccaacaatcctcccccaagatccaaga

SEQ ID NO: 35098 - DNA, 1585 bp, Cannabis sativa
taacagatcagattgcaacgtcaatttatgaagtttgccaacaacaaacttgatggttgatctaaccatgtctttttctaacagaggtgaaatcttaatcatactagttacctgtctgtgacgcttccttctcagggcatcagccactacattggccttcctaggatggtaaaggatttcacaataataatccttaaccaactccaaccaacgcctctgtctcatatttgaatctttctgagtaaagaaatatttgaggcttttaatggtcagtgtaaatgtcacactttctcttccatagaagatgtcgccaaatcttcaaagaaaaaaccactacaacaagttctaaatcatgagtgggtattgttgttcatattcttttagccgacgggaggaataggcgatgacccgctcagcctgcatcagtacacaccccaaaccctatctagatgcatcacattagactacaaacttttctttctctgacggtagaggtaataccatagcggtaatcaatctttatttcagctcctgaaagcttgcttcacatttgtctgtccacacaaacggctgattctttttagtgagtttggtttagggttttgaaatcttagagaacccctccacaaactaatggtaataaccagccggacccaggaaacttctaatttatgtaactgtcttcggtcatggccaatccttgacggattcaatctttcttggatcaaccttgattccatctttactgacaatgtgtccaagaaaagacacctaagatagccaaaactcgcacttcttgaatttggcatacagtttatgttctcatagtcgttgtagaatcatcataaggttttgctcgtgctcctcttctgattgagagtacacgaggatgtcatcaataaaaattgtaacagaggatgtcatcgataaaaattataacacagatgtcgaggaaatccttgaatacctattcattagatccataaaagttgcgggagcattggttagtctaaaagacataaccggaaattcatagtgcccatacctagtgcaaaaagcaatctttgaaatgtcctcctcttgaattctcagctgataatagcccgataagagatcaatttctgagaagaatgttttcccctgaagatgattgaaaagatcatcgatcttaggtaaaggatacttgtccttgtcagtcagtttatttaattcctggtagtcaatacacatgcataaagatccgtctttcatcttaacaaacaatataagagctccccagggtgacacactaggccaaaaccctaggtcaagtaacccctcaagctgaattttcagttctttaagttttgctggagccattctttaagctgccttagaaactggttctactccaggtgctaaatcgataatgaaatcgatttctctttgtggtaaacccagaagttcatcacgaaaaacatctagaaattcctgaaccacccttatattctttggccaaactgtgtcaggccgtgtggtatccaatatcacagccagaaaccctaaacatccgtcttgtaacaatttgttggaatatgttttacca

SEQ ID NO: 35099 - DNA, 1964 bp, Cannabis sativa
  modified_base (945)..(947): a, c, t, g, unknown or other
ttatttttattgttttagaaattcatatttaggatattaaataacatacatggtagtaaatctagatcctagtaaaacaaactccaacagtatactcattcagggttttgtccagaacgatttagagccgaaccgattaagtttagttcttcaacaagtattatctgagcaggttccatgccttgtacttctccaagaaaattaggttttcctagctgagttccattctccgtgcaaagggacgcgataattgaagagctctggagatattttccttaaatatctcatcaattatagtttaattataattcttattttaaggggctaattttatttgatttgagagaattgtcggatttaatatttagtttcttaaattcttctcctatattttcgagacattatattttccttataaataatggagtcattttactatgaagggatcctttatttgactttccaaagagctgctatgctactaaaatatttgaaagctttttcaagattgtgaaaaaattcacttagccgaaccttatgatctcgaagttctctaagtaatacaactaagggaagtaaattattaccattattacgaggttgaatctataaatttttggctaattagcaattttttctcttgaactttgacatgtactaaattataccccctaaatttttttggcctttaaaaatttcccttgaaccattaatattgttagatttaaggacttttatctaattttaattaaaaaattctaacatggatgaatgttcagggggcatgatttagtacatatcaaagtatgaggggcatgatttggtagatatcaaagtctgggcagcatgatttagtacataaacaatcactgaaacactaaaattgaatgaaattagacaaaagtctttaaatttaacagtctcaatagttcagggggaattttnnncgaccaaaaaagttcagggggcacaatttaatacatgtcaaagttcgggggaaaaattactaattagcctattctatatatgtatatatataaattgatgatttttgtttgaaacaatagaaaaaatgaacaaaacttttatgatagatataataatgaaaaaactttgaaaaaagttggccgcaataaagagcttcttctaaaaatatggcatataagagcatcaccaataagaagaatttacaacattgtctattaaaatggataagcttatataaattctcacctagcttttatggtaaagaaggcaaggtttgttgtcattggcaatattgttggtcaggttttttttccttaagtcatatttgaatattagcgataggatctgacaagcaaccttacttgttttatgtgttggtgaagctctaaaaatggaaattgttggtaatttttttttattatggcaattggtctttaaccatataagttttgacaaatttatgcccaaaatttattttttaataagttgattcccaagtacttaattcgttatcgttcataatattaagtttccacagttaaataatttttttatatatttatttttcagtcattaattaattatcttttgtgttatgtttgatttttttattgttatataaaaagaatatatattaattttattttcttttaaattataaaaaaaaaggtatatagtagtgtataatttattttattttacgagtattaataaatattataaaaatatatatgtactattacaagtatctatctatccatctatatatataaagtagaagtatgagacggtgatgtgacattctaatatcacttcaaatagctttatctcatctctccttaattctctctttttattaattttttattaggtttataaatatttatttattttcttatttttttttatcatttattattaataattatattaattaatattttttaaatagttttatctcatctctccttaattct

SEQ ID NO: 35100 - DNA, 2316 bp, Cannabis sativa
gtaaggattcacttcaaataattagctttgtggtatcatttacaagtttatgactctcaactttagtagcattcttctccagcattcaggtctttgtttatcatttaagtttccataaaatggacgatggtatgtaaaatgttagctgacaaagctgtagcttgataatcgatcaacatgtctattgataattggaatctgctcaattcttctttctagcgcaggccgtatcattgtttctggctcaaagtctagagttcactgcaactttgattttactaaaatatacagcaaagccacagtatcagtgtatgaatctcttcaaaacaaatgagctatcagatgaaaggaactggctgctgtcatcaactatgggattggcatttcttttttcactggttgtccttacatcattctttctggacggagtccttgagcccaaggtttgtgcaatagacttttgattgtttaaaattgtttttgttcacttgacatagcatctagtacgttttttagttttagtttaataaattgatagtattttacttaaaaaacaacattcttatttgtattgagcaatatcttttctagtaaactgtcttgaatttcctgagatttcaataaaatcactctcaatttctaaatgactggtgtatcaaatgatagaccactgatctggttcactatacacctaggtaagggaaatcataattggcacaaaattctttttccttgaatggccaggagattggacctagccataagaatgcttggatttataataactcactttctggtgttcgacccccttcagccactacagttttaattgccatggttcaatctgactgcctttggagtttctagaatctgatttgcttggaaaatatattagaatagattagatgagaaagtacgattatgttaggccaaatcttatttgtattaagcaattgctctggaagagaaactgtctctcttgaattttcttggttattgtcaaatttttcctactgtttcttcttaagttactgtggtgtatcaattgagttttctttcctaatgaataaatatgttagtagaaggttgtgtatgaatctattatgatggagattcaggtatgagacttgtgattcgactagcattacccttgttatgttgcaccttgacatgacatgcgttatgttgtaattcttatatcatgatgctcgtttagctaagctgatgctgttttgaacttccttcccatatgcagtttgcttttgaacattctaagttactagtgtaatgaaatcacatagtaaaagcagttgaaaagttttactttcaactgaaacagttttgcacttgcaggttgcaagcaaccctatactgaaagaaatgttagtgagcagcgacatctcgaaagctgcttgtgccctcgtatactgcatcatcactcctcttctggaagaaaccgtttatagatgtttcctattaagatcactttcatcaacaatgaaatggcagcatgccattctcataagttcggctattttcagtttggctcacctctctggtgagaatttcttacagttgttcatcattgggtgtgtcctcggatggtcttattgctggactggaaatttgtgttcttcttttctcatccactccttttacaatgctatgacacttgtgataacgtatcttgagtagcaattacacttggtcattggagagtttcttttcctgtgcatactatccaagtaaaaataatgatatatatatatatatgtgccatgaattgcaatgtaactcttaagatgtatcttagcagcatttaacaagtgcaaaatcttgactgtgtagaagcatgtgctgtataatgtatgtatagataaaacagattctggccaagctagataaattttacaattttgtctaatgtttggaatgttctcatccaaatgaaatcgtggagatgagtcgttgaaaactgcagtagtaaagttattgtggaatgtggatctccattaaataaaaagaaaagaaaaagattactgtggctccaggtcagtggatcatgtaatggacaaaagaatgtaagatttgtccaggttttggagagcaattgcttacttaatcatgccttaagtctaagatttcttctcattcttctttctttatttgttcaaatagcataaattttgtaaagtagttttatgtttcaaccaaaaatgaaaaatatcactaacactcttgttacaatctctaaacagttattcacactacctcttcaaacattcatattgtttattttatatcacatttttatta

SEQ ID NO: 35101 - DNA, 2854 bp, Cannabis sativa
  modified_base (2822)..(2829): a, c, t, g, unknown or other
gacccagacctagaactgaaatcggaccaggattgggactgtaacaggacccaaacctaaacccaaactcaaacccgaacccataccgggacttgaaccagactagcacttgtgacctgggacctcaaccaagactgggacctggacccagaccgggactaggacctagacccagaccccaaaatcagggccgaacccaggacccaataaccagactcggacctaggacccgaaattcagggctaggctgggactaggacccgaactgttacccgaagccaaaccgggacctggactcggactagacccgaacccgaacccggacaaggacctaggacttgaatatagatgggggaccttgacctatgaattaggccccaaaactaggcctagaacttgggccttagaacttggatcgggatcggggacccgaccctagacccaagtctggacaaaggacccacctcgggacctgggatccgggactcgatggttggacccgattcgttgtcgatgtctagatctaggacttagaccagagcgcgaacccaaactcaaactcaaatcaggacccggagacataccaagacccaaacccacacttgggaacaaaaactgaaacttgaactggaaccggaccgagatctttgaacgggaccgagacctagacccaggcctgaacccgaaaccagagccagcctcgaaccctactcgagaccgaaactcggacctgaacctcaccccgaacccgtacctcgtgacttgaaactggaactgaaactagaagcagattaggacccaggaacaggactaggattaggacatggacctagacccaaaactataactggaccaggatccagactaggacacaaacccaccctgggattgggtccaaaacccggacccaaacccagaccagaacctggtccaggacctagaccaaaactaggaccctgatcgggaccccaacccggacccgaaaaaagacttggactcagaccaggaccagaacccagactcaaaccttaacccgtacttcgacctaaactcggacccaaacttgggatccaaacccgaaccttaacttggacatagatcgggacctaggatccagacctagatgggcgacctgggccccaaacccaaacttggactaagaatcgggacctagatgggggacttggacccaaaaattggctccgcaaccaggaccgaacccaaaactcgaccccaaactcgagacacaggacccgaccttgtacccgcaacccaggacctaactaccgagacacaaccctgaacctgaacccaaacccaaacttaggacccgacccaagatctgagaaactaaaacaagacttagatccaagaccaagatccgaattcggaccaaaggctttgacttgacccgtagttagtgtttgaatccaagaccctgacctggatccgtacctacactcggaatcggaatcagaccaggtgtgggattagaaccgagtcttggtacggatttgggtttgggtccttaatttaaatactgactatgggtcaggacaaagccttaggtctagattcatatctcggtcttggtttgggtttgggttcagagttccgtcccggtattcagttcctaggtttcgggtccaaggtcgagtcctgtgtttcgagtttgggttgaagttttgggtctcggtcccgttcgggcccagttttgggtccaagtcccccatctaggtctggatcctctgtctagctcttggtccaggttcgggtttggggcccaggtcccccatctaggtcacggtttggttctcaggtcccaggtccgagtctcgggtcccaagtcccggtcctggtcccaattcgagttctagtcctagtacaggttcaatgcttgatccaggtacgagtcctgagttcgagtttgagtctcgggttcgtgtttgagttctggtacgagtctgggtctgggtctagatctgggtttgggtttttgtctgggtctgggtccgggtcttggtctgggtctgggttcgggtcttggtcagggtccgggtcttggtctgggttccaggttctgggtaacaagtcctagcgcaagtctgggttcgggtatcgatcccaatctacgtccgtgttcagttccacatcaagatccaattctaggtccaggtccaatacctgttccaaggtcctaattcaagttcttgttccgatttcaagtccttagttcgagtctgggtttgagtcctagttttgaaatggttccaagtttgggtcttggtaagattccaagatccacacacccactacaggttgggtccaagccccgggtcatgggtcaagatccggttcccaatcttgggtcccggtctcgttccgattcagatcctgggtcctagtccgtgtccaagtccgtgtctgggaccgggtttgggaccaagaccggggtcgggtcttggttcacattttaaatcttgggtcctgattttggttcgaatttcggtttcgggtccccaatccaggtctggacctgagtccaggtctggatccgtcgagtctccaatcccagtccgggttctgcgtctgggtctggatccaagtccacgtctgggtttgggttcgtgtctcgagtcccaatcctagttttaattcgagtctgcatccgggtccgggtgtatgtctgggtcctagtcccttggtcttgttcccaagtctaggtccgcttctagttctgcttccaattttgggtcacggtgtacgtgtccgggtctggttccgagtttgtgttggaaatatattttaccaggatcttagannnnnnnncaagtatgttgatttaacaatctaa

SEQ ID NO: 35102 - DNA, 1852 bp, Cannabis sativa
aaatattatctttattgttattattagaaaaattaaaaggtggagagctttctgctagagaatttttattataactcacaagaaaaaagatggatcttgggttgattctatttcaaaaaatatcatggtatgacttttttatgtgtctaaatgtttgagttgtttttttcttactttgtatgctgatacttgatagtctatgtaaatatcatggtataattttcttttctcaagagtatattgaaaaataaaaacttttggttgatgttgtaagaaatttctattatagttttgtgggggttgttaagtgtatatttttagactgtttttacaggtataaatgatgttcttattgattgaataagtacaattatttatattacttctggtatcatgacaagtttggttgctctttttacttaagttagtattctctaagaatgattggaactcaccttaattgaacaagtaaatttctcacaatattgataaagtcatgtgttatttaatctttttaggcaaaatataatgatgaggttaatagtaaactctggatggagctacttcaacaaatgaagatgagattttctgatttgttttgtgttcagaaaagctttcccatttacaacgatttggcttaacttgaatggcagtaaagaaacaagaaatgcaaaaaatgaaagaagaaatgaagtctgaaatggatgaaaaattaagtaaaataacagcacattatgaagccaaatgtgatgctttgcaagcgaaatgcgagacaatgcaactaatgtttgaaaaatttatgagagaaatgaatggttctcgattgcaatcacacaatgacacaccaaattctttatttgaggaggatgattttgaagacttggcctacacttgatgggttattctccatacttgatgatttttttttttttttatttttattgttctataacttttcttattttcttttcctttataaagattaacaacttaattattgtcttgcttctcttatatatcttgaacgtgactcatatctattttgcttgcttttatttaaatttatgttcatttcattacctaagctatcacaagcaattaaagtttgatgaatttggtatgagttatttagggacaagcaatggtgatgttacatattgcgcagaggggattggaacaaccaacattacaagatggagctcggtaaaaaatattatgttttgatgatttggttatttagtttgatttgatattactgtttttaaatattgaattttaagagatcattaaaggatcaaattgatgaatggacaattttaattgagttttgagtttgtttgccttatttttatgtgacttaattttgagaagaaggttgtaggatacatttaataaatcaaattactaacgtcatccttatctaatatctactctaaaaaaatctacatattttattttagattaataatgagttgcaactaaaaagatattagtgacaataaaaaattatagatcaacaagtattagtaataaatttttactgtgattaaaaaaaatattagtcacaattttttgttgtgactgaaaaaatattagccacaattttttgttgtgactaaagaaatattagtcacaactatttgtatggccaaatatatttaggttgtggctaaataaatattagtgacttgtcaccaaaaataaataatttgtggctaaaggtggttgtgacatttagtcacaaagattagttgtgactaaaagtgacttttagccacaaacttttagtcacaacactgtcataagaaaaaattgtgactaaaacttttggtcacgatatttttcactttta

SEQ ID NO: 35103 - DNA, 1770 bp, Cannabis sativa
ggtgtgattcgtggcgtgctccggtgtgagagacaaagagttgagaaattttgagagagagagagagagttgtttttgttttttttattattaattctaatttttgtttgcaaaactaatattcaacattataactcttaattacaaaaaaaagccgctaagaataattactaaaataagcttaagtggtaaatacaaaaatgccctcacttagcttctaagttatcttcaaatctaggggtaagataatcataaccgaataccatgcataactctaatattctaactattcataaatcttttctcgctaattcaatgatactaaaccatatcagagtgacactattggtcttgatcgtcgaattttcactattaccgagtataaaacatgaaaatatcaaatttcatatataacatgtatgtcacaccaagaattcaataaaatctccgtaattcactaatgcatatttctgacaataggacttatttttataccaaagcacatacaatcataaataataatctaattactaataaactgctgattatctgctgattttcatatctaattatatcgtcattacattgggggtttgtgtctaggggagtcgtttgggtttcaaaggatttcgatggtttcaaaacagttcttagattgtgacgctgtcatttatgtgttattttcattcatgctttgttttattgtttgattttgtttatttataatgagggatattaactttgcttacttttgggtcattgttgtttttgtgaatggctcaaggcattttgtcgtgggtgtggcatgactacaactctctatatttagatttggaggatttccaaatttttattgatcccatagtttgtaggatcgtcccgtacatgattggggatgtcattttcttttattctactttgaaaaataaggttgtcattacccattttttttgggagatcttttgctaataactattgataggttgattttgttactaattcatttagattggaaacctagcattcttcatagtctttttgtgcttcaaagcgggtgtcttatggatccgttagttgaagatcttgttagcttttttatttatttatttatctatttattatttttttttgtgtgtataaataatgtcgttagcttattattttgagtccgctctttgagcaatttttctatgtaattttgtttgatttacctaataatagatatttttatttatcttcaaataaataaataaataatgtcaaatatatatatatataaaatttgacacatgcgaaaaactatgctaaatttgacacaaaatatagcacgtacttttagagaaaatgaaaatttcaataataggcaaatcaaacaaagtccattacatgaagacgctcatagaacaaaattaacaataatagatttaccaagccgtttacaataaaaggaaagaaaaaaccctagcatcaacctcaattaaagatttaataagcctttggcgatcaagcataaaaaaatgtgtgaagaatacttagtttccaaactaaatgaacatgtgagaatcaatttatgggccaataatcttctaataaaaattgagacataacaactccattattcacatatgaaataaagaaaataatcaaacgactaactatggctaggcatctaaataattgaacaccacgaaacatatagtgaatagacagatttggccaagaaagaagaaatatcatcccatcgaaacaatttgatttaattaacgaaac

SEQ ID NO: 35104 - DNA, 1992 bp, Cannabis sativa
tttactgctatgcgagattgataggttattttatactatcctgactcaatttcccacttgagcagctaaccagatgtatatggcttctgcaaaacatggcgtaaaggttggtcggtgtaaatttgaactggatgagcttggaagtagggccttgacttctttgtggctaagatcaagcagtttgttaacatttcaattagggggtacctactttcaaccctaactagtcttttgctgatttagtagattggatgttgaacaatattattttctctgatcagtacgacacttacagcatgctcagtgactgtaaggtagatttctagctattttttgtctagaggttttgagaggatgggaggttctacgagttgcttttttatctcttaaaaagtgttctcacattcatttgtccacttaaatttcttgttacctcgaaggatgttgaagaaaggaacacacctatttgttaattttgagacaaatatgcttagtgtggctatccggccaattaggctttgtacttctttcacctttgttggagactccatatctaggagtgcttgaattttctctagattagcttctattccttgagcattaataataaatccaagaaacttacctaagctgacccttgaggaaacactttaagggattgagtttcatccaggtcatctatgtgcccccaaccttcctagatttgacgagtatgtcatccacatatacttccatgttacgctcaatttggtccttaaacatcttgttgactaacctttggtaggtagccccaatattcttaaggccaaatggcataactttgtagcagtacagactaacatctactcggaattgtgtgtgctcttagtcaagcagatgtcttcttatttgcttgtaccctgaataggcattcataaagcttaggatttcatggtcagctgttgcgtccaaaagctgatcaattcttggaagtggataacaatcttttgagcatgccttgttgaggccggtgaaatcgatgcatactcgccatttttttgttcggcttgggtactagtacagtgttagctacccattccgggtagaaggcttcaattatgaatctatatatgcagagcctttctacctcttcttttagtgcttgcacacgttccttgtccaacgatttccttttttgctaggcgggacgaaagtttggatcaatgttgagtgcatgagacattatagttggatcaatcccaaccatgtctccatgcgaccatgcaaaaatataaagatttgctcttagaaattttatcaaggctgatttaatttcaagcaacaaaccctttccgatcttgagtttcctggttggcatggtgggatcaattttaacttcttctaatttctctactagcccaacatttgtatcaggttccgcaaggtaaggatccacatcttcgtccccgccttgggcgatgctttttcctttctctaaactctggccagagtttctttttttttttttggccttagatagagcaaggttatagcattcatgtgcagttctttggtttccttttagacaacacactccatttcttgttggaaattttacactcatgtgatatattgaagtgacaaccttcaggtcatataaggttggtcgacctagcataacattaaaggctgaaaggaacatcaatcactaggaattgagtcatcaccgttgtgcttgttggagtttgtcccactgtaagtggtaggcagatctgcccaagtggagcaatgctttgacaggagaagccgtataccagctgagtgcaggggaccaagtctttaaggtgaagacccatattttcatatgttattttgaacaaaatatttgaagaggctccactttcaaccatggtctgagccaccattttatttgcaatatggacatcaacaaccaaaggtttgttgtgtggatagataatgtggtcataataaaggatattattggttctccaa

SEQ ID NO: 35105 - DNA, 2785 bp, Cannabis sativa
  modified_base (646)..(652): a, c, t, g, unknown or other
aaaaaatgtagaaattatccttttttaggttgaaaatctacgaatatctaaaattaattaataaaataaaaattaattttaaactgataattagatttgagatttgaaaaataaaaaatccagataaaattttacctaaaaatttgaaattaaattccaagaaaaaccatgaaaaattgaaaaaaattcatttagggtatgcaatgcataccatccatgcacttgcaaggggggacttgacctagggatgatgcacaaggaggctgctggcagggtgtccgcacacaggaggggcttgttcaggcaagcttgacagagaatcctcgaacaaaacttgtccgaatgcacatcttgacaaagtgaaccttgggtgtgcgcgtgcgcaggggagtgatccccaccataattttttctaaatttcaaaaagtcataacgaattcaatttaaatcgaaatttagttatgcaaaaaagtaaattgcttatttttttcatactctctaaataaaataatttcaaatcaaatcataaatccaattatttaacataaaaaaaaaaaattataaacatcaatcaatcatcaaataaacacatagatcaacatgaatcacatccaaattacacattcatcgttttaaatccatattnnnnnnnagtaaatcattatcatagctctgaggccagttgttggaatacattttaccaggatctaaatttgctaacaagtatgttgattatattctataatataacaacctaaatatgaataaaaagtttagaaaaccttacattagttgtagtaggatgttatggctccttccaatcagatttctaacacttttcctttctgtcgtagagtaataacaagatctgagcctggatctccttcaggtgttggattcttcacaatattccatactattattgagtacttgacttgatatgattgggcatgtactctctcactaagtaaaagaagaaggagactgcatttatgtgagctcattttgtggagctctcgggatctttgagaatctttggcacttgtcacatttcttaacatagtccattgaatccttgatcatggtaggccaaaagtacctttgtctaagtatcttttggaaaggctttgcccccccagtgtgatttccacaaagaccttcatgcacttaaattagtagtcatttagcttcttccttggtgacacatcttagaagtggcattgagaagccacgtctgtagataaccccatcgaggatgaggtaccgagcaactttcctccttatttttcttgcttcattgttgtcctctagtaggacttttgtttggaggtatgctaatattggtgtcatccatataggattgtcatcaagcatgtctattttttctgaaatagtgatgcttaggtctttcaagaaatgaatgagcacaaagttggtcttgtttgtcaaggtatttctagctagtatggcaagtgcatcgactgttgcattttcttctttgggaatttaacaagtcttgatcttgctcaagtaggctaccatttttccccccgggcagtgtactcacctagcacatgattgatgaccaactgagagtcattatttatgtccaattagtctgcccacacttcatgtgcaagctttagtctggaaattagagcttcatatttagccttattattcaaggctttaaaactaaactttatttccccatgtagttgttgcccctaggtgtaatgagggcaatgccagcactagacaggtggtccgtacagtttccatcaatgtgcagcttccaggttgaattttcttgctcttgctttttctcttgctctttctctcgcttcttctctagctcttgcttttctcctaaatcttaagagatttcaagagatatgcctttacattcagccatgaagttagggaggacttggccttttatcgccactcttgcttggtaggtgatttcatgttggccaagttcttttttcaacttgagtaaccagccagatgcttcaggtttctgaagtacttgtcgtaagggctggtcagtgtacactcttattggatgagcttggaagtaaggtcttagctttctcgaatctaggagcaagtagtatgtcagcttttcaatgagtgggtatcaacttttagcatcaataagtcttttgctgacatagtatactgggtgttgaacgtcattttcttctctaatgagaactgcacttacagcaaactctgtgactgccaggtatatcccaattcttcattgtctagaggctttgacatgataggatgttgagctagttgtttctttagctcttaaaaggtagtttcacactcctctatccattcaaattttttatttcctctaagtatgttgaagaaagggacacatttgtctgaggacattgacacgaatctgcttagtgcttctatacaacatgttaagctttgcactttttttatcttcatgggcaaattcatgtccaaaagggcttggatattctttgggtttgcttctattctctgggcattcactatgaagcaaaggaacatgcatgagcctactccaaaagaacacttgaggggattaagtttcatgttgtactctcaaaggatcttgaagcattcatttagatcctctatatgccttctagcctttttggacttgacaaacatgtcatccatgtagacttccatgttatgaccaattcggtctttgaatattttgtttacaagccttttatagatagcccctacgtttttcagtccaaagggcatg

SEQ ID NO: 35106 - DNA, 3795 bp, Cannabis sativa
ctctataccatggatcactttctttggcagtataatgatctggctctagtatgactgaatggtcaagagcacagaattaattagtattgctcttcctgcaaatgacaaatttcttaaactgcataccttaatcctggctgtcattttatcaacaaaaatggtacactcctttcctgaaattcttttagagcatatgggaatccccaagtaggtgaaaggcaagtattgaactgaaaaaccagatgcttttacagtccgattcaactctgttctgggcatgttactgctgtaaatagcaggtttggtaggattcgattgcagacttgaggttatcgagaagatcttgaggccttgtaacatgtataggacactttgaaaatccccattgcagaagagaagcacatcatttgcaaagcaagatgatttaatttgatttcagcacacctatgatggaacttgaagtcttgtttctctcccattttcccataattcttgagagatattccatgcctaagacaaagagtaaaggagacatgggatctccttgtcttagccctccttgcttcaaaaaaacccatgtaaggtcccattgaatatgagagagaatttaggagtgcgtacacaattcatcacaagagtaatgaaagactgaggaaactgaaactcttgaagcatttcttctatgaaattccactcaatagtatcataggccttctgaagatcaagcttgataatacaactagccttgttagatttcctactataatgcctaacaagatcttgacatatcataacgttatgcccaataaatcttcctttgataaagcctccctggttttgggaaactaaatcaggaagaatcactttaagtctagagcacaatagcttgtttgcaattttatacacaacattacaacaagttattggcctaaagtctttaacagtgtttgggcattccattttaggcactatagtaaaaactctagaatttatttctttaagtattctacctgattccaagaaagatgtagcagcttggaaaacttcctctccaaccacctcccaattatcttgaaagaaaaaacttgagaaactatcagggctaggtgctttgtttccaggggttccaaacacaacttccttcacctcctccctagtaaaattctttgtaagcatttctgcttggctttgagagagagtggggcctctgcatacaattctgcttgacactttctttcttccttccaatttagttcccatcagagatttgtagtaagatacaaaagatctgtaatttgttgaggctcatgaactcttgacccgtcgtgttgctctattgagaaaaatttgattctgtcgaattctttgcttgatacttgcatggaataaggcagtatttgaatcaccattctggatccaggccattttttatttctgctgcagaaacagggagtaatttttctgcacttgtacataccgatccctcacttcctgttcagtagcaagtaggccatgattgagagggtcctgctgaagtttcacttgtatgctctccaatttcagccttgtttttaaagtggcatcctataaatcaaaaaaacccttctgatttatatctttaaacacctccttcaaggcttttagcttactgaccaatatgtacattttcgagccatgtaaagtttgtgtccaaatttcttggagctttgcgtcaaactcaggataatttttctacattctgaagtatttaaatggcttcttcccaccttgccaatgaggatacagagttaggacagctggtgtatgatcaaagagaccttcatttaggaaaccagcttcagcagtaggataattgtctaaccaagattcatttgccatgactctgtcaattttgaagtagatacgatcatccccttgttgtttgttggtccaggtaaagaaactccctgttgatttaacgtcttccagatggcattgcataatgcaattcattttaaaattaaaagatctcattattaaaaactaaggaactaagccacacttcacgcagtgttgttcaacttctataattttttattatataaatatattgtgcttgtggagatataatttaaaatataatattttgatatatgtaagtaatagtattgaaattagaaatatattatttttaaaatatatagaaagataacaatttgtgatatatattaaaaatagtagaattaacaaagaaattacatgtgttattataaaataataaatgaaaaaagaaaactatttctaaatttaatagggaaatttgattttttatgcttacatttagttaaaaaaaaatttctaaacacataataactaatatttgtaggatatgacaacttttatgatatccctaaaagaccccctatttacatcatttccattacacaatcggaccccccatcggacctcacatcggacacaatcggaccccatatcggacccatcggaccccccctcggacccaccggaccatatctgctaccaatatgtttttgtacataaaaaaaaagtagcatcaggtgaccatcggaccaccatcagaccccatcgaaccatatctgctaccaattttttttttatttttttttatgtttttgcaaataaaaaaaaagtagcattaggtgaccatcggactaccatcgaaccccatcggaccatatttactaccaattacttttttttatatatatttttgcacataaaaaaaatatagcatcagactaccatcggaccccatcggatcatatcatcagactaccatcggaccaccatcggacctttgtcttcaacctttactcattttaacaacaggaaggcatcagaccaccatcgggcctgacaaaaaaaatcaatttttttgcgcaaaactcagatctggccattttcgaccctaaatctaacatctactcataaataacaaacattaatcattcaatttatttatttgacaatattgctcatcataaatcacctaaaaaaacaatgacaaaaaaaaaatgggtcgaatgcttaccttcaacatctcggaggtagtcgggtctcacggtggtcgtctgtgtaagcggtgaggggtaggttcggttttggtgagggtgagatgttgagagagaactgagagagatagaggaagagagagagttgaggtttgaaaatgagaggggtatttttgggtttattataaagtggtcatattttttaaattttaaaatgtattagtttaggcataaaattttagagtattttatgcatattttttcaaattttccatttaataaattggatatgtgagtgatgatgtagttctttttgaaaaaatatttaggcctatttttttctttaatagaaagaaacaatataactactatttatgaaagtttttacattttgtttcataagatgacaactgtaaaaaggttttaaaactaaaaaaatgagggatttatataaaaatattaatgataaaattggtctatatgaaatgtttaataagagaattaattttaataaattatgtggaggtaaaatatatgcattaaattataatgatgaaaagggaagtcacgattcatatgactaattgcttctattatgaaatatatatttgtcttattgttttgtaataattaaaatgataaataatgtatgaagtttgttgtgcaatcgcgtgatcgttataattatatagtgcatcgtacaatcattataatcattaaaaatcaaatttaatttatgattattattttttttttttgcatt

SEQ ID NO: 35107 - DNA, 2672 bp, Cannabis sativa
agacgacccctgagtaaaatatttgttttgagtaatcagtactattggtaggagtgtttgcatgtggtacgagtttaggctattttttttttaaaatcaaatcgtatatgtgatttttgtaatttctcaaactgtaactgcatcgcaagattttaaaactaagaaaaataaaatcgcaaaaatgtgtggtacagtgcggtgcggtttaggcagtttacactatcatcactattaaaaattaaaataaaaattaaaagattagtctaataaaatttcaacaattgaaaaagaagaaaaaaaatatcttatcaaacttttaacgttataacatatatactaatcaagttattgtattgaattgtctctaaaatattatataatgtatatatatttatatatatatatctttatatataaaatatgactatttaagttgttaatgtaaatttttgttagctaaaatattagacttttttttgtagtaataagtagactgcaaaattaattatatagcaattaattatctagaaagtaataaataacatgaaagtttttacgtggttttgaagttaattcttcatagtctatgagtccatcttattaaggataaatatgtttgaatacaaaatacaatgatacaatttagcaacagtatctcttttttctccctaaattggtagttccttttactcttagttctgtccctatttctagatgcatagggcgacaattatttcctttgaaatctacttattcataatcgttcatgaaatgtagacattccccatatttcatctttatgcacatgagataataataaataactgcttaaccactctttgtctctatttgtagacagttatgctgactgtgtagcatggttgttgtaatttgaatatcatccttcatcttagtaagataaatgttaagtgttgaactacaatgcatctcgcagttctccttagtcgttgagaaaggtattagcgaggtggttattttcatacatcaaaagtgaggtgagtaaatgttgaagttgttttcatcccttaagcatactcacgagtatgtaggttaatgagttccaagctcttatttacgagtatgaggatcaatgagttgtaagctctttgttcacttgttatgatctgtcttcattgtacattcagtttatcccgagatggacttgttggtctcgctagtctcatcagttagtagtttttacttgtgtctcgctattgcctatatagcgacaagtccaaatatttctataattgtttcccgagacgagttaattgatgtgcatttaataatgcacaatttaggctggttcatattccaggtctaatacacgtgtcagcttcttattgctagccgaaatttaggtataacaattacaccctaaaatgtacttttttaaagaaaatgactttttaaatgccttcaagggtacaatcgtatttttccatttaaattttgcatgattttattttagcagttcaagactttgaggcaaattatttcagcatttaatgttgtgactgttcctttctcggttagttcccttccgttagatttatccttctcttaatataacgattaccattgtttgggtataaatttcaaatttcccctcatttttgccatttctgcccacaaaaccttcatgcttcgaaaatttctaaaccaacatcttccctaaacttgcataccctctctgtctttcaccttctttctttgagtttcatccgattacatccctcgattttagaatcgtcaagatccagtttctctggattcagagttttcatcgtgattaattttaacacccgaaatctctcatccaaccagtaagtaatgtttcattttactgactttattttatgcttccaatcttaatttcttagtatgtgtgttttctttagtttgcatggtttgggtaaactgtatatgaatgtttgagtaacctagggctagaaaatttaaggttatgtcattcacgggtcttgggttttgtttgtgctctatttttctaggacttagggcatgattctctatgatcatgccccaatttaacgtagaatttataataacataacccttagaatcagactgtcctcaatttccttccatagcttttaagcctcaaactcaagaacctcaaaccatacttgaaattaatgacgcgaaaattaggaaccatctcattaggtctaaccaggaagaagcttctaaccactatagacgatttttacaagaagtcattgagggtaaacgttgttgtttgtgagaaattgcttagcttgaatcacctagtttagttactatccccttagcgaggccaatatgtttaccaccaatcactgttgttttttcactaggtgatctggaatttgaacttatagctcacaaagctcgcaaatccaagactcctcagaatccttctgtcactttcgaggcagaattgattgaatctagggtcagatccattggccttgtaatattccaaaaacctaattattaataattaaggtttattattatattatgggttaattaagtagtaatgagtaggatttcaatcatgctaacctaatttagtataaattataaattttgctataagtggataaataagcgtaatttattaatacgaagatttatttagaatatgt

SEQ ID NO: 35108 - DNA, 1579 bp, Cannabis sativa
gtgtataaagtggtctaaatttaaaaaattataaaaattatgtaaaacttgacaaaaaaaaatataatattcaccaaattttaacactaataaatattacttttttatttactttttaatcatttattgatataattaataactatttatgtattattttgtttgacttaataactatttatatttctttatataattaataatatttttatataatttcaataaaatacaatgcttctattgatatttttacacatttttatattgttatagtgtaaatttttcacttagaaattcgagatcaggctcttgtaagaatgacatgtcgactcacatccctcgaagattgttgagctgtcagaagaggacctctcgagaataaacatcgcctaaaccaaactcagcgagataatgtgatcttgacagagtctagtcacattattacgcctcccataacgtaggaccaaggagaaaatgttcaagtctcgcatataccaagatgtatgcgatgtctatgaagacttctcctgcgacttagtaaaaatcgtttccttacatagcgagtaagtccaaaagacttaatatgctcaatgattcgataaggactcgcacgtcttagatcattgacacttacaaggtatccacatatgcgactcgattaggacgcagatacctaagtacgaaactcattagtctcgttttaacaagaacgcaccctaagcctgcgagcttgtgcgagcatatgcacagacaactttcactatgaaagtcacatacgttgttgtatttagtaaaatggatttaaattgttcttcatttattctatttacgttttttttaattaatgctaatactcaatgtaaaatagtttaataatcaattagtgtaaccaaaagatacttgctttgtatataaaacagtgatccaacatgaataagacaagacagaaatccttgtaacagtggactaagccgaccgtgatctgactgaaccactatattttcttgtgttcgttacttttccatttgtttgtgtagcttcatttgaatactctccattctaggttgagtactctttttttttgttaaaaaattagaattttattttatttggtgttgtctaaatttctccgataacatttagcgtcgtctgtgggaatcgtatttatttttgattttggaggaagatcaaaatggctgcaaatcagataaacgaaaaacaacaacattggatccttcaacatcgaaaaagtgaatgtcgcactcccaggtaatggagcaagcccggttgacataattaatgggggtgtgagacgaaccactatcaccccctcaatttatttccagaaaccgctagtcatgacggagatacgtcgacaccagcagccatcataggccacttctcgcctatcacaccagtcgtggtttctgaaggaattatccaactaacaacggcccagtatacagccatgtaggaacaaatgggggcgttgcaggctgaggttgatgggagagccaagactcgacgtccacctcgaatccttaacacgcgttcgggcaatcctcaggtaactattgcg

SEQ ID NO: 35109 - DNA, 3741 bp, Cannabis sativa
  modified_base (3227)..(3230): a, c, t, g, unknown or other
tgaataagataattatttgatcactacaaaatatgtaagtgtgtaagagtttcttaaaattgtgataaataatcaattgaaatttggttcacaaaaacaatatcagtgatgatacatacaaattaatgcacgtaggaattgtatcagaattacgaaatgacacgtaaaatctaattggcttataataattgttattttgttacgtgatataattttgtcacgtattttcttattaatatatatctaaataataaaatgtaataatattaaataatattaattaatgaattaatcataccctggataataaggaacaggaagaagaaaagcatcaccagggtcagcaaggcaaaacattagggtttcatttgcagaagttgcaccagctgttagaacaatcttatcactttcaaacttcactttgttacctcttaatttacccatcaattctgccatttcctgtaaaaatcaatactaatcaatttatctccttacaaatactacaacatttaatttagatcacattacttaaagtaattatttttgttataatgtatatatattagaaatgacatgtctcaatctaagtaataatttgtatttaaatactatttttagtgattaaaagtgatatttaatcataaaatatttaaattgtaattgaaaaataagatatttatggtaaaaattaatccttatgtaattcacttttgttgcacttaaatacctaagcaaattttttggtgacgaaaattccaatgtatagtttattttgttacaattaaatctttatgtaattcatatatttggttgtaaaaaatcgttatacatgttaatttgatgcaacattaattcataattagttaagagactaatattataacaaaatgactataaatagatttttactgctaaaaaaattacataaatatgtaagtgcaataaaagtactgaactacacaagaattttcgccactaaaaaaattatataaaagtatttaagtgtcgcaaaatatagaaatttttgccctaaatttcttttaaaaataatcactaggtaacatttttaatagtgtgcgcttgatacacacttaggacgagttcgggaacactttcatgaggaacgacaaacgtcattcttgatgaccttgagcattgctcttggatattagtggtgcccaacactttttataggtgacgctctacgattgattaataatattttctaatttttttttaaaaaaattatataagatttaatatttaattacacgaatagcgatataaaataaaaaatgatactaagacgaataatataccttttaatatttttcaaattattaattacttacatttttgaaagaaggcaagccatggtagtcttggaaaagagcaagctctttaaaaagagattgaccattagtactacttcttaacccaagtgcatctggattctcaccaagccatttctcaagaagatcaaaacaaagctgaaataataatagtaatataatttcaatcaaattattaattaatacactaattaattaaagagtacgtgtaaaattattccaattattacaataaggacagccaccaaacaaacataagtagagaattttgtcaattcaagcaaattaatccattaattaatgtcaaacaatcaattttattgctttaattaattatatgactatgacagctgatacacatttttttaattattattttacataattaatcaacttttttttagaataaaaataagcaacttcattaatataaatcatccaaaactaagaatgaaaattccattaaaaatacaatcgacaacaaaaatagaaaatttacgctaaagcatgcaactttatttgcagaccgattaactatataatcttaaatatatttatatattattattatacctgattttcagcaagacccatctgaataattccattggggttgtgaatttcatcatagggattcttttcatattccatccatcccatgaagtaagatgaatcttgcccatgtgaatcactactaatcttcttagacaacattttcttcaatcaataatatttatatttatatatatatatatatgatatgatatagagctaatatgatagagagagagagagaagagagagtttgtgagggttttattttgagttgtggaaaccatttgttgtactcttatttatatagaaagtcatcaactatgaattgaggtgcatgtgtgtctactttgactaagttcatctctaatattatctaccttttatttatttatttatttttaaaaaaatctattatatatgtattatttcaatatatattaattaattggttcataaatctttgtttcctacctaataaatatgtgcacgaatatatatttattttctaatatagaaaagttgtttgttattattaattattaaatactaaaaatgtttttatataaatagtcaaatcattcactatgctcagtctccaagtacttcatgggattaatttgcaataatatatatattaactaataagtttattaatttgttttgttcttctcatcatcatcataaataaataataaattcatatagaaataaattcaaaaattaaataaaaaataaaatttagagaaagtgagtccccactttcatatatatacgtagcaataataatgcatggctgtgtacagctatatatatataatgtatatatatatatagatatatagatatagagatatagatatatatgtagttgacacatcaaaaagagcaccgacatagtgacaccatttcttgatctgatttttaaaatggaatctcttctatactctcatctcgtgtactaaaaacaaattaatatttaattaattatctcttatattaatcattactaataataatacatatatagagttattaatattattacaattctataattactaatattaccaaacacaataatttctcataatttactattaattattagttattttacgtaattttactattatttataggtagagatatacaatatacaatgtaatatatatttaatatttattgtaaaaaaagttacatattattttatctttaacagcataaaaaaaaattcttaccaaagaataatgtcgttgaaaatgaaaaacaatggcactgatatatatatatgataagattttattttgatatatatatatnnnnatatatatatatatatcaagaatattagtcaaaactgtttggtaatgtttacgtatttaaataatctaataataggacaaaagaatatatatatatttagtgaaattacttggaaatttctttagaattaattaaaaaaccgaatttttaaataaattataagaaattcatgtgataatatacttatggttttgtgtgatcaattttattttattttttctacactaaaaaaaatgtttttttaactatttattaagattaatataatgatttatcaaaattaagattttttttttgttctctcaattattagttggtgcaaaagttgtacaataattagagactttaactttgagaagtggatatgaaactgtcaaaaagaatataatatatgttcatgttggaacatcattatgtttatgaaaaactaactagctatgtaaaatgaatcgatcaattatgcatacacaatataattattcatattctattatataagtaaaaaaaaaaa

SEQ ID NO: 35110 - DNA, 2772 bp, Cannabis sativa
  modified_base (2719)..(2719): a, c, t, g, unknown or other
  modified_base (2745)..(2746): a, c, t, g, unknown or other
ggggggggggggggggggctttagaacttaagagcgtagagcctgaaacttagagagtttagatttagtttagtactctttatgtaggagagcttacaaaagatgataagttaatctcccttaaaataaggagacatcacctatttgttacacattaaattaataaataaataacatgttaattattctccaagaataggtaaataactgaagtttatcttttattttttgagttcttgaagctcagttcgtaactggaagtgtcattcaagctgaaagttgcagaggcacaaaaagtacctgccaggagagaggctggtcgaccctccctttgttgcaggctagccgggtatgctggcaatagggtcggccaggggtggttcggccaaacctccatagttggccaattcattgtctctttgtcccacttaagtatttggactcctcgtttaactagtgtgttatgcatgatgacttggctttcttgctgacaagtcactccacgtggcatcaatcttgcccatgtggatatgtcatgtcaagtgggtaaatggataacatttacccccaagtctttgtgcgaacgtttgtacggataaggacttttcagcttcagttttgactgttggagtcttaacagggcatgttatagtaattttagttataaaaaccttttttggttgctcatttccccaatagagaactgataatattctgtacggttattttatagactgcgtagttgtttgctgcatgttgaatgaaagtggctcaccaaaaaccatataaagtttaagagaagctcttcactttcccttggaggccaacacacctaagtcctctgaatcctaggattctcactttgtttcgatgatccaagcttcccatgggcttccttgaggggtttcactagtgggtaagctaattttaaatcccgttctctacttgttttcttaaatttatcattgttgtgttcaagtttttccatgctttatacattcttgattatcacgttagattgtagttttttttgtattttgatccacatgatagttttatgatacataatgtgtgatttcttgatgaaaaagattcgattttgacatttgttgtgattcttaactatttgggtcacgagaacacgaagaacatgtccgagttttgaaaaaacatattttgatctaaaacacaccttggctgacgatagggttcttgtttaagacttggcggacccatggtgtttgttatgggggttggccggttctagggtttatcctaagaacctagccggttcaatagtgattttttaaaatcactactcataagtaaagtatatttaaggaaataatcattattttattaaaaaattatgaattaagatgaccaactatgataggtaattgttgttttcttttttgtctttttaaaactaataagaatgagagtgaaaatttatttattagaataattgcttaaaattttaaaaaatttcataattacccaaaaattttaaagtattactaatagacaacaataccctatgatatgttatttcacatgtaaatttttttaatctattccctcatatatactcattcataatctctctattatttgtattaactattaaaaaaatagaaaattcccgtaagaaacccttttaaaaggttactatagttcaccttaatagatgacaaataagggcctacaaaacaaagtagtttttctactatttcattttatgattttttggacaagattttatgatttttttttaattcttttttttgtttctccacactctatagatgacgggaaaggtctacaaaatcaagtagttcttctacctatttctcttgtatattttaaaagaataattatctattgtatttaatacttttgtttataatattaactattagattgaagtctaaggttataaacaaatcactacaagtagtgtagtgattaattttgatcactacaatacaatggcccttatatatatttatttatttatttgcatatatatttatttatgtatatgtttaggtaaacaatttaatgtgttttaaaaaaatttatgtgtttaaggtagttgttagtgtaaaatatttaatgtgtaaaaaatatttcaatttttttttataatagataagatttaggtttaggtaaaaagtttatttatttaatttattgttgtttagttgttttaatttagtttaggtaaaattataaattgttattagtaagaataattgtataaatttaggtaaataaatattttagtataaatttagtatagttgtggagaaaaaaaaaacgtttacaaaaaaaatttgtttaaagtttaattaatgtttatgtaataagttaattttaattaatttgatttaattatttaattaagtgttaatttattataggtgtttatttgtggtgatagcatttaaaattttttgggacactatattagacttagtaagctactgaaactttttactcaatattttaaaatcttagaaaaattgaagtgcttagcattgttaattttaattatgttcaagtattaatggtgatcttgttcgaatatgttaattggtagctttattgaaattggtaagttactaaaattatgttgttaatatatttattgaagtttaggtattttcggtaatatatatgtatggaacacttcttaatgggtattacccatgantggttactaaacaaatttaactatanntattaattttaaaaatatcaaatcat

SEQ ID NO: 35111 - DNA, 1241 bp, Cannabis sativa
atattgactaaaatatagatgattgttcaagagtactattggtttctagtactttttttagtgtcatatcgttattggtgtaattaaatagcaagtcctatataatgtaagaaaataagttttgaagaatatcattaaccaatcataaagtgagatttatataaggtgttggatagcactgctatccaataacaatgctctaaaatataacacgaagtaatatttatttttagaaaaatatctcaactaccaagatcaagagtaataaaactcaacaaaaataggggtgagaatgcattagagtagtatttgctattaataagctaaatacaactttgataatccgaccaccaaacagtgctagagaacgttgtaagagcgactctagctaaagtataagctacaacactaaaatctctaagacaatgcaaaaaataaacatctttaaaatcattataaaaattactaatttcatccaagacaagacctaaagagaaaattaaagaaactttactcatcacttcaaaataaagacaacctaggggtgttgagggaggctaaagcccaccctgagatttgaaaatatattaatatacaatttttgttttcatatatacatagtaattaaatagaataattggtgaagatgctttaaatttacatgggagaccatgtttcgaatcccattgcccttttttatgtgtattactttttatttattagaaaaaacaaatgaagtagaaagttcaaattaggttcaaacttatgaccactacaatatgttgctaaaccatcattccacttaaatttagctatttatttattattttggataatattaaatgtataactaagtccaccataaattcaatcatgggtctgccactgttctaggcaccaaacagtaaaagcaagaacgatgcccaaataatcacgcactaccataccaagaccactacaaatactaattatttataacaagaacgatacacacgaagtaatatgttaattatttgtaatccatttacaattattttaagtagggccaattgtatcataaaatatttagggcttgtttggtacactgtattttattgtatagtattacgtaagttgtattgtgttgtaatattgtataatattatttaatgtaatgttatatttaatattgtcatgttaatggttgtgtaaaattatattatttttactataaatttggattcggaccccaatcttagacc

SEQ ID NO: 35112 - DNA, 2666 bp, Cannabis sativa
taaaacttatttcaatttggaaagagtcctagctttagcttctccggttctcccaaagacttcttttttcaaattctagaaagaccttttaaagtaaagtttttttttttcttttcttttttttttttagataattacataaattactaatttttataaattttttacaatttgatgtttaaagttttttttattttttattttttattttatatttttacggtattctataaaaatacaataaaacaatatcaaaataatataaaaaataatttacaagtaataaaaaatcaaccataaaataataagagtatatcataaaaatgcacaaaaaactgaaataaaatctaaaaaaccgtaaaaatatttagaattccgtaaataccgtatttttataattttttttttgtcgtttttgtatttttttgaaattatctttttttctccatatttttgtaaatattccattgttaacccaataatggataggcccatagattatggccgtaccccaaaatgtgaaaagcccaatatgatggcccaatcgatcaagaactgaaaacacgtccctgcccctcgcctccctccctccctctctcttctcttctcttccttccctgaaacacaatcagccaagtgacgaccttctcttcgccggaggaaactcagacaacggcgcaactcgctaagaaggtaacctaacctctaccgccctctaacctttccttccctctctcttttgtattattttttctttctttagctcgtaaatgttgttcagttcttatttacttaattgaaaggttatggttattagtgattattatatgtcttttgaagaatgataatatgtgataatgatggttattagtttgtgaatgattatttgtgtctaataatctacgatttctaattctcttgttgtctctgtttctactgtgattctttttctcttgttatctaggaatacacttgttattctattgtttttttctaatgctacttacattgttatatggctatggtaaagactctttattaacctttgtttcgttttttatttttatttttatttattctactcctgtgattatgatgtttgactatattcatgagagtgagatatattcttatttattctgagattacagatttattctcacttttttatatattttttgtttgctgtaatgataaatagtagtactaatgttgtttcaatgtctataaactgatttctacttttataggagacttctaatgaagcacattggtttggtaatgataaatagtggtactaatgataagattggatgtcaactgaaaatgcatagacaattttagcttgatctgacaaaaatggatatcaactgaaacacaagtagagaaatttagatatgtacttgtcaattgacgttagattggcttgcatataataggtaagattgtcgcctgttatttggtacaagggctgctgcataagttaaaaattgagcaaaaaaagcaatttggatgtggagagaagaagacagtctcggaacttgtcatgtgaacaagatatgttgaggtaacttatttctattaatgattagagaaccttagcataccaaagtgaggctagagtttccattattcaatatgttttccttattacttttgattgctttggcagtttggaagataatgacagcaacgctttgatcttgcaaagttagaaaaagatcaaaaggaagggcatggtatatcctttgtaatactttgatcttattaataaaaagtgttttttctttttggttctttttctaattttatgaggaatgttttttagggaagtcaagaaatcaaggcaaaaccagctcctaaattgagcaaatctcaaaaaaagaagatgaaaaagttggaggtgtgttgctccgtcattttgcatatgtgggttcacttggattgttgttgaaattatttgtaatgatttgcttgtggtttgtgtaggaagagaaggaaaaagcacttttgctaacaaaaagtttggagattttacagtaacgattatcctttttactcatagaattgctaattatactttcttttttacatcccttgtgatggcttgttgatgataaattttgtaggaaatacacaattccagatggtgcatattctcttttaaagtcaactagaaacattggtcaggtttgtatttgttgcatatgtttaacactaacaaaatcatgatgaaacaattatcttatccagtttttcatttgtatgctgaaactttcaagaaaaaacgtagaatggtagttgaagtttccaaagctggcttcgaagtcccgtgtagcggccaaccatttacgagaaggacgatgatagtgtttataataagtgtgaatctgagttgaatgaaagacattcaaatcagcaattttattgggatgagatgcagccaacatcggtagaaaaagaatttcaaaataataagaatgtatccagttgacaatgatgagcctattttgagcaatgaacctgcagttgtagattgcggctaaagtgcaaataaagtatgtaaccatacatttatagcaagctgaatatatatttttcgtttaatggaactacgtttactagacacaatttactgaatcgcaattgatgattttgtaaattat

SEQ ID NO: 35113 - DNA, 3053 bp, Cannabis sativa
  modified_base (60)..(70): a, c, t, g, unknown or other
aaaggttattagattattaccttattaatttttttagttcccatcaatgggtattacccnnnnnnnnnnnttccatatatatatatatataagatactatttaaaaatcttgagtcatctatcatcttggagaagccaaaagggccactagccgaggttcgcccatcttcgctgctcaagatgcctttaacttcttgttcttctccaagaagcgcttcatggtaactttaggatcggtcaagaagtgaagacgagaatgaaagttattcatcttccagcatatgaaaccacatcctcatagcgcttcacgctatgtgacaagtaatcggagaaggaagtcagatagccatcttaggtgagacttcatcaactaatttgttggagtcccaaagcaaatgaagttctttcaactctacaaacatattagcgacgaactgcaagccgactttatgaagctcctaaagcttagataggagaagcttcaagttctcgttctccaattggacttgggataggtcaacttctttttaaaaacaagcatatttagcagccaacagctgggcatgagcttgagtcattaagtcttggctctccttcatggctttcttcgtctcagttgccagcttctggtgtcgctcccttagcgtcttctgggctgggacgtcatcctttaaggcctccacctcctcctctactttcttcagcttggcctacatctctgaaagcccaaccaaggtagcagttgcgtgtccttggtcaatttgttctttagacaatcggtcagcctccgtggcagcctgatctgatcataaacaatgcaacagtaagcttgagtaataaagatataaagaagcaaatgataatgacgacaatttaactcattgaagccaacaccatgcttaagtcttgagcttaatagacggtgaggacgcataagtcgcgaacctcttagtaggaaattagaccagatcagctgctaagttgctgacaatttcataagcaaaaggagtgagggaagagccaaggaagttagagaaatattctgccatagggtctaggtttaaatcatacacctgcccggagtactcacctcggagtgccccatcttacttttcgtccaaccacatttttgaagcctcggcctccgcacttcccttagtatgcttgtctacgacaaagttgtgcctagcaagctggagatgcgagtgagcctcatctgggtgaaccgaatggaaggcaccctcagaaaatgagtcgcctatgaggggattcttaagttagacatgtcctgagacggcgtattagaagacttagacctcttggacgaagtcgatttagaggaagagtgctccttccacttacccttctagctcttgaacgggagtatctcgccctcctcaagtaggattacttctggatcatcttggtttgactcaatgggccccttaaagtaaccatcactttggggaccacggcagtcaaagtagtctcgaccccttcaagatctacgtccaccatttccagcattccatggggcgatctgcaaaataagagcaacgatatttcataagtatcaaatacaaaagcaacacaacaataacaacaagttggtcaagcttaacagaggttatgaaaaggaattagtcctaccttggcgccctaattcctctttaacaaattgataaatcaaattactagagtcatcattccctaagtagctatcagatggaaggaatcaactcaagatgatgtaacaaaaattgttcagaaggatgggaacgggaggacttgaccgcatccgagatttatctaagaaatctccaatgtacaaaaaaatacatttatttttctctataacccaatcgggaatggggcatgcttaacctataaagactcttgtcaaaagtcacttggcctgacacgagcatattcccgaatagagggtacataatttaaagataaatgagacttgtggatgtcggatgaactgtctttaggagtccctccattcgacactgaaaatgggtattaagggcgaggggcctcaaggattttgtctatctttttagctgccttttagtcaatcacgttttgagccctagccacctggtcctcttcctccttctatctttggaaggtgttatacttcgctcagcttcttggatggttggcctacgaattttctcctctgctgccttatcccgagtgttgggaaagacgacctttgaaagatttgcgtctttgacggtctaaggagccttcaagagacccaccctctggcaattggtagtagtcaccaagtccctgaagttcaactcgttcctattgagggtttggaacaccgctttgcgatccttgaagagttgaactattggttgttgtccaaaacttacctcgtatggttgttgtgtgaactattccaacaaatattatttataatgaccatgaggtctaactcaaaataaactattttgctcatagtgccatctgatctgcgctaagtgcggatttcatattttagatccaattcaatctgcgccatagctcaaatccaatccaatccaattcgtaaaagtgcgaattggatctgttattttagatttgttattttttgatattaaattatttaatatttattaaaaaaatattttttacacaactaacaacaaattaaaacaaaaaatttaaaggaaaaaagattgtatgtagaaagaaatatgtaattttgtttttaattatattttctttatatataagaatgtaatatacatttgatgtattaagtttttaaatatatttatatcatatgtattggatctttaaattgttatttttttacattaaaatattaattgtatacatattttatatatatatatatatatattaatttttaaaatatatatatgtgtgggttgaactggttgtttttacatgtcaatccacatttaatccgcacaagtgtaaatttttaatttttcaatctaatccaatccaatctgcataagtgcggataactgcactttgtggattgaatcgtacggattgaatta

SEQ ID NO: 35114 - DNA, 2173 bp, Cannabis sativa
  modified_base (1851)..(1852): a, c, t, g, unknown or other
ggtttgggttcagagttgtgtcccggtagtcagttcctaggttttgagtccaaggtcgagtcctgtgtctcgagtttggggtgaagttttgggtctcggtcgcggtcgggcccatttttgggtccaagtcccccatctaggtctggatccttggtcttggtcttggtccaggttcgggtttggggcccaagtcccccatcttggtcacggtttggttctcaggtcccaggtccgagtctcgggtcccaagtcccggtcccagtcccaatttgggttctagtccctgtacaggttcaaggctcgatccaggtctgagtcccaggttcgagtttgagtctcgggttcgtgtctgagttttggtacgagtctggatctgggtctgggtctagatctgggtttgggttttggtctgggtctgggtgcgggtcttggtctgggtcttggtctgggtccaagttttggtacggctctgagatctggtccaggtctcaggtcacgggtgctgggttccaggttctgggtcacaagtcctagcgcaagtcttagtctaggtttgggtatgggttcaggtatcgaacccaatctaggtccgtgttcggttccgcatcaagatccagttctgggtcgaggtccaattcctgttccagagtcctaattccagttcttgtttcgatttcaggtccttagtctgagtctggatttgggtcctagttttgaaatggttccaagtttgggtcttggtaagattccaagatccacacacccactacaagttaggtccaagccgcgggtcatgggtcaagatccggttcccaatcttgggtcctggtctcgttccgatatagatcctgggtccctgtccgtgtccaagtccgtgtttgggtccgggtttgcgaccaagaccggggtcgggtcttgggtcacattctaaatcttgggtcccgattctggttctaattgtaggttcgggcccgcaatccaggtctggacctgggtccaggtctgagtctccaataccggtccgggttctgcgtctgggtctagatccaagtccatgtcttggtttgggttcgtgtctcgagtcccgatcctagttttaattgagtttgcgtgtcggtccgggtgtgggtctgggtcctagtcccttggtcttgttcccaagtctcggtccgcttctagttccgtttctaatttcgggtcacggtgtgtgtgtctgggtttggtttcgggtttgggcctgagtccggggttgggtttgagcccgggtatgggtccgagatccaaacatcgactatgggtcaggtccaagccccgagtccagatcaggatcatggtctcgagtcgtagtccagttcaacttcgggtcccaagacctggtctgggtccaagttcagggtctagatccggggtcaggtctatggtgtcagtgcaaattccaaagcccgggtcccgggtccaggtccgccatccaggtctgggtcctaggtcccagtccgagtctaggacctagtggagcttcaagtcctagtccgagttcgggttcgggtttcaaatcctggtcagggtctagatctgggtttgagttccaagttcgagtccagatctttgtctgggcccaggtcccgagtataggtcccccatccaggtctgggtcctaggtcctagtccgagtccatgtttgggtttgggtcgtagtccaagttcttatttcgattccgtgttcaggttcgggttcaggtccgggtctgggtcggggtctgagtcttggtccgagtcaagagtttggttttggtccaagtccagatccctgtctgggtttgggtttgggtctaggtccgagtccaagtcttnngtgcgggtccaggtttgggtctgggtctcggtccggatccatgtcccacgtgttaatcccggtctgggtatgggtccgagtctgggttcgagtccatgtttgtatctagatccatgtctaggtccgagtctgggtctgggatcgggtcccgggtttagtaggtccgacccgataccggacccggacctagaaccggaatcggacaaggactaggactgtaacagtatccactaaacccaaactcagaccagaacccataccgggacttgaaccagaccagcacttgtgacttgggacctaaaccaagaccgggacctggac

SEQ ID NO: 35115 - DNA, 2740 bp, Cannabis sativa
  modified_base (44)..(50): a, c, t, g, unknown or other
  modified_base (78)..(84): a, c, t, g, unknown or other
  modified_base (116)..(122): a, c, t, g, unknown or other
taaataaaaaagttatatttaggaaattttttatttttacactnnnnnnnttttatttttacactttaaaattatttnnnnnnnttttacactttaaaattatttttttttttttnnnnnnnttacggaattttacataaaaatttctattgccactagcagatcaacctaaattgcaaccaaatattgtatagtaacccatatagaaattaccggtaaaactactttaaaaattcaaaccgtaaataaaaaaaaataatatatagagtaattctcttaaattaaatattatttacggtgacaatattaatatttgttgtgagtacttattctagctctcttgttctaataactaaaagtaagaaactaactatacatataactatctcaactagctatattcttatttatttataatgttaaattattatttttgtactaatatttatagtaatacactaattataatcattgtttcgatgaacgttatgtaacatatgtattattatgatatttttgaaatcataaacttttaacttttactcacaaattcataaacattaactttttgtaatatacattatgtttaattcttcattttatccatgcatggaacaatagagttgttgaaaaaacaaaattgaaaaattatgcataaagtggaggcatattgtagcgtctatatctcctataataaggttaatatttacattaatgcatctaaagaagtgaataattaaggattacactataatataattcaataattgtgattatatatacactaaacatatttagaaacatatttttgataaagttaactcaaaattttattaacataaataagagttgataaaaattaatttttttaatgcttaataaataatgtgtacttattaagatgagtgagagatttttgatgtagttttgtagttaaaatttacatattctacgactacgagtctatttcaaatctgatgttctttgattacagatgcaatttggcaaaatttcctctcagttggaaaattggttgtacattttatgatgatttgatctgctatgtataggagtaggatagtatttatttttgatctaatctgtacaataattatgaaacgtgaatattctccacgttttatatgttttaaccgataggcgtgaaataacatgtaaccaattttattttaaataaaataattgcttatttgacttggtctttgtaatattttgtaacatgcggttgtcgaggcgcttgatttttgatgcataggccttagggaatacaccaactcttggaggtatgcgtctagtaacatattccttgggaaacatactgattatatttctaaggtgatgaaccagagtaagcaaattaagtctcgcaacgtcaacaatgtcaacaacatgaatgttcctaaattccttaacaagcttagcatcttcagttacatactaggaatgctttaagtgtctcgcatttaatgttgcaagtatcagcatacctcgagaagaacatgtataggcttcatactgcgaggaggctattcatgtactctttaaataactgagttaatttattcccttcattatacacgtgttatgtagctagacccattatttattgctcgaaatatgagtatcataattgtcttttaaaaaatatttttaaatttgaaagaactttttattcattatctagggaaatgatccgttcttttttgcttattgagtaaaccacactctcctaacagaattcctcaacgaattcaaagaaaaaagagatcaggccaacttgaagttacaagtttaccaacaaaaggtatatttcaacaagcaagtcaaggacaaaaagttctttgtgagatatgtggtactacgaagagtatttctaaacactaaagaccctgcagcaggggtacttggcccaatctgggaagaaccatatcaaattacggatattacaagtttgggcgcatacaaacttggtcaggacaatgagaaaatagaactaatcctgttaccaaaatattagaacgaaaaatatctcagaaattactactaataagccaatttgtaaaaaaaaaaaaaaacactactttcaagtagtggttcctgagcggtatgccgcacacgaatttgtgtggcttctacatggtatgttgtgcagaagtatttgaatacttaagtttttgaaagcaaccatgaggaatttaagattttattctaatacatgtacgttgccagcaacaacacatttgtaaaactaatgaatgaataaaagtgattctttcactcggattgtgtcaaataattttataataattgacttattaaaataaatattatgtctaacatgcatacaaacaagtcaatctaagaaactggatagacaaaggctaaagaacttggttaattgcaagtgaccaagagaccataagtctactcaatcacttgaggggaacctacacctgcacaacaagcaaagtgaaaatacttaagcaaataatttaaagcgaagttaatgcaaaaaaattgaaagttgagcatgtgcaaaagtggctttgttaaacattaagggaaatcattatgggattaaaggctgaccgaccaaccatacgtcttaacaggaaataaagccaagattaaaagttgtctggctgactatatgtctaaaatttaatggccttaggccgtgcagaaaataaatgataaacaaagtaagagcttcaaagctctg

SEQ ID NO: 35116 - DNA, 803 bp, Cannabis sativa
aagaagttcatatatatcacttgagaaatttaacgagtaaagtcttacaggacttaagagaagctcctctttaagcttagcatatttggctctgttttctttcagctctttttcccacaaatcacgacaaggtggcaaataactcaatagtagctactcacattgccatgcaagaaaaatcagtacacaaaaccaaaacttatcatatatatatgattaacaagaaccagtgttatttcacataatttccattgccttattttagtccaaagctatctaaactgcagaacatttcaccttccatgtcgttgatcgcaaacttcctccatccgggagccctgtgcttgcaactctttgcaacttttccaaattgatttgtggcaaggaaagctacacaagggaaataaaatggccatttagggatttaaaccctttcaagtttctgatatggtaaataatactgttcagtatttcaaccatgttttcatggcttataagcattttaatttccatcactgaaaatcaaaagtggtaaatcactcatccatccgaaaataaataaaaaaagttataaaaactcatattctataaacaaaaagctccatcctgcctggttaacctggtttcaaacactagattttttgttttattgcttataatgtctcttctccaattttctcagtctcaccaacaaacacataacaacatatttcatgatttataagttttttaacactgttaatcagttgattatttacgtcatttcaaataaataaaaccccagatttgatacgaaagcacat

SEQ ID NO: 35117 - DNA, 1102 bp, Cannabis sativa
aaaattttctagggataggcgacccgaagcggcctccctaaccaatataaaacagtagcccaacgaaacacttaaggcatacttaagtcgttttagcacgactgccggcagggttagaaatttgtatgacatcacacaacttatagcccttcaggcagggatctctattgatccattaaccgcagggggcaagttgtgggatgacttataaggacgtccagtgagaagcatcactgagttcaacgagagggctcgggtgtttgtctggaaagaagaagcgcgaaaggaaatgaacttgttgaaaacaagctcgagaggtaaacccagtaatgtctcaattggaactgcttccacgagaattgataactcgggggcttctgtctaaagagaaaggacgaaattaaggaactgttgaaggatagaaagaaacaaaagaagcatgacaaagacgtgccagtgtatactatttataccttgcttagtgaaacttgggagaatatttacctcacacatgagtagaaggtggccttcggcaagcccgagcctatgaagaattcaagaagcaaaagagatcctaacgaatattgcaaattccataaggatattacgcatacgatcaacgaatgtcgtcaatagaaagacgagatagaaggtctcatcgctcaaggccattttaagcagtacgtgaaaagataaggccagggatacaaccaccctagttttcctaataacccaaataaccaggggttacaacctattcctgtggaaggagaggacatcctacttatttcgagagggccgcatataacaggggaaagcaataatgcccagaaaagatatgtgaaagaaatgaaaaacgagcagtcggtctttgctctagaaccttccaagaaggtgaaaatcgaggaacctcccattacattcacggaggaagatgagaaaaacgtgagatatcctcatgttgatctattggtgataaccattcagctcgccaataaaagaatcaagagagtgttaatagacaatgggagctcggtaaatatcccttataaggagaccctaaagaaaatagggatcgaaaaggccaaattaaggccctgta

SEQ ID NO: 35118 - DNA, 1161 bp, Cannabis sativa
cagaaggtaaacaaaggaaaaagtggagtggttttttcatctaacacccctcaaaggaataaagatgatctaaaatctatgctgggtatgaatgggctcgggcctcaagagaaatacttgggtaatctgttcttcttttcggctaataagcgcagtgactttaagtttttgaaggagaagattgtatctcggcttgaggggtggaaggctaagaatctttctcaagcggggcgaactactttggttaactcggtccttcaaagtatcccgggttatttcatgtcaacggctctggttccaaggtcggtttgtgaggatcttgatagattggtggccaagttttggtggataggaaactcggaaaaacagcgttatcgggcgtacaagagttggaatgagatatgtcaacctaaacgttgcgggggccttgggttaagaaggttcagcgagattaatatagccttattagctaagttgggatggatggtgcttacgggtgttaacaaaccttgggtaagactccttgagtcgaagtactgtcaaggattagatgcttggcaagtggataaaaggtctggggattcgagagcttggaggggaattcttgaggcaagacatgtttgtattgagggggctggtgtcttaattggtgatggggaaactgctctttgggagcggccttgggttcctggtaaatctttggaagaggttcggaatggctttcactatactcggagacatgcttttgccaaagtctcggacttattcttagaaggttcgagagtgtggaatgaagagctgattagagctagctttgatgaagatgtggcctcggctattctcggcatcaggccgttgttgggcagtggagatatcaccttttggaaggggtccaagactgggcagttcacggtgaaaagtggctattgggtaagtcaatgtgggagatttaagagacccctcaaggtctgggagagattatggcagtctaagattcacccacggttgaaattggtcctttggaaagcctggtctgatattttaccttccaaacttcggttgggtttggtagataaaagctgtccattttgtcatgaggaaacagaatctgcccttcacttgttctgcttctgcagcgttgcacgtgctgtgtggtttcaa

SEQ ID NO: 35119 - DNA, 1736 bp, Cannabis sativa
agccagtcgatgttgatggagacgtcctggttgagggcatggactacgtcagtgaggaacttactgctgcggttcctcacagaaggcaaggtaccctagattccaggtgggtgagcccttcgtccagggttacagaggcgcgcctgcgggctctcgattagggtggctacctgggtgaattggactgttacattccatcccacaataaccgagccataaaccgtgaaagggggatatacgcctggtggggtgctcatgcccagcaaggggcattgttgccgttgcaccagtactttaagaatgtggcagacttcttccgcctcagcccgacccagttcactcccaagggaattaagtatttgtctgcccttttcctcctctatgcctcccagaagtgggatatgccttctccccacgaggttagatgtttctttgatttgacgtccacccctaagcaaggcaggtcgaggtacttctatttctctcaaccagttttcaattggttgacgggcaccggggattctaccatcagcaaaattgggcattttattgatgagtacttcatggtggacggcgtgggcatcacccatactcggttccagtagattccaacatatcaccgccctaccgttactcttactcttagggatagagctgaaaagcttgctcagctgccgatggaagactgaaatatcatccaattgacctctgaggataactgtgtgaagtacgggctctatccaaaggatttcattcctaagtcattgaaggggaggaagaagaaatctggtgctggacgggctgaacgagcgcctccagagaatcagctgattcaactgaagcacgaggctaagttgaaaggaggtgcaagggccaagcaatatgctcaggagcccttgaatcctgaagatgaagccgaggaagagcaggtgactccgctcaaaaggaggaagaaacttccagccaaggccaggcctattgaacatgcaatttgcattagggagcctagttgaccttctcccgtgcttggaaaagggaacgatattatgtctaaaataaaagacttgtcaggtgatgactgactttcgagtcttgctcgggcaatcttgtatactactctatcttgtttttaagcttcttgactattatgccttatgcttctgtgcagacatgtctcagaagatgcttgatgctttgaagaagagaattggtggaagctccagtgcatctcctccggccaagaaatccaaaggcagtgagggggcctctcctaaggaaaagacgcctgctggggaggtcattgatctttttgaggagctaactgttgcaaacccctctaccccaaaagttgctaagtccaaggattctcgaggaggaagttcgaacaggcttgaataaccaaaaggtgggtctaagctgatcaagagtgggcccgagcatatgcgggcccctaccccacctttgccagtgcttctagaggccaaaaaaggcaaggaaatgctcgcccactatacgaaccggttggttcctgaggttagtgagcaactcgccagtgctgacaacgactcttctctagagctgctgatgggaggagtcttgaaggaatacacaagggtacgtctttcctgacaatttcctttaatcctctttacttggctcaaattctaaagttttttctctgtgcaggccggtctaaagttggcatatacatgttggaagttattttaccaggaact

SEQ ID NO: 35120 - DNA, 2660 bp, Cannabis sativa
aagaaaacaatgcgtctggctgactcatctgatcctcaagggctcgccacgccactttgccctgccccgaacaggatctagccgtccaggtggaggtggatcatgaaggggacgctgaagtgtagcaaattgaggatctggacgatgttcgtcctagcagttcctccgaggcggacgaagaggcagaggttgaacccccaaactacggggaatacaatgaggctggagagctagtcgatgctgacggagacgtcctgatcgagggcgtggactacgtcagtgaggaacttaatgctgcagttcctcacaggatgcaaagtgccttgggtgccaggtaggtgagtcctctgtccagggttactgaggcgcgcttgcggtctctcgaccaagatggctacctgggcgagttggactgctacattcccgccaacaacaatcgagccacacaccctgaaagggggatgtgcgcttggtcgggtgctcatgcccaacaaggggcgttgatgcctttgcatcaatactgtaaggatgtggcagacttctttggcctctgctcggcccagttcacacataagggcattaaatatttgtctgccctctttgtcctctacgcttcccaaaagtggggtatgccttctcctcacgaattcagctggttttttgatttgaagtccacccccaaacaaggcaggtcggggtacttatatttctctcagccaaacttcaagttgttgacaggcaccgatgactcagccatcagcaaaatagggcgtttttttgatgaggacttcttggtggatggcgcgggcatcacccagactcggttccatcagattccaacatatcaccaccctcccctcactcttgctcttagggatggagctcaaaagcttgctcgactgctgggggaagaccggaacatcatctggttgacttccgaagataattttatgaagtacgggctctatccaaaggatttcattcctaagccagtgagggagaggaagaggaaatctggtgctgaacgggctgaacaaggtcatcaggagaatgaactcattcaacttatgctcgaagttaagttgaagggaggtgcaagggcaaagcaatatgctcaggagcccttgaatcctgaagatgaagctaaggaagagcaggtgactccgctcaaaaggaggaaaaagcttccaacccagcccaagcctatcgaacatgcaattcacatcagggagcccatttctcctgcttggccacctccccccgtactcagaaaagggaaagccattatgtccgaaataagaggcatgtcaggtgatgatggacttttgaagcttgttcggacaatcaccttccacactacttcatcttgtttttgagcttcttgattattatgcctcatgtttctgatgtctattttctctaaccatgttgctttttgtttcgtgcagacatgtcccacaagatgatcgatgctctgaggaagaggattactggaagctccagcgcatctcccccggccaagaagtctaagggcggtgagggaacttcttccaaggaaaagacgcctgccagggaggtcatcgatctttatgaggagctgacggttgcaaacccttccactccaaaagttgcccagccgacggagtctcgaggagggagtttggataggtctgaccaaccgagaggtgggtttgaactggtgcggacctctactccacctttgtcggtgcttccggaggcaaaaagggcaaggagatgctcgctcactacatgaaccggttggttcctgaggttagtgagcagttggctggtgctcacaatgactcttctctggagcttctggtgggaggagtcttgaaggagttcacaaggttaagtcttccttgatactcttctttaagtctctttagttggctcaaaaactcaagttcttttttctttgtgcaggctggtctgaagttggcctgcacctactcccgggctaagtctgcctcttccaagaacacggttttgtccaacaccatgagggcggaggtggacttggtcaggaaggatgctgaacatgccagggcaaaactcggagctgtgcggacggagttgggtgaagccaacaagaagcttttctccgccgagaagaaaatagctgagctgttaaaggatcttgaggcttctgaccgacttgaggagaccatcgagactttgtctactgaagtgaacagtcttcaggatgagaggacatctcttcgagtggtcctttgtcgggtgaaggaggagaaggaagctaaggaggaggagcttacgaccgaggtgacgaaacggaaagagaaagttcatgcctttgagacagtcggtcttgagctcttctacgactttcggaaggctaatcctcaggcaaacttcaactacttgggagaagctaaggacatgtaccttgagttctgcgcttcccaggtggcttatggtgaaaccgaggtggctgcttctacctccggccaaaatggtgatgtacttcccgttcaaacaacagatccttcagctcatgccagcccagaagacgcgaaccaagagcctgagactccagctgtttaaaaacttcttcttttatctttttatttttatatatcttattcggccatagggccttttctaagacatcgtga

SEQ ID NO: 35121 - DNA, 4427 bp, Cannabis sativa
gtcaaggtgatcctttatcaccttatttattcttgatttgttcagaaggtctctctcggttgttgcaatatgaggaagctattggtcggctacaaggactagctatttctagaaggtctcctcctattacacatttgttgtttgctgatgacagtctgctcttttgccaagctaatgatcgatcttcgggtgctattaaaagagctcttgatatttatcatagagcatctggtcaacttctcaatgaagacaagtctgttttgtctttttcaccaaataccccggtttcaatccaaaattcttttagtcaagttttgggtatgccagtttgtgaatgtcatgaaaagtacttaggtcttccggcttattctgagcaagataagaagctttttttttgtagacattaaagaaaggatatggaaattgttacatgcttggaatgacaaacttttttctgttgggggaaaagaaattctcttgaaagctgtggtacaatcgatccctacatttgctatgagttgtttcaaactttctaagagcttttgcaatcaattggactcaatgatggcacaattttggtggggttcaacagaagacaaaaggaagacacattggaagaaatggcatttcctttgtaaaacaaagatggagggaggtatgggatttcgttcttatattcacttcaatcaagctttgttggcaaagcaagcatggcgtatcttccaaaatcctgatacattgctagcccgaattttgaagggaagatactattcgaatggtgatttcatgattgctgtcaagggtagctattcttcaatgacatggcagggtatatgttggggtcctgatttgttaattcaaggtgtgcgacttaaggttgggactgggcaaaacatcaagtgtcacttagatccttcgattccaggcactactacaaaaagtacaattaccgtcagtttttaagtgtcatttaaagaatttacgtcggttttttaaaccgacgtatataccgtagtcgcaaatagtttttttagcgtcatttttgaaatgtcgcaaaaaactattatcttcatttaaaaaccgacgcaaaatatacaaacttcttttttatcttctgcgtcggtttagaaatgacgcaaaattatttgtagcatttccaaaccgtcacgaaaaacttataccgtcagttctaaaatgatagataaattgctgaaatattttttttttcatctattacgtcagttataaaatgaagcataaatgtaggtaaagaaaaattgtaatttcatacaattttctccacctacattatcaaattttaaaataattttatataatagtaaatacataatacaacaaattatatcccattttacacatccaagaaaaaaattcaaataaatttttacagtagatatataataatgatgataaaataataaaaataggacaatgtttggtcatgatcaagacaatatatataaacaattagtctaaaaataaaatctcgaataaacaaaaacaatatatgttttcatttattgatctcgaaactacacaaattaaactaagaaagtaattaattaaaaaaaacaagagagagctagaaattcctagtgctgagtatccaattaacatgatcatcatctaattgctttattttaatagcctcatgtaatctagatgcctctaaattggcaatagcagaatccacctcatctctgtcatacctaaatgagctcactacagccactagaagctatagaaaaacatacaaattactttacaatagataagcattgagtatttgagaaaggcctaaaggggtgttttgttttcacctttgctagtgaagaaggagaaacatttgatgcaatatcttcctctaaagaacaatgaagaagagaagtgtaagcttgcctcactcccaccgaatggtcaggagatgatgcacatgacatctcaactatcattttgagatgctcaacacttttcttactgttttccaaggcttcccgggctaatttcgcgtccctttcgcaaggatcatatgtccacaaaataatcgctttctgtttcaaaagattgggagatatttttattaagccattccaaattaaaatagctgtaacaaagttcaaaccagaaccacattctaattgatttgttcataatattccctttcattgttttattcccttttcaccttatcttttcatagggaaaaccaaaacaaatattctatttgaaccatcattatctttttcccaattgatcatttatcaaaacccaacttcagtaacaaggaaagaataaaaaagtattaacaaataacatagaaaatcaccaagaacatatgaaaattataaacttagtatagtatcatatatacaagaaattgaattaaagaaacttgtttttttaaaaaataaaaaataaagagcagcataaattgagagtcaacccaaaaccccatcaaagcaaggaacaataagtatagcagaggaaaaacaaccgagaaaagaagatgcacctgtgaaattaagcagtggaaagtgcaggaaaacaagtttgccatccttaaacctccaaaagatgccaacttccacttattggaacaatgaagcattaacatttgctgaataataataaaaattacaagtaactttgaatgtatttaaaattcaatgtaacaaccaggatgtacagaagttgaaagacatgatgaaattaatgcatacacatatcaatttaataattaatgaaaataatacatgcaaaaaattaatcaaccccttattacccttattacttatgtgtgtctacaaaaataaccaacaacaacaatataagaaaaatgaagtaaacatatgtaagaaaatatgaaagccaatttaaaccaaacagctaaaagcaaaaggctttcaagctttcctataattaccaagagataattattttcttacttagttttttccttaataaaccttcagttaaatcctaaaatctgggatcatcccttgagatatctaataaacagaatagcagggtgattgtatatgccaagattcattcaattaggagtaatctttctttattccaccagttcataaattagctataaattgtgctatagaaatagtacataaaaaatatagacattatattgaaattttggtaaaaagaaagagaaccaagcaatagcaattccaaggtaaggaatacatttgcagagaacctgttttcctcttttattataataactaacatatcctgaaccttggcaacttctatattttccagtccccgttatgaattttcttttctttttttttttttgaaaataaaatatcaataactatcattccacctgagtaaattgttcaaaacattcacatggagcaattgctacaactgcggacagcttcatggcactgacactcacagtttaaaaaattgcagatcgactgaataagataatcaaaacaaatataaaatccttagattatgaattttcgatgcttaaagcccaacgctttttcaaatgcttaattattcactcattatattccattgaaatttcttcaatgactatcattaagcataaaaaggaatataaaagccagccctaattcaatatatacatattcataaaatcatttcctatagaactcacatagcgaaaaacagaaaaaggaagagattagaaaggaccttgatttggtagtgtttgagtttttggtttcggcagtcattgccatcatcggccgaagtaagacgttgcttggcagccatgtcagaagagccattaataatggaagagacgtaagtagaggttgtggtggccactgaatcaattgctgctctccatgcgacatctccatcttcctcaccactgctactatcactcgggtctcccattacgaattgatgactcagttcagattgccagcggcgactcagttccgattggcgaagctaccgcctacctaaaaccgtcagcagcagtggaaataacaagatgacagagagacgaagacgaaggctcaagtgggcgattttgaagaagacgaaggggcagcctgttgatcgccagagcaaggtcgaagaggatgagggctaggtcgaagaacatctcatttgggatttagggatattttaatgctagttgcattggtttctctctctctcaattgtatttagcgtcattttttaaacctcgcatatatatacattcggcgagtgttacccacagacgcaaattgtaaagcagtttttaaaattttttgctttattgcgtctgtttgttttataccatcgtttataaaacgacgcgaatcatatattattagcgtcatttataaatagacgggtcaaattattgggtactattcacgtcggtcaacgctatgaatagtagcgttgac

SEQ ID NO: 35122 - DNA, 2961 bp, Cannabis sativa
  modified_base (1193)..(1210): a, c, t, g, unknown or other
gaaactaaaagttttcctgtcgatgaataacgtggcaataccctaaatatcgcaataatgagaaaaactagggttctcaaaaatgccccaaccggtagaccggttccccaacgaaattctgattctctagggtttccttgggaccaaccggaattccggttcctacaggtccccctgaaccggtcgatcggttctgtgcaggaaaattttgaaaaattcaccacactcacaaaacaaccccaaacttaaccaaaccttccaaacctacttaatataccccaaagaacataattcaagtaacaataacctaacatgctcagaatcaaaaatcaccattaaagagcaaagcttaagttcttaaactcaaagcttgctcaaacatcacaacaaccctcaaatccacttcaattcaacataattaacctcaaatcaacttcagaaaacataaacaaacaccacacaacaacatagaaccctaatagcaaaaacatgcataaaaacttaactagaacttaagaaaactaaagagagagatgctaggaatttaaccttgaattgaatacacttagaacttgataaattactcagaaacaacctgaaaacatccaaacccttgctagtttctatggggcgagagagagagagagagagtgaattttgtttaagttgcttttgaataaaatgaataattaggtattacttatcaaataataggataaaatcaaattataaaagctttttactacaatcactaaaagacaaaggaacatagggcaaaaacaccactttgccccccacactaactaaaagtcactaaaccacctaggggtaatttggtcaattctaaaatctcgactaatctcgacattcctaatgtctaactattatgcctcactactactaaaatactaaaatgtgattctaatggccaaacgccgtgttccaatgttgttgagcacaaaacatgcaaaaacataaaatttcatatatgacataactaatgcattctagattcaaataaacctccataaaatgataaatcataaatatcatgtaagtttcatacttaaaccctaattatctgctaatttctaaattaaagtcaagtggtctttacaatatgttctgcatttaatagaatttatacattaaacatataatcatgtgaaccatgcaacataaaataatttatnnnnnnnnnnnnnnnnnnaaatctatattgaaacgagttttatttagtgtataaaacagatttctgcattaacacccgacattaagctcacattgatccgacccgtatacgagactgagtcttgtcactcacctaatgatctcaaaaggggccagtcaaactaaccacacagataacaatcttcctcataaagtgtgaggagagcaattctataagggaatgatgggtcgtgagtaacgtctttccacatgcacctataagaaccactctcagtcactaagagatgcagataaatttcaatcatctcaacacttttgacttatcattcactctttcatcctctctaaaactacatacttatttccgcaattaagatatatgataacttagttcaattatttattctcctttttttttaattaacaatttattctataggttgtcggtgcctacatacgatcatctttgattgattattgattttagcatctacaaatatatatagcattaagagtacttaagtatcttcaaattttgaatgagaggtgggatgcgtaaattagttctggtttttgacagaatttttagaatcttaaaaattcattaaatgtccatcatgtattatggagatcttgctcaggtaattttccccacatctatgcatctttggaaaaaatgtgtggatgttttgttgatttgtcaaatgtgccgtggatgagctgaatctattattcatatcatgattgaatgtctgtttgtttcactttgctggcagcagtttgatgcttcgattctagggacactgtatcttgattttttagctaattttctaatgttatgattgttttctcgaaggccaaagcaagacaggtgccaatgatttattgggctttgtggcgtgctcgtaatgtgttaattttgtacggtaacaattctgttactaatgtagttgttttattttctattacatatcttaattaatggaaagatgctagaaaagatgacactaatgtaagagagtacttcttcctctactgttagtagtgagcattagattttacctgttgagaacatgattaagatcaatgtagatgcttctattgttagtgggaatgataattttgggattagttaggtagcacgtgaccatagagaaaatgtcattgaagttgattcaaagttgttgcttctatggcataagctgtggaaatcatagaggttcttagctaaatcagatatcatatttttttctcaaattgttattgaaattgattgtcaagtagttgttcatgcaatcaatcatactctccaaatattttctccatttggactgattatttctcattctaaatgtctattttcttctttaaataatgtctccattatctttgctaaacaacatgtaaacaaggcgactaattattttactaataagaagtttgctcccactaatcttgatggtattttgttagcagaattacactttaaaagttaatggaaatcatattctgggaataaatattaggaaattgcttcatatattattttttttaacttttttttttcttttcaaatttatggtttgagtttttagtttctccggtggtttttatgtgggtttctatacgattttttgttgcgacttagattgcagcactagttacagtagaagtttctatgtagaattccgtaaaaatatataaaaaaaactattttaaagtgtaaaaataaataaactccttattataaatattaataattatgtggat

SEQ ID NO: 35123 - DNA, 2080 bp, Cannabis sativa
tcatcatccattttttcatttcttgtatattgtttactttagaaacttaatctgttgtaaatcaggtaagaatcgaaaaccatacaaaaattatgggaaacaatgataaatgtaagaaaagtgccagtaaatcttcctcgaaacaaaacaaccatacccgaataaacaatagaaacgacaataaatgatagaaacgacgatataatattcatatatatttagaaaatgacaatgtatcacataatggattacatatacttgtaagctattttcgggggagagggttgtctatcgttggcctctgtagtagaatcagttgtcgtgatcatgattttccttttgggaggatccttctctttttggctagttgtgggcaaggaatgattcaaaccccgacaccgtagttcgtaacaacattctctaaataatgttttttgactatgaataatagactataataatgtttttttaagatttttgaaatgtgttgtttggttagaaggagtgaaaatatgattagaaatggaatagaatcaaatttaaaatgcttacaaaaattgataattttttgattaattttttatcctgcattagaatggtcattaaatctatttaaaaataaaatagtcattccaccaaaatgatgaaaaagtcatttcattagaataacattccaatactttaaaatacaactaaagaaatgaatgaaataaacattgtttcttttctattccattgcattttattacctccaactaaacgctacctaagaatacgcttaattaagagaaataaaaacatgaatgaaaatgagtatgtgaatacaaatagaatagtctaccaaaataggaaaaaaatcattctaatactttaaaatgcaaccaaacaaaacagcggaatgaaaattgattcaaatccccattccatttcattaccttcaatcataagcaaaatcacttgtagaaattaatgaatctcaacttgatgaacatataaatttcatgcacccaactttaacaacaatctacaaagtacctatggacattggttgttcatgtcattaccaatccaataaagagttttacattagttttattgaatttgaatcctaaattcagttaagaaaggagaaagctattaagacaaaacaaacaaaaacaagaatttaactatacctgtttggatcaacaaaagttcatacaatgttggaacttaaaaatgatccaacttccccctatcacttaaaaatggtaagatattgcacaataactgttaacacacaatcattgagaacaacagaatcaagtgtttatagctagtaatatcagaagtcaatttatcaattgtgaacaaagtaataaacaacattgaagaaattaagatatgatccagagcttgtacttatataacaaagcctaaaatccattagggtgtcatgttctttctacctagttctttggcagttccatttctatttctaaattctctaaccgttcgatgtaaagtaatgaaaaaactcatctttgacatctttacttcccttgtttcgcttcgggggagatacaacaagaactgcttattaagaatctaacttatgtataagaatggatcccctaaggtatcaaaagggtagtttagcatcagattctaaagatagttcctcctaataattttaagaattataaaggaaaagtcataaaactctactgatcacatttgatatgagtaaacaaacctttgtatatcaatgaacagaaaaggttaaggttaaggtatcatccttaaaagaagcaaaaaaatacaaatcaaacactacttaacaaagtgtttctcaagcttaagattaattaaacaaagcaaaaattcttacaattcattcattatttccacaaaagattacaccttcagctcttttcatatcacaatccacaaaatcctcaaaaccattactaatctgtgaaaccccttttctgtatttgtaataataatgtcataatatataaaattaattacattacaaaggtctaaacatttcaaattgtctttattgataaaaaaaaaagtatctttaatttaaata

SEQ ID NO: 35124 - DNA, 1794 bp, Cannabis sativa
cttctaactttcgtagccgattttaatgttggccaatcccgaatagctccaattttggtcagatcaaccatgatcccatctttatccactatgtgccctaagaaagagacacgtgacaaccagaacccacacttcttgaacttagcataaagcttgtgatcatgtaatcattgcaatactgatctaagatgtagatgcagttcatgttcttctttcaattcagaataaaccagaatatcatcaacacacttgtccaggtaatccttgaatacccagttaattagatccataaatgcagctagggcattggtgagtccaaaagacatcaccaaaaactcataatgtccataccgagtatagaatgcagtctttaggatatccttttcccaaattctcagttgatggtaacctgagtgaagatcggtctttgaaaagactgtcttacccttcaattgatcaaataggtcgtcaatttggggtagaggatatttattcttgatagtgagtttattcagatcccgatagtcgatacacatttgaagcgacccgtctttcttttttcacaaataacactggagcaccccagggagaataactcggtcttataaatcctaacttaagtaactcctggaggttgattttcagctcttttaattctgttgaagccattcgataaggtgcctttgatactggtttcgctcctagaactaactctattacaaacttaatttctcgggaaggtggtaatctaggtaaatcctctggaaatacctctagaaattcgcacaccaatctcgtattctcatgcccatatgacataggttggctagtatccactataattactatgaatcctagacaacctttgtgcatcaaatctttagcttttcggagtgttattctaggtacgcgcgatccttgtactttacccacaaacactgctggactggcactgtcaatctcaaacaccaccatctttcgcttacattcaattgttgccccatatttagacaagaattccattccaaggattatataaaaatcagacaattatagctcaattaggttggcggttaactcataaccgtcaatctaaaaagataaagacctaatccaccgggtagatacgattaggtctagggtaacagagtaccaaaacccaaagcatacacatcacacgatttatgaaaacttccaattactctactcgatacataagaatgagtagctcctaaatcaaataatacagaataagaacaactgtttatggacaactgacctatcaccattgacagactagcatcagcgtcagcctgagtcatagtgaacagatgccccagattttggttgttgttcttctttggttcatccctcttagcctgcggataatctcagataaaatggcccaccataccacactcgaaacatgacttatcccagcactcaccttgatggtgctttttgcatttgagacactttagatacgatctgaatgtagacccgtgatcttgatggccacctctgtttccacaaaactttttgttatttcttagtgttccagaagcttcagccttccatttgtgatctgggttgccactgtcagtccccttattgatactaccacccacactaggattcgatgctatgacgacatcctttgtagcttactctttaattacatgttgttcttgttgaccaaaagtcaatcactcacttattttgatgataaaaaaatatttgattattatttgttactaatcttttcttgaccattttgtaagcaaattcacaaag

SEQ ID NO: 35125 - DNA, 2679 bp, Cannabis sativa
actttataatagcatatacattatacatatgtgcccacataagatttttaatccaacagatagagcattgaaatatctttgaaacacaaattgaatcgtgtcaatcaaatcaatattatgaccattttactaaaggctattttgggcccattgcccaagttgacattccaacacccaagtcgacatgtgacatcaacctagatgctgggtgagtaggaaaataggccagagatgtattttttttttatgcctgagtgatatttggacatcacttagcctgtttctgtgttcttgtgaagctggtcaccagttctcggagatgttgctgtttagcagaaataggagagacttgaaactacccaattttcaagtaagtcactttgtcggaaatgtaaagaaaaatttgtgaatttaactcttttgactttataagctactatgaaaaactagacgctcgagacaaaatcagaattggataaacagaacctagcgctctaggccatttgtcaacctacgttggatgctctctttggagcttccaagatgtcttattgacacttctaaggttcttaaaattagggacgaggtctcctaccccgttttgaccatatttggggagaattcttagagaaaaatttgcattgagtgattgaaactagtacaccaggttaacctgggcggtgggctcaattttaaagcccttgtaatttttattttctccccgagtttactcgtatcttcgttatttttaatggtcgaaaagatgcccagatcaattttttagaaaagtgatcggaaacagcctaggttgaatatatgtcaacctgggcgccgagcccaatgtcatgtgtcaacctaggcgctaagtccagttttaggcctcttaaaagttccgtttgctccccagaaatggttgaatcttaatatttgatgaaaatggagaatatgcctagaagattttttggataaactcctcaaaattggcccaggttgacaaaatgtcaatgatatgattattactaacgatgatctacaaggaattgaagtgttaaagtcagaattagcttctcaatttgagatgaaagatttaggttctctaggctattttctgggtattgaagttactttttctccaaaagtttatctcctttctcagtcaaagtaaattactgacattattgagcatgctcgccttattgataccaaagtttttgactctctttctgaactgaatgtttaatattctcattttgatgtatctcctttagaagatccccctttttatcgcaccattattggcagtttaatttatctcactattactcgtctaaatgttgtatatgttgttcatattgttaatcagtttatttcttctcgtaatactgttcactggactgatgttctttacattctacggtatcttcagagtaccatcaccttgagcctactactaccttctacttcttctctggacttgcgagcttactgtgatgcaaatcatggtcgtgatcccacagactgaaaatatgtcactggtttctgtatctttttgggagattcccttatttcttggaagagcaagaaacagtctgttgtttctcaatcttctacgaaagctgggtatcgtgccatatgtgtggatcatcataacaaccttcgccatcacaacaggcttagtcagcctaccatatcaatggatgatgggggcaccgacatcatagccgttacaaccaccacatacatctcagtcgctacaaccaccacatacatcttagccgctacaaccacctcagacatcacagtcgctacaaccaccttagacatcacagcgccatccatctagtcatttagagttcgatgagaacgagagatcaaatgactttttatctcagttgtagaaccaaaggactactattatattttttttttggaagaactattatgatgttttttttaagttgttttagttactaatatttgtataaactatttaattttattatgttattttgctcttatattaatgaagaaatttatatattaattattgttttttattatttgttattataattatttttaataaattaaaaatcaatatttcaaataatataaattatatatttttttaatataaaaacattatcgcctctaacagtcaaatacaacaattctgacaacacatttagggccgacattatgggtattagaggtgacattgtcacctccaaaagtgaaaaatagaaatttgtattttatcttttaggaatgacattgtcgcccctattgtcaggcaacttttttgtcgaccctaatagtactttttggcatgaattattagaggcgaccttttaggggcgacatgtcatctctaaaagttattaggggcgatttattgttgttttaggtgtatttgttgtacacgtctactactaaagagattgtatggttaagatgattacttgtagatatggatgtcattcactcttgtcttactcctatgtattgtgataatcaaagtgtcattccgattgctcacaactcgatttttcatgaatgcacaagaaaaatgagcattactaaggacaaatttcgttggtaaaaacccctgttttcgtcagtattgcgcatcaatgaggacatttcgttggtaaaaagtcgttgagaatacttcgttgg

SEQ ID NO: 35126 - DNA, 1210 bp, Cannabis sativa
  modified_base (492)..(492): a, c, t, g, unknown or other
  modified_base (586)..(588): a, c, t, g, unknown or other
acaagagatgacatttttttgccatagattgctattagagcattgttattgggtactagtgtgcccagcacctttcataggtgttaccttatgattggttaacgatatttcctaaaacttattttcttaagttatatgggacttgctatttaattacactaatagcgatatgacactaaggaaggtgctagacaccaatggtaccctttaacaattttcattgttattattatgaaatatttaactttcttacatcactctcttttcttttctctgtaatttccaaatttatttcttattttgttgaaaattaggagtattcattcaatttaattaatattatttttgctcatagtacatccaatccatactaaagtgtgaatttcatgtttgagatccaacttaattcgtttaaaacttaaatccaattcgtaaaaatacaaaagtgtagattgaatcgattatgaggattgattactttttaatattaanttatttaatatttattaaaaaattaattttttaacataactaacaatataataaaataaattattatcctatgtctctaacaacaaattaaaannnataaaataataaataataaatttataaaacaacaactcatttctattatagttataatagcatatatttacttttgaaaatttttatataatttattttgtcgaaaataaaatttaaacagtgagtcatgtttaaaaataaaaaataaaaaacatgtaagatgtatattgtaactatatcatacattaaaatacaaattacaaattatccactaccatgattccatgaacaataaaaaaaatcttaacttttacgtggacgaatcatgtctatattattttttctttgcttgccataattaaatgtctatatttggttgcagtttggtgtgcccatttttgttagattagtagattataatttattttgctagcactattattttagagatatatggcattttatagaccttttgagaagggatgcacacggggcgaagaattagcggggagtgcttttctcgttcctatctctgttaaggattttaatcctcattcctgtttattcccctatcgggaacatagcagggaatccactaatggggcggagacggggtgggaaatcccctattataaaaataaaatttattttaaaaatttaaatgtataaaatcattaaatta

SEQ ID NO: 35127 - DNA, 2008 bp, Cannabis sativa
cgagcatccttgctcgaaaagactccaaactacgccgaatacacgtcaaaagcctttagcaaagacgtggtacaaggacacctaaaagagatcgagatcgtgaacttggcccattactacttccagattttcaaaggtctaattgtagattccatcttaagcattgaagagcgcgacgagagccgtaagttcttcatgagtaggacggcaacagacgcttacagagtcatgggggttgagctcaacttcatttatgaagtgctctacacaaaagtccaagtggttcataacactgtcggctatgtattccgcttcttggctttcgcttctatctttgccactcttgtactcttttactttgtggacaaagacgatttcaaggcttttgatgttagaactacatacactttgcttcttggggcaatttttttggacgctatagctctttttaatctcatcttttcggattggagtgtggttggaatgtacaagtactcaaaaataagaaagtcatgtgtgtcgagaatgttagagtggttactcaaattgcaagaaccaaatttgcgtaattcgggtagtaatttgtttaacaggagaataagagcaacactatttgggcggtggtcagaggtgatatccgggtacaacttcatcacatatagtctaagagaacgttttgatgatatagaaattgatcaagatcacgtggaatgttgttggaatggggtacttattaacaagataaaatatgcctatggtaaagttgccaagtgttttacaaaaatatctaacataatgattgatattttgggtttgacaggtattgtgaacgaattaaagtacaccattggatacagaatgaacgagcacctatggaatttcatctttaaggagttacaagacaaagcaaaggacgcggaagatgtgaaaatggccaaaagaatttgcgaagcaaaaggctcttatgttcttctgaaaggtatgaaagacaacgaagaggaaataaaggagttactgccttacatcgacgaggtcagttatgataaaagccttgtgttatggcacattgctacggaactatgttaccagaatgattttataagcaatgaacttgatcctatgaaagatgataagtataataatcaactatatcattttagtaaactactttcagattacatgctttatctattggtgctgcaaccaacaatgatgtcggcggtagtcgccggagtagggcaaattaggttctgggacatgaaagaggagataaaggagtcctttgtacacacgagtgaggaggcaaagaggttcttttctcggagagggaatgggaaagggaaagagaaagaggcgtgcatggacattctagcggttaacactacaattaaacctgcgacggtaaagggggacaggagtaaatctgtgttgtttgatgcttgtgtccttgccaaaaaacttgatcagtttggggataaaaagtgggagatattgagtagtttttgggtggagatgttgtcgtatgcggcttctcattgtcgtccggatagtcatgcccagctagtgagtaaaggtggggagcttattactttcgtttggttgctcatggctcatcttggcttgggagatcagtatcagaaggagggtcttgtcagagcagaccttgtcgttcgaaaggagggtcattgttcttgctttttttaatttaatttcaccatttagttgctagctagctctgtaacatttctatagttctacttatatgagtttgcattgcatgcatgtgaatattattcaagatgaaaacttttatcgatattatttttttagttaattgaaacacaaacgagaaatcttaaaaaggcaccacaaataaatcattataattagtaccgtacaatttaattttatgtctcacatatattctttatatacatatgttatggtatagtttttcaaaatgaaaacatctccatataatgttcgttttatagaaagttagatgtca

SEQ ID NO: 35128 - DNA, 5800 bp, Cannabis sativa
ttttcacatttctaattttaaaaacagaaaattgattaaaaaagtattaccaaatgccaccaaaattaacagaagtattttaccaaccgtcaaccttttttataataattattaaattaaatgtgtgaaaatttgatgcaattcttactgcaattagtcttgtttctgtgacggagttttgagtgctttagtcttgtttgtctgacatattttcttttgttgttggttcttctttatttttcgatagtttatcatcaaatcgttgttagtgataaataataatatgttctctgggactgaaagggttattagtagtgcagttacataccttacacaatagttgaatgcttaagttacgaggatgaatgaacctactacaatagtttctattgctgtgtcttttaagtggtggatgaaacagacataagtgatcttaaagttaattgtgatgctgcaattttttttatttgattttattttaatttttttgtcaaacgatataagaattaagtggctgattatttaattcgttttcctaattttaatcttagttgtgcctttaatggaaaaatattctaattcgattacaaactattattattttagctaattgttattaataaaattatattatttattaaaaaaagcaaaagaaatgtgagcaagaacttaaaaaatgtgagattttcatattttattaaaatgtgcacaatatatgtttgcaattgaattcaactccaatagcatctaccatcctccatgcatacacatcaattaagatatagtacatataaatatataaataattgccatacaatgcaaacgaatccttcattagactttgctaaaacaaacattttccaatcatttttttccctttgtaatacaaattaaaaataataagtatataaccaaaaaataaataaatatatattataagagagattataattttcaactttattatttttgagatttaaccggtgactctagcacaatgagtaatggcactgcaaccacgcctatatggattagcccttttcctcttttggcaatcgtagtaggattgaccgcgacgcccacacggaacagaattggccttcaatgcttggtaactaatgtgagacctaccttgtgctagcgtgcggcgactcgcttctgaatccatcaacatttcattattaacgccaatatagtcaccaattgcaccaccaccacccaacaccgagcgttggaagtgatttaggccatggcttttttccaccatgttgaacgaatatgccctatcggttgcgatggctaaggccaccataagaaaaaccaagcttagcttccctaccacttccattattgtgttttgttacaccaaaaagaaaacaacatttgggattcttctcttctctttttcttggtgtaaaagatgttaattaatggttggaaagagttgggataaaaatagaggggaagtttttagaatttggagatttttgtggctctttttttgggtaagagtttttatgctatttattcatggtgttgtgttgtaaaactaaaaagttccatttttaacggtatgttttggtatttgagagcacatattgaattaactttctaatattaacatatgttagggtaggaattcaacacatgtgttgacctcttttacaatctctttctcattctatagatataggtaataaaatgttcaattaattattattatttttttttttgtaaattatcaatacaattaataatttttttatataaagtacacatgttatcttatattttataagctttctttttatttatttttttgtaaaaataaataacaattatcaataaattaattaattgtgtattaaatataaacgagtcactatgtgttaattttgtatcatcaagttaatcataattatctaacctaaatgtttttttaagcgatccaacttaaatattgatcatgatccaacctaaataattatcatgtcattagagtttgacctaattttattatgtgtttattttttacgaatctaaacgattataattcgtgtcaatattttctttaactaatattttggaccccgaccccaacccttgaccttgggatccgaaccccaaaccttgacttggactcggactccgacctagacccaagacctgaattaggatttagacttcgacctcaaacccataactacctagacccagacgtagaccaaaacccacatcttgaccccgaaccttgaccctagactgtggaccctagacccagaccccaaaccttggacttagatcccgaatccaaactcgaccgccaatcttggtcctaaacctcagtgctagaccccgacctattttctctcacctcgatttcttattcctcacttaaataaaaccaaacaaataaaaataaaaataaaatttatagaatcatcaattaatttttttagggataatttaaaaaaaacacaaaaataataaaaaaaaaattacaaaaatacagtctgtacgaagtgttcaatatttttacagttttttagattttacttacataaaatatttttatatatgttgtactcttgttaatttattgttgatttttttattatttgtatattattttttatgttgttttgttattatttttatgtgattttttttgttattttttatgtttttgtagaataccgtaaaaatatatatataaaaaactttaaatgtaagttttttacaaaaattattattgcatgtaattatctttttgttttattatttttttaactaaaaaaacaataaataatttgtgaacttattattatgccccgcaaatatgtagaaaagtaatttagactaaccaaacgcaccgcaatcatttcccgccaaatacacacatttctgagccctctctctccttttcccgccatttccttcgttcttcgctctacactctctcactctcagacctctctctctccaaaattatcgatctcgcagcggccgccataacagtaagtatcttctcaaagttttgaattcatcgattccaattaatgttctccttaattttatttttggtgcttttctatgagcaatttggattagggtttctgcattttcataaattgaatcactcttttactgttcgttgctgtagattatcattgtctctattggaatttgaatcactctttataggtttagagtcactgatctgaaacaatgacgagggaagaagttgaagctgtagtggacgaaatggagattgatggagttgaacaaagggaagggaatgcggttcctgagggattcaatgctaattatctccaagtttattacggtaatcaattgtaaagcaatattttagcaaattttagtcgaggtcgaaattatgcttgttttttttgctgaaaaggggagtttatttgatttagggaagctatttcctcatgctgatatgttcaaatggatgtcatacggaaatggtgagtgttcttatttcaatccaagagaaaatttgctagtttgaatttgatttttgtaagaatcctcttaattctttgcgtttctgtgcctgatatgtagatgggaaacatcttgggtgtgaccactcctattttggtcgaagggaattttccttcactctggataatgatatttatttgcggttccagtcatttaacagtgtgtcagaactcgaaaactctatcagagaaaaatgtccagttaaaatagacattggacctgtttacagcgtagatgtaagactttactttctcttagttgctaaaagaacaagatttcattttctcagtgaactatttgttttattattgcagtgtaacaaatttcaatccaaacagcaaactatttgttttatagcagtgtatgagttatcaatttaaggagtgataatgtgctttttatcattttttattgtagctttccttttatacttgcatttgaatgtttgatttttgtacatatcatcctattatttagcttctaatacttatgatttagaatttaagttaatttttggctcatgaataatttatcaattgatttgcttttgcaagcatagtgcttggtatggattttagccagatttcctatccatgttttgttgtaggttttaaatgcttacatctttgtttctgaatgtattatcatgtttttcctatcattgttattaattctctgatatgtctgatgttgcagcctgcaaagagacgtgcatatgcacaaactggtgataatgttttcactcctgtggaaagggagcttatatttgatatagtgagttcataaatgcttgaattcggttaatattcagttcctaattcttttttttttttttttaactttttaagttccgactcccctgtaggatattacagattatgatgatgttagatactgctgctcaggggctgatgtttgcttggactgctggccactgatgacagttgctatcaaagttattgatactgctctcagaggttggggtttaaattttttaatatatatactgctctcagaggttgagctaaagaatacatgtcttacacaccgttttaattctgctgcagatgactttggtttcaatcacattctttgggtatttagtggacgacgtggtgttcattgctgggtttgtgatgagaaggcaagaaggtgggatattttattgtatatagctgtattttgttatgttatgataagaaaggacacacaatttatttgctgttttttttttttttttttcaggttgaccaatgaacagagagcagctattgccgactattttcgtgtctacaaggtgctttgtttaagctacatatgaattttgatcaccaatcttttataattaagaattagattggaacttgtttacctttgagttaatttttcagggaaatgagaatagtcaaaaaaaggtatctttaattggtccagctcttcatccattccttgcgtaagtataagcatatgccattaattttttgacactagatttttttgtttcctcatctaatactttttctctccccaggaggtcatatactgaggttcttagaaacttttttgagacaaaacttctctcaagtcaaaatttattttcgtctgaggagagatatgaaaagattttggatttgattccagatgaatgtatgtttgttctttcatggtttacgatatataattctattatttttcacctggttactttgtaagtgtgatctatgagtcatctttgcagctgttgcttctgagcttcgtgggaagtggcaagataataggcgctcttctaattcaaaagatgacattagtgttactagatgggaacagctaaaacatcttctgcaatcaggaaacaagaaggtaaaaacacatatttgttgaataaatatcaacattagaaaatgcataaaatatggatttcaatactttctggaggcacatctctcgtgatagtgggagcattaataaaggaagtgacatttgctctccataagtattaatctacataatataatgtgagatatggtgcttcaaaagattttctgggtactgaggtattttgtcttggtagtattaagaataagcctcaacttatccactataaattttttaaagtagcattgctagccaaaaccaacaatatcatataattaaagggttttttttttaatattatacataaaattgattttatttataaaaatacctttaagaaaattatttgcacaaataccgttgtgccacgtcagtatacataccgaaattcaaa

SEQ ID NO: 35129 - DNA, 1849 bp, Cannabis sativa
gagagagagagagagagaacatggagtcttctagctatttttgtatttttgcttaatggattaaatctaataatccattacaacataagttgaaaatgaagtttaattgccaactgtcaacttgacaaccagccacttaaaccataaaataaaatttccaaaatgcccctttcttccaatctaagtaatcaatatgcctaggagtaaaatagtccaaaactaaaaccccgcttaaccccgacattcaaaatatctattatattaattgtcccgctaagaaatatgttctaaacttactcatgtgactctaacggccatccatcgtattttttcatcatcgccgatcaaaaaatcataaaaattacatatttcatatttaggataaataatacccttcgagtttaataaaatctctggaattgtcaaattataactctaatgctcatttctaaaaataggacccacaacaaatataaaatcatacataattataaaataataataattaatgttaattatctttactaattgattcataatctaacacgcagtcattaaaattaacaatttgaaaaagttaataatgagttacatattaataattaataattcaaaatttagaatccaattcggctgcatacttccacttggcattaattgcctcttccaagcactccttcaaggattcctcctttgaagaagactccaaaaatcttttgaactcagctttcttcctctgtagctcacctatcttcttgtccagaattgttgggataatgtttgaatcatcaactagctttcttagctgttgatagtaaaattctcctgtgatcttctttagacattcccacacaaaacccacctcaaagttaatgaagttctttaaaaagtatatgtagcgataccattgttgaagaagatgtttagtgatgtcagtgaccaaagtagtatgcatctctttcatcactttacatatcaagtaaaagcaaatgctggtaaactcttgggaatatcatgagttggtactaatgtctccatgtttgtgaagcaagtctttcatggcagagaccaaatttaaaggtatggaataaccttcaacatctgccattttcaatgctagatcactcccttttagtttcaacttcttactactccaaaagctagattcaaactcttcaaagataaaatccacaaagtcatcgtgagcatcttcattatcatcatcatcccaataaaaataatttttaagccttatttggtcgtctacatgtaatttattgagtatgaaatctctgaatgtgaaaagagataatgtgggttgaattgtgtgttgatcattagcacaattatggaaaaaatctgatcctaaagttttcagcttcacatctctaaggtctccttttaatacttttataatctatatatacatgacacaccaaataaaaataccattagtatataagaattacacctaaaaataaataatattgtagacaattaatgtcctacatgaaataaacagtaaagtattgagccatatataaaaaaaatgaactactccacctattaccaatcaattttaataagatggaagctcataatataaatacattatttaacaaaatatataggtgcacttaaattcgaacatatttattgggtgaacatttatacctggtatatcaatatgtgttaaatatttttacataatcaattttatatttttttgtgtaaaaataactgcacatgagtttgagttgctccattttattttctaaaattgtatttctcttgctattttaattgattgactagtacatgtttatacaaatatttccaaaaattaata

SEQ ID NO: 35130 - DNA, 3870 bp, Cannabis sativa
agacagggtatgggctgtgttcttttgcaaactggaaaggtaatagcttatgcttctcggcagttaaaggagtacgagcagaggtaccctactcacgatctagaactcacatcactagtatttatgctgaagatttggcggcattacttatatggcgagaaatgtgagatatacactgatcataaaagtctgaaatacttctttacccagaaacacctaaacatgagacaaagatgttggttagagttggtaagggattatgattgtgaaattctttatcatcacgggaaggccaatgttgtagctgatgccctgagtaggaaaggacagagccagatgaatacaatgaagcagatctctagacaattagcaaataagatgactcgagctaagattgagtttgttgtggggcagttggctaacattaccctacaatctactcttctagaatgaatcaaagaagcacaattgtaagatccaaatttagtgaaatccttagatagggtttcagctaggaagattagggactttacagtggatgatacagggatgctacggtttatgaaccgtatttgtgtacatatggatgacgacattaaaagagaaattttgaatgagtctcatacgactccttactcagttcatccgggaacaacgaagatgtataatgatcttaaggccatgttttggtggcctagaatgaaaaatgatatagctgaatatgtcgcgaagtgtttaacttgtcagcaagtgaaggctgaacaccaaaggcctgcatgtttggtgcagccactgaatcttccagatggaaatgaaaagacattgccatggacttcgtggttggattatctaggactacaggatagtacaactctgtatgggtcatagttgacaggtttacaaagtctgtgtagtttttacctgttcggatgaatttgtccattgatcagtatgtaaaactatatgttagagaaatagttcgtcttcacggtgtcccaaagtccattatttctgatagggatccgaagttcacatcaagattttgggagagcctacatcgagctatgggtactcagttgaagttcagcacagtgttccatcctcaaacagatggacagtttgaaaggaccattcagatcttaaatgacatgctacaggcatgtgtactagactatgaaggatcatgggtaaagtacctttccctgatcaagttctcgtacaacaacaactatcaggcaatcaggatggctcctatgaactatcatttggaagaaaatgcagatcacctattcattaggatgaagtaggtgagagaaagttcttaggtctcgaagttgttcagagaacaagtgagacagttgataaaatcagagtgcgaatgctcgcggctcaaagcagacacaagagtatgtagatccaaagcatcaggatattgatttttaggtcggagatatggtatttctttgaatttcgcctatgaaaggcattgaattctttggtaagaaaggaaaacttagcttgaggttcatcggatcttttgagatccttgagaggatagggcaagtagtgtacaggttggctatgcccccagcgctggcagttgtacatgatgtgttccgtgttttgatgcttcggaagtatgtctcagacccgtcccatattctgagttatgaagcattggaacttcagccagatctttcatatgaggaacaaccagcgcaagtgctagatagaagagaaaaagtcttgagaaacaagacaattgcattgatcaaagtattatggaggaacagtaaagtagaaaaggcaacttgggaactcgacacagatatgcagcagaaatatctggagttattcaggtaaattttgggacgaaatttctataaggaggggataattgtaataccctaagattaaggaatcggattagcaaaccctaactagttaaatgtgtattaataaggaattatattattatataatttaatatatatgaattatactaataaatgacctttccactcctgacatccgctttgaaacaagcttggtgtatggcgcaccgcaattaacggttaagaccccgttagtgaaccatgggcatttttataattttgacccgagaagggtaaaaccgtaattttaatgatatatcgtgcttatggactatattattatatagtatatgtatctgtttttctgcaggtattttctgacaagttggcacggtatagtcacaattgggtattttgggctgcaccgagttcggcgcccaaaatatatttttgggactttattttggcattttatgactaattaaaaaatttgaaatttgtatgttatttgtgtgtgtggtgaaatggaaattttacccttgatgagcgtgtatgcttattttggccttggagggcattttggttatttaaccaactaattatactttcaataaaatacaattttgagagaagtggaatcaattttctagatttattcagccccttaaccgacctcttcctctctcctttcttatcttcttcaagttgataattttttacaatctaaggcttgattggaagtgaattttgtgtagttcttggagttagaagcttggaattggtggtaagcttctaagatctctttttgctgagttttattctgacaattaaagtttgaaaatcaagttttgttgttgtttaagttgttgaatgcatgtgcttgaaaataggatgatttgtgttgttttatgcaaaattttgtgagttatgcttctagatcattttgtttgtttttaagattagagttgtagtttgaaattctggtattgaagcttaatttgtgtgattttttattctgaaatattgggttcacaattgggttttgatgattgagttttcaagctttggattagtgtaaagattgtaaatttgtattgattcttgaggagcttggttcaaatgcatgaattgatgttgatagagcttgttttaatgtttttagctctctgttatgctggtttaaaattattgagatgtttgtttttagttgagcatgctttaggttaaattttgggatgttttggtgcatttttgagttgctgaatttgcatttccgagttttcaacctaggcaccgcggcgcgctcaagaggcgctacggcccgctcgtgtgggtagatagcatgttgaacttgtattgttcataacattttgatccggattctgtttggggtgttccacatatcgttggaaagctcgttctgagctctatatatttatttgtatttggatgccaattatatgattataggaaagtagatttagggattaaccctatttgtgaatcctaggaattgtgactagaattatcggcacttgttcaggagcacttgggatttggaatctccatatacttgggacattgggtaagacaatagttagcacgtagagttaaacgcggtggcactcatgtttgatattataattaggattaaatgagaaccgagattagggttattaccctaaaatgggcggttatatggcctagggttattaccctagtgattaaataattttaaatactatgccatgctatatatgttgaagtaaagaattatgcgttaaaggaataatttgattagactcgaaaattagaaccgagataaaccgttctaaggccttattgtaaatagatgtgtgagcgtaacacgtgggtctatgtcatatagacataaataggcgtgtgagcgtaacgcacatgtctatgtcaaatagacaataagtgaaatggcatcattaattatgtgatatatatttgttttgtatattgatatttatattgtcttgttaggcttggctcacgggtgctctactgt

SEQ ID NO: 35131 - DNA, 2399 bp, Cannabis sativa
tattgttttttttttcaataaaaaaacctaaattagggcgcatgagaaaaaagatgaaagaaaaagcaaaatacctgaaaaatgttagggcgattttgaggagcaatggagaaaagtcgagtctcgtggggaaggaggtcaaagcgccattccgatcgtgctttttcttttaaaaaatgggggatagatctgagagaagttgagaacacttctcaacacttctcacgtgtaattttttattttttggttttttcattgttaccgttaaaaataattttttttaaactaaccaagcaactcaaattgcaataaaaatccgtaaagcaattcatataaaaactactatagaaatcactagaaaagttcaaactgtaaatttgaaaaaaataaacaataattagcaattttacccctgtaattttgacaatattaattttagcccctaaaatatacggtttgttaagaattctctgaactattacatttacagaatttagtccttgtatgaggttctgtccaattattccgtttaaatgatgacatgtctttatcaattagcaactttaccccccaaattttgacaattatcaatcgtaccccttaaaataaaaatgggaaagatttaacattttttattaaatcttagaaatttaatttagatcctaaaaaaattattttgaatgattaaaaagattaaaaaatgaattaaaattttaaaactaattacgcagtatataaaattatttattttttattagaaaattcatttagatattaaaaaaatatattaaaatttaatttgtaaaaactaaattttaaaggaacaaacttgaatgtattttggttttatcaaaagatgtagatttgtttaagtaaacataatatttttttagtttaatttataatttttttagaaaaaaatttatatttttattgaatttttaattatttttttatttgttaagatgtgagtttataaatataaataaagtcggtttttcttgaaaaatctgacttcatttaaattatttattagattttcaataattttggtttgatttttaagatacgtgttgataaatataataaagtctgaagatatttttttaagtaaaatttatatttttttattaatctaatacttttatttaatttttttaatagtttttactattttttctaaattaatagaatattataattgcttaaaaatagaatattatagtttttaaaattaattttttttaataaaagggagaaattttttgtattggtcatagtttaaggagtaaaatgttaatttttaacggtaaaagaaacaaaacttaacgtaaaaggcataattatgtaactgttatattttagggataaatttgaacaagtcgtatattttagagggcaaaatcaaatagtgtcgaaaattcatagagtaaaaataataattattcaaaaaaaaaagattaaaaaataatatattatttatttattatcattattattatttgcagatcctacataaaacaaggctatataataacacaatgaatgattttatttgtagatcatttaacataagataataaaatgttattaaaagaagagagcaacaatcaacaatcaacaatcaacaatcttacacctgaattttgaattgagaaggtatctcaaacaaatttcgcttgaaccatgagtctttttcaatttattatttggtgcaaaaggctactaacggcaaaagagataatgagtgaattaaaataggaattttttcagtaatttattacataggaaactatttataaaaataactttagtaataaagaagcaataaattatcgtgacacatcatcttcttgacatgaaataatattagtatggacgactaggaatcacgtatgtgattcacaaactcaaaccaacctataaatttgtaaggcttcaatgaaattgatctaaagtttattgaaacaaaaaaaaaaaaaaaacctaaaaatcttcgacaatcgcaattctccatcgacaatcgcaaatactccattgttgaaaaacttcattacttgaacaaaatagtaaccattagtacattatctcataatcaaaaaatcaaaaatactttaagaatattcaaaaacacagactttcgactaatcgcatagaaactttttcgtgaaaaaaccttcattgatgataactttccagaccttaaaccttgcacgaaatagcaattgttagtccatcactgcaattacacacaaagaattatcaaaaaatctacaaaagaagatccagcagcaaagatagacgagaacaggggattagcaaaagttgtgaagaacaaaaatctagaaaaagtataaacaaatttcaacaaaaaggtatctaatctcaaacttttcatc

SEQ ID NO: 35132 - DNA, 1427 bp, Cannabis sativa
  modified_base (133)..(133): a, c, t, g, unknown or other
aacaagacaataaagaaatataaaacatatttatctttttaaaaagtgtaatcaatcataagagataggacattcttaatttctctaagcatcacttcagatgaggctctaattctaggaaacatattttaanaaaaatctacgtatcacatataaaactattaatggaaatatcaagcatattaaaactaacacttacgttatagtgagagtgatctttttagtcttctgtatgtaaagagataagacccagaattatcctagttcgaatctcaatgtgagccctaatccagctctccctcaaggagtttctccactatgcaagtgtattacaatctgagaatcacacggagagaaaatgactccccaaccaccatgttacattcttctaaaaaaaataattgggcaagactaaattctttaattgctcataaaaaataataaaaataatgtaataatgtaatactaattttgagacaaactaaaaataaggaaataattatctatatatagcctataatacaacattcacaataatttttaaactatgtgaaatttttttcttaagaatttactaatgaataaaattaccaaaattttaaaaaataaataaaaaagataaaaaaaaaaaaagataaaatgtagtaaaactttcctaagacgtaatctcatttgttttatattatattaagatgtttttaaataaattcaaaatgattttttttttggaaaaaaaaaattaaagactatatgttaatatttatttatttattttaaataatgatgttactatttattgttattcttcataaagcacacaaatatcatgccccttcatcaagatgacaaaagttttgagacttatgtgtttcgtggatttcgtgtgactctcaactgtaaaatattaggaaacccactcaaatcaaatgcctataaaataagtacataaagtaaaaggttttccaaatcacaaacctagatatatatgagcaatgttagatttgagatagcatacacatttttttacacatagtgatacaataatgtatattaaatttttattatatattatatataacacattatatattattgttattattattatttgtaatttcagtttgttactattgttactcgaatatatacataaaaaactacttgtttaatattataatagttccttttttaaaataaaatattataatagttcgaaagtcatacaaatacaccctaatgagaagctgtttcactacttgacataatcaacaattaaaaatgctgactaaagtttaaaacaaaaaattaaagaatgagctttttatcttcctttagggtctatttggaaacaactgtataattattatgcggtagtaattacactgtatagtaattacattgtattttaaagggaaatttgcggcaaa

SEQ ID NO: 35133 - DNA, 5011 bp, Cannabis sativa
  modified_base (36)..(69): a, c, t, g, unknown or other
actttatatgtgcttatttcatcgttttagaaagtnnnnnnnnnnnnnnnnnnnnnnnnnnnnnnnnnntagatctaagatcctagtaaaaaactacatctatcagtcttcaactcatcatcctctggtgaaatatcttaactatgacaggctaagtgttgcctttagaatttccatatttcatgctcacacagaacttgagcctactacttttagacaagcatctaaattctcacaatggttgaaaaccatggataatgaatttttcgcactcaagaaaaacaacacctggtctgttgtctctttaccaccaggctgtcaacctattggaaacaaatgggtttataaaataaaatacaatgaacaaggtgaagttgatagatagaaggcacaccttgttgcaaaagggtattctcaactacatggcattgattacattgaaacttttttccctgttgtaaaattcaatacccttaaactgttcttagcattggctgccattaacaactagactcatcaccaaatggacatcgataatgcctttttacatggggatcttaatgaaaaagtttacatgacactccctaaaggatatgtccatgagggtgagctacctccaaatcctgtttgtctagtacataaaagcctttatggcctcaagcaagcttctcgacagtattttgcaaaattaagcaccacttttcttgggcatggatttcatcaatctgcctatgatcactccctattcatcaaaaaatctaccacaagtttccttgccttattagtctatgtagatgacatagtaattgcaagcaccaatgcttctgaggcaacatcttttaaagcatttctcaacttaaaattcaagctaatagaccttggaaacttgagattgcaagatccaaggcaagaatgtctgtttctcatagatattttacaatataacatctaaataaaactggtctccttggctcaaaggctgtttccactcctatggatgccaacctttctgtcagcaaagatgttggtcctcctgtcaatgatgccacctcttatcgcaacctcattggcaagctcttatccctcactgtcacacgacctgatattgcctatgtcgttaatagactcagccaatacaatagtgatacttgacaaccacatctcaaggctgcttatcgaattatctaatacctcaaaggcacccctggcaaaggactcatgtttcattcaaacaacatctcctagcttccgacagatagactttttcaactccaagctttctctgatacagattggggcacctacccggatacacgacgttccatcactggtttttgtatttttttcggacaatctctcatctcctggaaatcaaagaagcaatctattgtctccaagttgtctgccgaagctgtgtaccggtctcttgccaatacaacctgtgagatcatgtgggtacacaacatcttgactaatttcagcatctcctcatctcaaccaacaaccattcattatgacaatcaagctgccatccacatatctgacaatgcgatcttccacgagcgtactaagcatgttgatatcaacttccatatagttcgagaacaggtcaacaaaaattgcataaagctctcctatgtgccttcccggcacaatattgcatatatgatgactaaagctctcttccctacttaattcaaaaccttattgtccaagatgagtgtctctaatctctacactccatcttgaggggtagtcttagacacttttagtcatcatgatgtcatgttagttacagttagttatattcataaccaactctgtttgttagttggttgctgatgtcctcagctcactctgtataaataccctttgttcattaacaactcactctgatgcagattggggcacctacccagatacacgacgttccatcactagtttttgtattttttttttcagtcagtctctcatctccaaaaaatcaaagaagcaatctactatctccaagtcatctactgaagctcggtaccagtctcttgccaatacaacctgtgagatgatgtggctacacaacatcttgattgatttcaggatctcctcatcccaaccaacaaccattcattgtgacaatgaagctgccatctatatatatgagaatgcagtcttccatgagcgtactaagcatattgatattgactgccatattgttcgagaacaggtaaaaacaaatcgcatcaagctctcctatgtccgttctcggcacaatattgcagatatgatgaccaaagctctcttccctactcaattcaaaaccttattgtccaagatgagtgtctctaatctctacactccatctgtagggggagtcttagacactgttagtcatcatgatgtcatgttagttacagttagttatattcataaccaactctgtttgttagttggttgctgatgtcctcagctgactctgtatctataccctttgttcattaataaagacaattcagttttactttcactaatactttcctatctctttctttcctcagtttcttacatgataatgtaacttttatgcagacaacaaacaaaaataacacatgatagtttttttttatgattaagaacttaaaccttaagtttaatctaaacattttcaaactgatcatagcataatttttttattatttccgcaattgtttttaaggtctgaaactctaaaatttagtcaattttgctagatagttgttttgaccaaaaatgggaagcctctttgatcaaaatttcactcaaattcttttttgagtgggtgtctttcctcccaattcttaatacatgttccttctacgtgaggctttttctttttattgcatcacgttctttgtatgtatgactggatcgtccaattttaatgtgtgtgaatgatatgcatcttgtatttctttttgacgtctttgttcgacacgcatcattgctagatgtttttcattatttttaagattattgttttctttcctttaaatattgtttatttcttcttaagcctcgtttcttcttattcgaggttgtttcagtagtttattcccaatatacatggcaactgttgtgtgtgaaatgtggtcgaaataggcacgtcatccggagatgagttgggagttgaaataaagaagcaacaagtatggctcatgatgctagctctcgaacatgaacaaaagacctatcttctcctccgggagtcaagacacagatgggcatcttcgggctagaaaggcttgagttgaacagtcacttcgcttttagtgcagcatggagaaaacgtctgggaacgcccataagatgccatgtctgacatcataaaactgatttagggcgattacatgataatcgaaggagctagtgacggctccatcatgaagaatcacatcaatcaagaagggatgatggctaatctcacttaacacctatcctacctactacgtaggtagtgcatgccctattttgtaccttctaggaacttgtgcatgcccatagttgggtcttaaagacaagtttctccttttcttcttcccaccaatctctataaatatccctgataaaaattgagagggtgatcagaaaaaagaccaccaaaaaacattctctgtaaggaatactctcattaataacagagactcgtggactacgactcattaatgcccgaaccacgtcaaaatcatctgcattaattatccctaagctctcattattatcttatttaattagttgccaagaatctcggtcaatattttggtactttcattgagagatgtgggaagcatcattcgaaacacgacaacaaaagatctcagctactatggtgaaaactcgaaaccacacgagccaacctcatcccccccaaggatcatcggaacccagaggatgaagaagtggcctcacgggtaaatgtaggttctgacgaacgagactaatcaaacgacaaagaatacgaagaaataccataagggtatgatgtttatggcgatggtagctataccgagttactggccctaaggtagaaagtagctaatcatgaggccgaactggccgctcaaaaagagcaaaatagaagcatgcaagaaataatggttgccatgcagaaagccatggagacggttggaatccacgtgcatcccaaggctgtgcctcaaggactagaggaaacacaagaaaagtcctcactaagaacccaaaagcccaagactggggaggcaagacccatacggtatccttctgaggggaaccctaagaaaaaccctactttgttccctaaaaagaacaaaaaggcccaagatctgcgaaaggtttgctctgatttcccgaaagggaaatgtccggagaggggcaagctccctcgagagagcattggccctcaagactgagaggaccgaaagagcatatcagtgcatcaggaacccagggaaagagggaggaaaagttggaaacatcccctattgacttcaggcaaaaacttaatcataaacatggtgacttcagaaagcacttggaaaggaagaagcaggaaataccgatgttgggagatgccctgaatgagggaatcttggctgaggtggtaatcttctgcaaagacatcgctagagtctcgcagacataaaagggagatgactcagagtctgattgcgaggatcaaaaggcttgcgccaggaacatcctggaagcagaacttcctaaaaatttcaaaatgcccaaaatggcaatgtacacggggcactcagagcccagtgatcacctatctcgattcaacagagtaatgaccttcatgagagttagcaatgatgcgaagtgtctatgctttccactgacgctaagcgggtttgtcgaaaaatggttcatgaaattggagtcaggatcggtagactgttggaacgagttacaagttagtttttggcgatagtttgtggcagcatggaagattaaccttgaagtgagtgccttgaccaatataaaacaa

SEQ ID NO: 35134 - DNA, 1102 bp, Cannabis sativa
  modified_base (1009)..(1018): a, c, t, g, unknown or other
tattggtttttatgatttaattttggaagtcatttattaagagttcatatgtggcatgtcttatatgtaattctcatgtttttctattttattctttaaaatacttcaccaaaatattttttttttcctattttatcttaaatttttttattacatcatgtttcatcttttttatttttattttctatcatttaaatattattatttttaatatatatatatataaattaatggagaaaaatcaataaaaaaaagaaagtgatggaatgagaaaaaagtgaaagagtaaaaaaataatttaataaatatatagctcaataaatagttgtagctatatttagagaagctacaatatcattttttaaaatagctttagagtagctcatatgatagatgagctatttcaccatttatctctattttgaaagagcttatgtgagtattttatgtatttatttgagttttcatttggttgaatttagaaactgatttccctatttaattattgattttattgttttacgtaattaagtttttaattttgttttgaatttcaggtaactggtttttatgtgttagtttctaatttggtatttttacatagccagttattctgtgttagattctaacgtccaactctaatgaaaactaagacgtccatctctggtgatgacgacaactcgaatgattttttcggcgacttattctgatgatgataataactccagtgactttttttttcacttttagataatgatggaagatttggtgattttttctgcgacaatgctaactaggggcattcattcaattcaatccgcactattgtgctcttagtgcatctaatctgcactaaatgcagatttcatattttgaatccaatccaatctgcatattaactcaaatctaatccacaaaagtgcaaattggatgagatattttgaattggttactttttaatattgaattatttaatatttactaattttttttcacataactaacaacnnnnnnnnnnaaattattgttattttatgtctccaacaataaattaaacaaataaaacaaaaaaaaatagcaaatacaaaggaagaataaaaaa

SEQ ID NO: 35135 - DNA, 2922 bp, Cannabis sativa
taacttaagaaaataacttttaaagaatatcgctaaccaattgtaaggtgctacctatagaaagtgatgagtaccactgatgctaaataacaatgctcttaaaattaatattcacaaagaaagttatctttgtgttgttttataatatatcttcaggattattacattaatgaaggatgggcatctttcgagagattttagcaacttagtactcctcgcttagagtgctgttagttaaaatatttgtacttagtcagctcatgagtcagttatgttagtttacttgagtatcacacatattgagaagttgatataagactttatagttttaattctctaggtaacaatttagagagtgtattttaaatgaaaacaaatcgtaatgtgtaaggacggatgttaaagagacaatgtgtgtttgatcactatactctcaagtgagttcaattgtatggtgtaagacaccattattgacgagttaaactcttttattcacctctgtactctactattattgaagattgaataaaagctttgccaaagggcagttcttccaaggattagtcaccaaaaaagggtgattaatctcgttatacattgtctcaatttcatttagtttcagttgtttaatatctgttttatgttcactgcttgatcattgtattcgagtactataattcttgtttatatttaatttcaccataaatggtatcggagcaaggtaagatcgaggactcaagaatcaatttttgatgaatcaagaactcatcaagaatggtattgacactaaaaagtgaccaacaccagctcgctagattgtcgagatgaataataagtttaagtaaataatttaaagggacacacgaaattaatagtagctcactcctcatgtcgctatggtaatagagctatatctacatctacttctagtttttatttcttacaagaattacaagaaaattggctaaaggttaatgctcaaatttctagagagaaaactaataataaaataatccaaaaaatatggaaaaatacatttaggctatttttgaccgttgatgatgatctaatagtgaaattgactccaaaggtcggttgtcaatttttgaagcttgagtcgcgtccacagaatatatttcacgtaagttatggcttaaattcgtaagtctcttgaagacaaaatttagagttgataattttagaattgtgattggagtgtgagagattacttgattaagcattgaaatagttcaaaatgcaagttgaatcgcatcagtcgtattaatgttgagtgagttatggctgttttactgaatgttattcttagcccatcccctaggttgacatccagtgcccaagttgacatctagtgcccaagttgacatgtgacgtcaacctaggtgctagatgagtaggaaaacgtactgggaatgtttgttttgatgcctaagtgatatttggacatcacttagctagttttcgtgttctggggaagctagtcacgagttctcagagatgttgctattttgtggaaattaatgggagactcgaaactacctaatttttgagtaagtcacttttttagaaaagtgaaaatataaagttgtgaatttgaatcttctttcttcatagctctcaattactatgaaaaactagatggatggtcgagacagaatcagaatcagatgagcagaacccagtgcaccagaccatagtcagcctgggcactgggtactcttttcagagctttcaggatgtcgttttgacacttccaaggttcttgagcttgaggatgaggtcacctaccgcatttttaactattttagagagaatgcttggagcaaaatttgcatttgagtgatcgaaactagtgcaccatgttaattgtcaacctgggtgctgggctaaattttgaagcccctgttattattttttctccctgagtttacttgtaccttctttatttctgatgactgaaaaatggccagaacactttttttttttcgaaaaactgattcgaaacagcccaggttgacaatatgtcaactttggccatgggccagtgccaggtgtcaacattggcattgtgtccaatttattgtccttggacaatttcgtttgcttcctagaaatagttgaatcttaatctaagatgaaaacgataaatattcctcctagaagaatttttggaaaaactcctcggaatcggcctaggttgacaaaatgtcaacttgtgcgttaggccaacaccaggtgttaacttgggtgctgatcccttattttagcccccagattggtttatttattcccagaacacacttgttcccccaatttcgattaagataaagaagattcatgagtcagatttttagtttgatgccagaaagtggcccaggttgacaaattgtcaacgtgggcactgggtgctcaaaaatgaaagttctctgaatttgattttaatgccttaaatatgttcgtggtatgtatagttcattaccgaatgaaaagtttaacccatttgtactaggacggtcccagaaactgaaaccctaatagggttgtcaacttgggcgctaggtgaaaccctaggcgcctgggttgattttttaaggtgatgtttcctgtattttcagctcctagggcttggacttgcatgcttcatgtcttcatggtgcataatactgaaagatggtgagttggaaataacatggtggtatccaaacatcaatttcggagttcctgaagtcaacatgggcgtaaggctagggacccctcttaggtcgacttgctatgattttagactactcaactctaggatattttctttcttgccacgtgtcaaacattaatgtctacatcatcagggttacttttggtgtaaacaaatgactactgcatgatatgaagttgaaaagtttactg

SEQ ID NO: 35136 - DNA, 1604 bp, Cannabis sativa
tgtggcagtacttgtactgggtttgtttcctaagctagtctttagcaacttcatctcatttcttgcttcctctttgtgcacaaacacttgcgctcttttgttaaattcattattatttgtcacttgacgaccttgtaaatcgtcccacaactcgccttcagctattgaaaggtcggtcgtgatccctgcttgaagagcagtaagttaaatattgtcatttaagtttctaactttagcagcggcagtactgaagcgaatcaggtaagccttaagtgactcgcctggttgctgttttatgttagttagggatgatgcttcaggtcgcctatctctagctgtctgaaattgtttcttaaaatctttggacaactgttcccaagaagttatcgaatggtgtttgaatttatcgaaccagctactcgctaccctagtcaacgaagttgggaagaaaatgtaatgtagattatttgagatgttgctagctcgtattatggtattgaaatcattcagatgagcgattggatctgtagtcccatcgtacagcgagacgtaagggtttttgaatccctgagggaattcagagttcataatatcaggatggaaaggcttgggctcctcatgcaggtcataaccaggtaacttcccatattccccatcttggtatctcctgaacttatcctccaactcaatgattcgtaattggatgggatcctcttgctgttggttagcattaagctgttggcgtaagccaggtgcattctgatttagttgctcgcatagatcgagttgccttcgattcaaatggtcacaaagatctagttgtcttcgttcataattgctcacggacctcgtatctgagtaacactcagattgatacctcctcgtattgctcatattatattgatcagcataatgccgaggtctacttccctctcgtgtttgccttcctaatcgactttgcccttgggaccttgaatgtcttgagctagaacttgcgtcgtcttgtattgccttctccttcgaaaaaggttggatacacgcccttcatttaggtatgtgtatgcctcctccctctcagattgagaaggacgctgagggtgtcttggtggcaacccacttattctaggttgagtcccataatttctctcgttattatgagggatttcctggaccctagtccggggttgccttatattgtcatttctgtgagaagcctctagcacatcattatgttcatccctttgattcgtaaatccttggggtttttgaggtactcctcgacgattttcttggttattatgttgttcatctactggaacatccctagctctctgaagttgctcctcctgcgtgttttggggatttcctttatttgcttcctacctcctggttcttgaaccctgaggtctacctcgtgaccttcttactctaggatcaggttaattctatgcattattttcttgagtttccttggtcgttgcgacctctctttctaacttagtgttttgttggttagatttggctaagcattgccaaagttgtctattttccaattctactaataatacatacctagtgggatcataagcatcctcactcctggg

SEQ ID NO: 35137 - DNA, 2326 bp, Cannabis sativa
ttacatattaccctacataaccaaacacagtttacacatttccctataatcatattctcttttataatattccctataatcaaattattttaaacacctcataccaaatgccacctaagtgttaagtaatttctcacgtgataattcttgattggtttaaattattaaattttttattttttaaaaaaaatagtttaaatatactaataaaaaaataatacgtgaataataacttaacatttaacttacaaaatttcagaaatataactaaagtattattagtgcaaaaaattaaactttaatatttatactacaaattactcaaaaaaaaaaaaaaacacaatactttaataattttaaattatttttaattaaaattataatttagattaatcaaaatttacacatcacattttattagtattgtaaattgtaatggttaaaaaaccgacaaaaaaaaaaaaaaaaaacttaacattaaagtgtgaaactattaccgctaattttattaataattttggtctttcaaaattccttatatcgatgtactaaacatcacctttgtactaaagtataaagctaagaaaagtatttctatagtttaaaggaaattttatatgattttacatgagcgtctgcccttctgttgtgctctgtggcagttaaggtccatatctggtttttttttacagttttttttcttcttcttttttcagtttctctgttcattgtcttctcattttcctgcatttttctgcattctcactcggttcactatggatcctttcattcacaaaatgaaatccacaatgactttgtctgacaatgagaaatctgtttttgccattgctgatgatggctcctgcgaagaacaacctcctgaagaattttcgttatttgccagagtaatcacgcataagaaagtctggcttacaactttccaacgtcaaatggcagaacattgggatggccggttcaaagtaaatatcaaggaacatttctcaggcctttttattctctgttttggatgtgaaggtgatcgattaagagctcttgataaagaaccttggcattttcaaaatcatcatattgttctttatcctcctactgcacttcaaaatgtcactccggaatctatggttttttctcctttttgggtgcaagcgtataggcttccttttctcagtaaatccagattgttggctaaatctttgggaaatcttttgggtgaatttttgactgttcatgaagactcattgaatgaaggttggggtccgtttttacgattcaaagttcgtttaaatataacgaaaccattgcttcgtggtaagatgattactctacccaaagttcgagatgaattttgggttgaattccgttatgaacgtctccctgattattgcatggaatgtggtattattggtcacttataccagaaatgtccacagtttttggaaaatcttgacaatggtattgaaccagagttggcctatggacctatgctgaatggttctgcattaccatcttcatcttatgaccgttatcgatctgatttttccaaaggaaatgcgtggcccttgctcactcgtctggctagaaactctctaactgctacaattccacagatccattctcgtcctgctgctcatccaccacagttactgactggggagtcttctaattctcaagtgttaccctctactgctactgctactgatcacgtttccactacagcaccatcatctagagttcaaccttttttctcaccggctttacttggacaatcttcattgatttcctctggtatggtccaaacatcagcaacactatcatctttcccatctggtgtggaaaatacaattaccaatgctcctataaaatataattcggttgcacatctctcggatgtatacactcctgatgttggcaatttttttgcacctaactcagtatccacttttaatcaccctgttgccacttaccccccaatgacatctcccacttctcaatctcattaccctgctctgaccgtgcctttctcctctcccttatattcaacctcccaacctattgttaatcccaccactggtctccaatcaactactcagtcaagttttgatcaggaaaatattcacccaaatcgtcagtttaaacgccacaacgactccaaatctttgagacaatttcttaaacgatgtcggggtaaccatgttcctcaagcttctcctttgtcagttgaagtggactctatccattcagtttcagatgcttcttcagattctgatgagatcattgacaatgtagcggtgattgctatgcaatcccg

SEQ ID NO: 35138 - DNA, 2227 bp, Cannabis sativa
ttctctattatctgttctgtcaagctcccttcagtatcctccaagatctgaaaagaattactaacaatagtccccttctttccatcagcttgtgttccttcattctgccctattttgttcttattcctagtcaccttcacaaaaccttcttcatctgtctcaactttcttcctattgtcctgtttcacaacccattgtggcttcccattagagtgctttctgcattcagccgctgtacgtccaagcccagaacaatgggaacaaccaactggtttccattcatacttcagattcactttggtagatgaaccaaactcattctcaaatttcagaaattctggaaaattctgatccataattacctcaatcatgacccttgcatagctcaatcgttctctctccctagtaaccgagtcaagcataaccaatttcccaatctgacttacaattttggacagagtaccttgtccccaatatttcattttcaattcctcgaattgaatctatattggcacacacttaacattctctttcttgaaattttcatggggatcccaaggcttcattatcataggccttctattaaagaaaatataccctccgttcaagatctgatctctgaattctagagagctgaaccgaatgataaagactccatatgccagtaatttcaccttatcaattttgtctttccatattctattgacaaaaccttcaagaacatgtaattgagggttagccctcaaaacatagcatacaattgaaggtgtccagaaggagacttcctcctcaatatcttcaaatgtgattctaacttcactactgctatcaccagaactcctaaaagaattttcaagattcctcataacagtaccacaacgcagagttgggggaatcgggtttttaccttgagcaagatcactgttacattgatcgttggctcaaaggaagtgcacaaagtctttccgtacatccccttgcttctgaattgcctccagtgacgatttaggggataatggcaattggaatacatcgtgtagtgcagggtcatccaccatcacttcctcttcatccgacatctccaacggagctatttcagcaacctcttcttccctagcgagtcgaacaacatcagatccacttttcactcccttcttcctgtttgccttagtaaccgatttagctttcccttgagattttgatcttgttttagccatggtaccagcttctcagctgcaagagcaagaaccacgagagagagcttctcagcttctcaacttctcacattttaaaactattgagttgtcatgtaatataataagctactatttttgtatacaaatttttttatatatgttttattattttgaaaactaactagttattgtataatataatataattcaattaacaaaattataaaatgaatattaactaagattaaaaaaattgtaaaacattaattaatcactatattaaaaataaattattgttttggaagttgtgaaaaagtatgtgcttctcatatcttgaaatgttcagactaaaaagtaaattccaatagtaatatttttaggggccaatcgagtaacaacgtggcctgtaattatttttaaaaacaaaaaaaaaaagaaaaaaaacacaaaagagataatagaataatgaaagaaaaaaaaaagtgtgagggagtattaaaaaatggtcaactggtattttattttgcgataggggtattagaaagagttaggcagtattgacaaaaactaacatatcatttttgataattagatccactttttgtagtttatgtataaattcttagatattaaccattatgataataattactaaaataatttagttataaatattaattttgaaaacatcaaactattagattttaatccaacaataaataacaataaaagaaaaattggaatttttatatttaagttagctacttaattaaaaaaaaaaacatcttcaaatttttttcacaatctttcaaaagaaaaattcacaatctatcaaaaatatatttatattaaaaatattatatcaaactcaatccttttcgttgaataactcttattttttatttttttttccacccatgaaataatcccatctcataatatagtataataatgaaagactttgtaattagattaaaaaaatgaagtataaaaactcaaataagtgaagtataataatgaaagactttgta

SEQ ID NO: 35139 - DNA, 1333 bp, Cannabis sativa
tggatttgattggtacaagtgagccagaaacagctgttcaggctgcaatgtttgttaaacttctattttcaaatcatacgattcaagaatatgcttctagtgaaactgtcagatccatcactggtaagtcattgctctcttttcctgtgacttatctgtttttacaacgaagagtatatgaactttatttgttgtggctttctatagtttgctgatgaaactttttgcattttcactctggtgaaaaggagttaactatatgtgtccaggtgtacaacatagggtgtgttttgttgggggtaatgggatggaaaagaatcaaatttcattccattcctttgttgattgcattttcaaatatttgaatgccattctaacagaatgatttttccaccattttggtggaatgactatttcatttcaaaatgagtggaaatgccatttcaatgctagatgattttttttttttaatgttttcatgtattttttatatgcttattaaatttaattccattttattcctattcccattctcatttctatttctttcattccttcaaaccaaacataacatgtgaagaaaccttaaccttatgacttcactcaattttgttgttttgttctctcctatatatgtttacagtaatgttttttttatatatatatatatatatatatatattataatccaaaaaggtgtcctcaattgtgcatggatatagccaaagacagttcctgtatttctgtaaaatgttttgtatattactgtagccggtaaccactaaccagtgggtttcttgggttgctttgcccagcaaataaagttaactttaaagtcaagtctaattcacctttctgacatgacagctgctattgagaaagatttgtgggccaccggaactgtaaatgaggagtacctgaaggctctaaattctctttttggtaatttcccacgtttgagagccaccgaacctgcaacactaagtattcctcatcttgttacttcccttaagacagggtcggaggcgactcaagaggctgccttggatgcactttttcttctgaggcaagcttggtcagcttgcccagctgaagtatctagggcgcaatcaatcgcagctgcagatgccattcccttgctccaatacttgatccaatctggtccaccaagatttcaggagaaggccgagtttttgttgcaatgtttaccaggaacattggtggtcataatcaagcgcggaagcaatatgaagcagtcagttggaaacccaagtgtcttctgcaagcttacacttggcaacactacacccaagcaaaccaaggtaaaagaggg

SEQ ID NO: 35140 - DNA, 2304 bp, Cannabis sativa
aagaccctggagcaaaatagtgttcctgaaaggataaaccgaatcctgttgaacgaagttagatgtttacttttcagttatgggttaggaaaagaaaattttggggggaagccttagcaatcgcaacctaccttgttaacatgagcccaaatagagttatagaccgtaagacaccttatgagatgtggtacaacaaaacccctagcctaacacacttagaacatttgggtgtactgcatatgtacaccaatccattgacaagctacaacctagatccatgaagggaacttttctaggttatgccttaggaaccaaggggcatagaatctacatttctaggaaaggcacaccaaaggttgcgattgttagaaatattattttcaatgaattagaatatcctcaattgacctctgggaagggtagtgtgtctccatatgttacaggaaaaataggaaacaaagacactgcaagtgtggaggtggagtacggaacgaagctcccagaagaaggttcacaggcagaagatagtgttgaaccggaagacaatgcacaaccggaagctgttgtggagccaaaagaataagaaaacaaagatcaaatagaggtgttagaaggtttcagacaaacatgtctggaaggttatcagttggctcgtgatagaacctggagagggattcatccttcaactaggtttgcggaagcagacataatagcattcatactggcagtagttcaacaagctaaaattaaagagcccagaagttatgaataagaaattataggtgaaaacaagtctaaatccctctaggccatggatgaggagatggactctctacggaaaaaaaagacttgggttgttatgccaaagccagagagcaaaaagattgtagagcgcaaatggattctcaaggtgaaagaaggaatcaatgagaatgaacctgtgaggttcaaagccaagttagtgtctaagggttttactcaggaggaagatatagactatactaaaatcttctcacctctggtaaagtacaagacgataaggctgatgctatccctggcaacacatttagagtttcaagttgaacagcttgatgttaagactgcttttgtgaacggattcttggatgaagagatctatatgaagcaaccacctaggtttgaggtggaaggaaaatgagttgagttggtttgaaagcttaatagatctttgtatgatttaaaacaatccccaagacaatggaataaaagattcgatacgtatatgcatcaaatcagattcaaacaatctgtatacaatcactgcctttattttaagaatctggagcaatctacagtcgtgttcttactgctatatgtggatgatatgctcatcatgagcaaagataaatcaatgatcaaaagtattaaaaccaagctcaagagagaatttaagatggaagagcttgggtcagtttaaaaaatacgtggtatcaaagtctcacagaaggaaggaactattagtttgaagcagactgagtacattaagaagattatttagaagtttagcatggaagatgcaaagagtacattcgttcctttagggggacaattcattttgtcaaaggaaaaatgtcctaacagtatgaaagagaaagaagagatgagggatgtaacctatgctgtggttctcagatgcttaatgtacgtgatgttgagcacgagactggacatagctcacgctttaaacatcctaagcaggttcatgtccaatccgggcatagaacattggaaagcccttaaatggttactgagatatttgaagggcatatgggattatgctctggcctatgaggaagaaaaatgagaattagagttgaaagagttcgtggatgcagactatgcctcgaatagagataccaaaaaatcaaccacttctgatgttttcttgacaaaccagaactgtatatgatggaaggctcagttacaatttatggttgctctttccaccacagaagaagaatttatggcgactacggaagcttttaaagaagcgttatggcttcatggaatactttatgagttgaagcaaatcaaaagaggagtgattgtgtattcagatagccaatcgtccatctatctttgtaagaatttggtttattatgaaaagagcaaacatatagaattaagactatactggattagagaaaagataaaataagggctggttgattgagagaaggtcagtactgaagataatcctgctgatgttgggactaaggtcttaaccttaaacaagttcaagcattgcttgaacttgatcaatct

SEQ ID NO: 35141 - DNA, 1660 bp, Cannabis sativa
  modified_base (1348)..(1353): a, c, t, g, unknown or other
actcatcaaaaacttgcgagtactagaggtactcaacagaaaatatatgagcactcaaagtgttcttcctgaaacctgtgattactcaagttttgggaacatatttcctagaaaaacaggtactttgtcaaaaataacaaatcctattatctcatgcattttctacccctagaagcacataatacacataaattctcagagaaagaaaaatagctacagaagttctagtctgctaaccttgaagtgcagtctctctttaaatgattctatggatattaagaacttcaaaatccttctctgatgaagaaaactcagaaaaatgcaaactgattttttgagaattcgaaattctaaagggagaaagaagaggaaaatgaaaatgagagggaaatgaataaaggatcattttgtattagaaattttaaatactaatatccctcatttattgggatgaagacacgtggcaaaggaatgcctaaggtctcataatccaacggttatccataaccacgcctgtacggacttcaaagagttttgatggcgtggcacataaaatggattaaaagtaataattacaaccgtcttttccaaaccctcgaaaagacaaccaaaagtcaccatctcgtgacaatctcttgcttgcctctcacttatagtttctcttgtgacatagctatcaattgcgaaactaggggcatgtgttatagtgtgaatttttcacctagaaactcgagaccaagctcccgtaaaaatcacacgtggattcactcccctcgaggagtgatgagctgtcagaaggagaccacttgagtaaaaatcttgcctaaaacagactcagcaagatgatgttaccctaacagagtctagtcgcattattacgcctcgcataatgcaggaacaaagactgtgtttaagactcgcagataccaagatatatgcgatgtccataaaggttttcctatgagttagtaaagatcgattctttacttagcgagctggtccagatgacctgacacactcgataacctgataaggactcgcatgtcctaagttattgactttttacaagaaatctgtatatgtgactcaaataggatgcagatatcttaaacacgtgagactcgattagtcttgtacgcatcttcagcccgtgagcttatgagagaatataaacagataactcgcaccaccaaggtcgcatacgctgttgtagttagtgaattgggccgaaactgttcttcatttattatatttacgtttctattgatttaaatgttgatattcaatgtaaaaacgaattgataattaatcaagttctgtataatcaaaggacacttgctttgtatannnnnnagtgatccaatatgaaatggacaagactgaaacccttgcaacagtggactaagcagaccatgatctgactgaatcactatatttccattgtgttatttatattttccagtacgtctgagtgtccattctttgaatacttgccattctatgtggagtaatcacatacttttatttataattctattttaatattttatttggtgttgtcaaaactcctccaacaacaaaactataaaaagatcactttgggcttatcttgaccttttatgatgatctaatgtctaaaactaactattgatgaaaatca

SEQ ID NO: 35142 - DNA, 1099 bp, Cannabis sativa
atatatatatattaaatagtaatataaataaactagtaaacaaactgcgcttcgcggcggatgtttaaaaaatattaaattatattttttatttggtgataactaagtaaataattttgtatcaaattttaaccatattaatttttcatataaatttctttgaataatatgagattttttttttcttttttttagagagaaaacaaaaatattcattaatttatgaagcattggtaaatatgtcaaattaataagtaaagagtcaaaagtacacataactaaaaaaaaaaataggtatatacacattggtaccctatattttatctaaatttatgtttggtatcatgtatttttgataatatttatttggtactctgtattttaaaattatacatataaagtaccataaattcaaaattttttaataaaatttatcaatacaatcaagttgtcttcaattttatgaagtctaaattcaaaattaattatttgattacatataattgagaactgtttagtcaaattaataaaatttaactttagtaccaaatatatacaattttaaaatataaggtacgaaataagtattattgaaaacacatatgtttttggagaaaaagtaaggtactaaataagtatattctctaaagttatatagtctctcatttttttagacatcacttctaccttcttgtgattcttctcttaccgattaaataagtcatccttatttttatatccagaactaatattattcaacaaaactaattaaaagaaataaaaaaaaataaataaataggtttgcagtgtgattacggtttagagtgagaatatttttaaagatatatttttatgtattttatttaataattaatactgttttaatttataatatatttttttatttaatttttagatagatttatatggtttatagttacgatatttgagatatttttttaggaatattttctcagttatagcatgttttttaactaatattttttgtaagtggtttagaaatatatggagaaataaagaaattttataaaacctggaaaaatgaataaaaaatttaaaatatggaaataactaatta

SEQ ID NO: 35143 - DNA, 1335 bp, Cannabis sativa
cccaaccacgtaaaaatctcgtgcgttaaacttcctacagctttcttacatattattaaattagtttccgaaaacctcgatcaacaattcgcttggtaaagtcaaacataatcaaagaagttgattcaataagtatatcaactacttcataagagaaaacatttcatcaagagatcaataatttaagaccatatccaaaagaggacttcaaaagctcaaagctaaaagtcaaccttaaagttaaagttaactcttaggaaaagtcaacttatgatcaaaacatgcaaatcaagctaaaaagttcatatacatcaaaaatacacacaatcaaatggtataagtttactctagtcttgttaaagtaatttgcataacacattaggatttataaatttaaagtttggctcactaacttgagcagtaagttattttgcaaaatgatatataaattttctaaattgatttttaagttctcatatcatttaacaaagagaacacgactaaaatttttgaaattggataaatgagctaagagttatgcacattttgagtcaaaaaatttggacttttgccactgtcccttatttgggcttccagatggaaactgggcttccggctgggacagttctagacttctagttcctaatggaacttttggatggcaactggaatttcgattaggataattttggacttccggatgggagcagatttacctagggaaagtgcccaacatctaaaaatagctaattttcttcccatctctatgtaaactctattttctctcaaaaattaaagttgtttgagttagtattgattatattacatctctaatgttctaaacttactttgcatcattctttcataaacacactaaccacacacacttgagtcgaacttgttcttatcttctctattgtgcttacgattccctctataatttcagattgtatatattttatcttattagagagagtttactttgtatttaaaatcaaatatccattgtattgagaggtgatgccaacatcagtatttaaacaactcggttgtaggtgaggttgagactgattttgtaaacaacccgagtagagtgagactgtcacttcaacaatatgagagtgagattgtcacttcaacaatctgaaagtgagattttcactactataatctggtataaaggtgaagttggcactagtagaaaaaatgcgattagtgagattgacacttgaacaatccggtgaggttgatagtcattggaagaaaaatattgcgacaggtttgggaaaaaacttggtgaaaattccttggttgtaagggtcagtcaagctctta

SEQ ID NO: 35144 - DNA, 6120 bp, Cannabis sativa
  modified_base (38)..(45): a, c, t, g, unknown or other
tctttattgatattgaataatagagattacattgaaannnnnnnntatttagggcataaaacccaacggcagaaaactgctggcaaaaaagtatgaaatgtcccccattgattgcataatgttttacgacatttatctcaaaaaaagctcaaggcgacatgttgcttgtagtacaccaaagaacccttcgagatactttgctacatgttgacaaacaccctgaacatatattatgtgacatgttgctcaataagaggcgacatgtcgcccagtaaggtgggacatgtcgcctgagacttttttcagaacaaattacgaatttttaaatttcttctccgagccatcttccaaatattccaaaacacattcaagtaatataaaaatattttgtaacagtttttaacagttagaaacttcccacttgattctataactctcacgtgtaatcactcttttaattacacattaccaagtaagatataaaagttacaaaacttgttttagattttgtaaccttccaaatgttacaaattttatttttattacactttatcatacacaaattgttgacataattttttgtcaacttaatctaagaagataattaattagagaatgaatttaagaaatgaagagatgaaagtaataaatttacaccagcttttttgtaatgaccgcttagctttattacgaacattagtagatatttaaagcttattttcataagtagactttttaaattattatttttacaattatagagatatatttgaattttagatgtattaattataatatatgtgaattttgtaatttttatatcttatgcccggttatagtggaaggcgacgtataacctgtgtagtcacttagatgtagtttggtactttaagaaaagtgggacagtatagttagacatttgaaatatcgtattatttcaagattataattttggaccatattactcttagattttaagtttatttaatgatgaaggaaaagggcaattggtaattttaccatagctttgtctttagttaaagttagtggatttgttattaatcctttagtttttattaattaataagttgaataataaataaagagattagatcttatctcttaggtgatacttagccaaatcacaaaaactacaatgaaccaaagtcaatctctctcttcaagtctctctctcttggcctctcttggaacccaacaagagcaggctttagtccatcaatttcttgatgatttgacaagaattttgtaggaatttcaagtatcaactgaaggtaagctcatcacccaccttcttctctttgatttgcttaagaactagattaggttttcatggttgttttgtgaatttagcttatgtatgttttggggtttcttggatatattttatgaggatgttttgattcaaacttaagtctttaataaatttttttgattcaagggcttattataactatttttattgcttgaaatatgtttgttattgtttaattaggtgatttggagagtttggtatgatttggggtaaaattgagttgatggtgaagtttttagggttttttgtagagaaccgattaattggttctggcagtcttgtaaaaccggttaacatttccctatgtagaaccctatgaaatggttttccattttgggaagccagtttaccagttttggccgttttagaaccctagttttttgtattttagtgatatttagggtattaccacgctatccatcgatagggaaacttttagttttaactttaagtccccgagaagtgatttagcgtatcacttattagttttacgaatattgtgacttaggggcctataaatcgtcgaacagcagtttcaactcaggtttaccgacacacttgagttcagaatcatggtaagattagtataaaaatatctcatgtgattacatgtttagcgttcatgtttatgaatgttatataacatattagtagtggcgatattagtgtacatagagttgcactaaattctaataaatatatgtttggcatagtactgattgatgttatcacattagtatgacttgagtaccgagtataagctgaaattatggtaaataatactgtcgtatgaacgttctagactcagtacacctgggacacaagataggggtatgattgggtgtatgggcgcctagttataatctagcttatgttatgttataattatgcttttcttactatgtctgttaactaatagatattgtttgcatgtgcaggtaagggcaaggctaacgatgaacaacaatgagcttgagctaatgaagattgtacatatcggggtatttagacatggagtgttcgatcttcgggacaacaagctgtattttattagtcgttagacgaaaactttattagctgaatattttgtaatacagttgtaaattttaaagatgagatccatatgaggcttttgtttatttaattttaaaggttaattaagaaagttttaattattcacattttcccataaatccttgatcaataaaggagtgcacaacattaagaaatcacagtttcacacctaatatagtagggtgttacaattttagtatcagagtggccaagttgtcttccaaatatcatctcgatatggataattgtcatcaaagataagctcggctcacagtacagtaagccttttatgctttagtggtttgtttttttagtaagtgataggaaaagcctgatatgaagcatattagtagcctaatagctgaataggtgaatgtattttctcatgtaagtggtaattaaaatttaatcttaatcgcgatctgatcaggctagctcatggttttgtaggctatttttaatagaatgtacgccaggcataacacgagaagctagggtaatttggtcaaatctagttgcagtctaggagttcagtttccccgtaatgctagcggccgaggtaaaagcccaagaggtgggaacgcagtcggggtgatgttaatccaccgtaggttgcccaagatagggaaggtagatttgctaaaatgcaagctaggattgatgtgcaagatgaagagatttggcgtcaaagacataaggggtgctcctacaatgcctactcctgaggtgcagactgctcctgcccctcttatgcaagtggggctagttattgttgccgacaaaataaaaccactttatgaatggtttcataagcaaacacctctagtcattttgggaggttcagacgttatgaaagctgagcaatggctaactattattaccaggatttagaattttgtgggagtcactgacaacgaaatagtggcttgtgtaatgttttatttctaggaagatgccccggtttggtgggacatggtatcgctcacacgggacgtcaccaaaataatctgggatgaatttcaagagcatttaatacaaagtattataataaggaaatccgtagtgccaagacaaaagaattcacataattaacttagaaggaaaatatggcagtcatagaatataccacacagtttaatagattggctaggttggcttgtaaaattgtcaactaactttagtaagaaagaaaagtaactgaatgttttgaatcccaagattaagcatgacttgatgattacaactaacgatgctactaccaatgttgatatagtagggaagacaatgcgagctgagggtgcagttgagtgtatttaagagtctcgagggactgagattgttagtggaggcaatgctcctcctacctctagtttttgtaggggtggtaatggctcaaccactgatcagaagagaaaagtttcttatgcgtcgagtggctcaagtcagaacaaaaggttctgaggaaactaaggttgtggtaaccaacagggtggatctaaggaccgatacacttacccagaatgctctaactatataaagcgtcacctaggcgagtgcagaggtcgaggatgtttccagtgtggtgtaactggatattataaaagatattgcccactgttaaagaaattagagcagaagacagaggcaaagcccgctccagcaagggtgtttgcccttacttaagttgttgctgaagctattccttcagttgttacacgtcaacttttagtcaacaactcttattactctattttgtttgaatctagaaccactcattcctctgtggtagctagagtaattaataaattgggtaggccatgtgataaatttgataaagggtttggaatcctacttcctggtagagaattagttatctcgaaaaggtgtgttaggtctatgtcgattaggattgaggatagagagttaagcactgagatagtggaattcggtttagcagattttgatattatattgggaatagactttttgtccaaatatgctgttgatattcattgtcaatggaagatggtaatcttccaaccagcgggtgatgaaccgatcgtgtttttgggatcattttagggttcttatattctagtcatctctatattaaaagccagagatttgttacaagaaggatgcacaaggtttttagcagtggtactggataccactagacctaagtcagtttggtttgaggatatcaaagtggttcaagattttttggacgtgtttcctgaatgagatctggttggcagatctgggttcatttttttaggagaattaaaatctaaatcagagggggaggaggaggcttgactgggtcacagacgtgaaaagcagatcactgggggagggctagaagcgactagcatgggtgggtcgcatgaattagataagctgagagggtgagaggcatcgaaagattggggaaaggaagagaaagaatcatttttttatgtctttactatttaacaaatattagttattttaaggatcaagttttagatatgtcagaaataggagaaagaagaagaaagagataaatatactatcatttggatgctcagagtatgtattatcaagatttagctttgggtaaagttcattcaccaaatccacacacatgcaacaaaaaaaaatttgtcaagaccgacaggggaaattcgagcgcaagaagactacaaacacaatttcaaggaaaaacatttccttatgcctttggtatgattctgctaggatgttcgaaacaacatttgagttttgttattattgttattggttattattttcagttattagctatttttatcaattattggttattgctcattttgatgttttggagtaagtttttcattaggagcaatatttgcactgagtatttggaaatctgaataatacatgttttactaactattcagtatcacataacaatgaaatgattctagtatgataattggtcaaactacgcataatgtaattgaaatgtctattttttctctccttaattttttcattttttaatctacatacgttttttaaagaaagacacttgaagcattactatatctctttaattctctcattttttaatttttttattagatttataaatattaatctatctatatatataaaaaaatataaaataatatatttttgagatgagtgtttactttataataatttttttaataagtaaattaaaattctatatatacaatacaccaaaaaattttttgatcctaataataattattatttaaaaatatggtgaataaatttttaaaaaaaattattttacgaaattttaatatttaataaataaaattattaatactaatatttcattaatattatatattataattattttatttaagttactaatttttttttattataattttaaaaacgaattaaaataatcaggaatagcggctatattacttagttattatttattttagttattatttgttttatgcatataaataatttttaaccatgtcgtcctctctatttatggttattaattatatattattattacatgtaatatttacttataatttatttaggaaagcaataaaaaactattacataattacattgtaaaatgtcacctcaccaccagaaactaacaatactaggtgaatgtacgtgccaagccacgtattgttagtttcatttaagattttggtcttttt

SEQ ID NO: 35145 - DNA, 4810 bp, Cannabis sativa
ttccataaataaaaatattctaatatacaaaacttcctaaatagctaaaaataaagaatagaaactcaaccaactagagtcataataaagtactaaaaaataacacctatgttagtcactaaagtaaaatggtgtcaccattatagttcaaaatgttattatctaatttttatttttaaaacaagattactttttgacatttcacaacatattaattctattattattagcaatttgaggacaataaatcaaataaatataattttgccaaatatgctttggcgcgtttgttctgattctttttggtggttgaaatacctataatgtagtgtattcaataattgattgaaacatagtcttctagtaactatagtggtgatcttgattgtattttttggaacataaatcagttggctcaaaacaattgcttcactagttttttctttgcttttagagaaccatctctagtttttatgggtcatgggctgggcaagattataaaaagaggaaattacactttataccattttcatatcgtcctctttcatttgaaaaataaaatcaaattcaaaataagtctttaaatcgttttataacaattttttttttcaaggccttatagactgatgttaaaactttaaaagaaaaagagactgaaaggcctattaggttgaggggccttaagtaacgaccccagcagttctatcttaaagatagctctagttttattccattgtttggccaagtatttgatcgaaaatataatagaaacttttaagtacatacatgatgaatttgtaggatttgtacaatttgggagccagaaaatttgtggtgttcgacattgaagcaatgggttgtttgccctcatatacaaaattaaactcaaaatgtgtggatgaattaaattctatggtccaaaaattcaatggaaaacttgccttgaaaattcaagaattaggcggtacacttccagcatctgcattcattcttggcaataattatcaacacatcttgaatttggtacagaatcctcaacgctacggtaataaactacttttatgttttatttattttattacaacaaattgacatatttaaatttgtgatttattttattttattttattttttcagggttagaagatggaacaattacatgttgtggacttacacaatacggcacgtgcgatccgagtaaagtgacttgcaaagacagaaattcacacgtgttctttgatgcagctcacacgactgaagcagcttataagattcttgcacaagaatgcttcagtggtgtgagagtctgccaaccaatgaatcttaaaaccctagcaatgctatagatataaatataatagctattttcttaaaaatgcactttaatcttttgttcttaattaattaattccttgtaaaaaaaaactaattccaaacacaattgatatatcttaattgacactaaaaatggttacatcttacattaggtcgttttacaaaagattaattgaaaaaaagttaatattttgcaaaatgacattaaaaatggtgaaaattaatcttccaatagcattttccattattgtttcttaatttattatgtacatgtgagttctaaaataaatcattttccgcctataaagaagtgtgttataaactgtttaaattttgatgtggataatgttaattattcataatctcttgaaaatttatcaaaggtctattatgactacaataacatattcatatttcagatgaatagaatttacatttttggtctctctttgtattaaaaaatgatcagtcatgtcattaatattaatttttaagagaattgttaaatgcattaatgtctaatactaaaatgaaatgccatactactattgatacaatgttcaatataattctaatttaataagtaatatatatgaagctaactatttatgaaaaatcatctcatataatattagaatacactataaaataatttaatataactctttgaaatggttatactagaagaaccatatatgtttttctatttgagagaaacatacatttctcctctttaagctaatttttgaataacattttgtaaacatactctaatatgatcaatttttggaagtgatcctctaaaccaacttatgaactaactcacctacaccaactaacttaactaactttctgttatgttagttagttagttggtaccggttatgcacctattttctagtgtgagttatacctatatatagactgctctttttacttttgtaaggtagaatgagagagagaattcagagagagattccttagatttctaagctgtgaaaccatgttgttgaaggggtcaagaacagagggtgtactcgggtaggaaatagagaaactgtgactgtttctcgagtgttgcagagctgtgattgctcttggattggtgcttgtattgctattctcttgttctacatgttaatgaaggatttggtgatattttttcagctggagtatggcgagggatcaaattgatctctaagacctgaaccaggataaattgtgtcgtcatcttcttgtttcaattctggtttgtttcattgtgttactaactgatttgtgtgtgttattgttgttcaagttgtgagattaatgcaggttttagattgaattcttagtgttattgttgctaaatttacaaccaatcaaatatatgaaagtgctttgatttagattttttttgtaagggacgaattgagagagtttgaggaagggttccagagacaagaacaacaagtggaggagtaggtggtattcaacgagaatagtaggcagagtaactttgaaagtcgtaggatcggaggaagaatccatggaagaccttgagcgattgatgccatataaagaaataataaagtgctaaaaaaatgcattataactacaacaagcatttccaagttgctgccacatatgctggtgaaaaactttttttttttaacaaatatgctggtgaaaaactttgttgtgctacaacaatcgatatttttccctatgccaaatcttgggtctagggactctaaaatttcaaatcaacatcgtattttttgaatctttgactcatctagcaacatttacattcatctatttttattacaagaaaaattaattgaggtgttcaaggttgactctgagaatatggggctaagatgatataaatttatatgacccttaaaatataaaaaaaaaaaattatattatttacttataattatgtataataatttaattattcacagtaatattttatagtttcaatagtataaactatataatttgttttattaaaaaaattatagaatcatcgttttagtttgttaatgtcaaaattagttttaattattaataaattttttatttatttacttaattttatatactttctaatttttataaaattcttataatcgtttagaaagtatgcatattacttaaacaaatttatatatattatacaaaaagaaaaaaaaagaataagaatatggaatagaaagacacaaaaaaaagtctaaaaaaatattataagactaatttaatatagtaaatttgtagcaactcgtatttctgttctattgacctttacaaagtaagcatgaataacatttgagatttcatgaagtatgaaatagtattgcaaccatagtattaatttggtgaaaccattaatttaacaaaaggcatgcccctatttgtatttaattctacttactattgtcattgtttataatgttttaaaataaagtatgaattcatcaaacaggtggatgtccaagcttacaacataatgtatcaatgttgtattattgtcattgctagaaaattattataagatgtatttatctattgttgttcatttttcaagttagaaagcacaaactttaccagaacgctagttttgtgattgcacatgatggtttcacagtacatgatcttgtctcatataatttcaaggtacttaaaaaattctttccaatttatttgtatattcatctaaaatttatcatgttctctaatttttggttttgtagcataataatgctaaagaaggtggtaatggtggaagcaatgataacttgagcttgaattgtgattatgaaggtaggtccagtgttgcttcttacttgaattctttggtgattaattcatgctttaaacatgaaagaccgatgacaattccattaaatctttatgctctcagaaaatgacaattttcatcttgctttgataatatcttcggtaaattaaattattatccaaattcatctgtgttgcgtaagagtgattttttttcatgtctcatttttggtgttattgtttaaggaaatatgactagagaacatcaatgatgcttatgtgttcctgaggtactttgtcaccctatttgttgttttgattttgaaaaatgataaatattataaaattttgataacctttctttttgtctctctcactctcaccactttgtcttacaaatagaatttacatacaacatctttcatgcataccaagatgatagtgaatatatgttaacttgtcatattgcaatttgatgttttctcttctcttatatgttttgttgtttttttagaaagatcttgttgtctatgaaatgaatgttcgtgcatttacagctgatgaatccagcgggttggagccagacatacgcggaagctaccttggtgtgattgagaaggtaactctttcttatattgaagttagtcactcattatctagaaaactcattagaagaatctatata

SEQ ID NO: 35146 - DNA, 1101 bp, Cannabis sativa
  modified_base (684)..(699): a, c, t, g, unknown or other
ggtttttcttcttcaaatttagtagtttcaagtaagttcttactgatttcaagttcaaggtgagttcctagtacttcccttttttgatttcttgggttttaagttaagaaattatgcatgatttgtaagttaaggtgttgtagttgttgttgttatttgaagttgttttctggagttagattatgatttgatatgttgttttgagctggtttcggtggttgtggtgctgattgagcaagatttgagttttagaactcaagcttggctctttaatggtgatttttgattttgagcatgctatgttgttctattgcttgggatatgtctattggggtataatatgcaggtctggagggtttggtaaggtttggagtcgaattggttaggtttttgaatgttttgggttttttggtgcaaactgattaaccggttttgcaggccctgtaaattcggttaatcggatcagctgctgggttccccaaaatttttgtgttgtcgattcgtgttagtttcagagctttggttggttaattccctgttagtttagggtattgccatgttaacttttaataggtgtatttttggtttaaaacctaaagtccccggttgtgatttagcgtgtcacttttccatgttatgaccaatgtgatttaggggcatataattcgccgagcagttgttccnnnnnnnnnnnnnnnnacacctgaattcggaaacaaggtaagactagtataatgctatgcatatgtaattacatgtttagcatacatgttgtttatgcatcttagagtacattgttagcaatatcagtatacatagagttgtactggatactaatagatgtatgttggttgaaatactgatcgatgctatcacatcaatatggctagagtatgactagcatattgagtttaggctgatattatggtcgatagtattattgtatgaacgttctagactcagtaccgtgtgagacacggggatagggttacggttgggtgtatgggtgcctgattataactcgggataatcttatgtgttatgttatgctttttttactgagtctgttgactcacaattgctatttccatgtgtaggtaa

SEQ ID NO: 35147 - DNA, 1185 bp, Cannabis sativa
  modified_base (58)..(67): a, c, t, g, unknown or other
ttgatctcccgttaacaaataaactcaataattaaactaaaaaattaaacaatctttnnnnnnnnnntaatctctttttaaattaaaaaacaatcataaaaaaatcaccttagccacatatctctctaacaaacctatcttggagaatatcactaaacgtagatgtttcctcttactaaaaaaggttctccttaaaaaaaaatattaaataggtttgatttccctttaacaaataaaccgaataattaaacccaaaaaattaaacaatcttttttttttaattaaaaaaaatcatcttaaacccaaaaaattaaacaatattcttttaaattaaaaaaaaatcatcttagacacatatctctctaacaaatcgtatattcccaaattatcaaatccaattctctcgctttggtttacgatcaaccaaacgcagctatgctttgcactccggtataggtttttccaagattctcatacggaacaggtattattaatttcatatcatataaatatacgtgcctattcactagcggctttcgtctgcctaaaatatgttatatgtaccagtggtccaacagttcctcaatgggatagggtgctttttttatcgtctctttggactacagtggcaaaggatgtagtggtttgcacctttttgctactgttattagttgaaggtttcagtgtccaattagattttctttataatcctttttttaaacctctgggaattatgtttctggattttgcattatctaattacttttattatttttaaaaaacatgcttatacattattcatgtggaagttgttaagcttctatgagctcgactgagaaggttgtaaagtgtgtgccttgctttcttagaatataataaatactctatatgtacattgttctttcaatttttcttttgtttgcatctatgtgctctttattttatgttttttttttgacaaaatatccaatattgcagctgaatgcgtcggggaaggatttgaagcttgggcttgtcatcttcagtgccctttttctggtttggtcttttagtaataagctacttattcacaaagcatatttaaaatgttactcgggcctattcactagattttataacatattcgtatattttttacaactcaaaatcagaacaaataaatattcaagtatttcaataaattca

SEQ ID NO: 35148 - DNA, 1424 bp, Cannabis sativa
ttccccttacggatcacacgattactgactgtcacacaaagaccccacaggatcccagtgttacttttgaggtcgaacttatcgaatccaagtttaggtcgattggggcctatgttggcagcatgttaaagtcctgggtcatcaagaagaggaaaggctgtgtcataaggtctatggcacctagggaattcagctggtttcctccagaaagggtaatacgcgaggagtgcagtgggcctagcacgagtaattcctcaggcattggagcctggagcctcgagcacatcaaggctggggcggaccttccccttagggattattttaaggagtactgtaactacctcagggttgccctattccagctgaaccccatcctgtataggatccttgcgagcttgaaggccctacaccatatcttaggatgggagtgccctactccttttgacagtcaaagcagtccctacgaggaagaatgctacatgaggcttttactatcttgggacttatactggtgatcgcaaaatcatagttaggttgccaaacaggtcagagtttaaagaagacttcttctggacgacgggcctctctctaataaatacaactgccttccgcatcatacgtaagttcttttccttaaaaacttaactttaaaatgtattaatttgtatctttaaagtcacttactaaacttttgtctgtttgaaacggttcttcaaagaccagttcctactcctaagatagctgagcaccacagaattctgctaagtcttccatatgggttgcgagcagaagatttctttttaaatgagaagaatacaaagaatgttggccttcttgcctcatacgaatttacttgtgatgaaaaaatacccaagtattcttcgtggcaaaaggtcccgattacagccgaagaggaaagtgaggacttcgtggcaagcacacactatctcgagagaactacccctcaggaataaggagcatcccaaggtaatcaatgtgggtggtcacccacggtgcttagggtcaaacgtaacaccctagtttctttttaagatagttgatacaatttttttacttggaacccctttctcatagatcgcataaaacataggttcgatagttggtacccagagttccatgttcaaattagctgcactagttcttactatgggattgccgagtagtatgggactatgttggatagatccggtcacatagattcaagttgggatttggatccactaaacccttatgatatatttatgatcacaggatctagggagtttagtaaatattatagtcctccctcataatcttttaaagattatggtaaccttctcaagtgggagttttttcccattttcacttatttattttgtttaagtgctaatgaacttctcttgcctcgtagatatggatgtgga

SEQ ID NO: 35149 - DNA, 5645 bp, Cannabis sativa
aaaaaaaaaaattgtagtgatatttcatttataaataacatgttcacttttttttttacatggatttgtgaatatttatattttcaattctacttaattttgtggttattagaaatccaaatgactaagagtgtactcacatcacttctctattctattttttataatactttattaaaacttcactttatttattttaccttacatttgcattatacaatatattaatttttctatattttctctacatcatttaaaaattataattttaatatattttattttttatttaaaaataaatataataataatacacacatacattccagaaagattttaaaaaataatataatatttatagctaaataaatagtgattctttctatccagttaaacattatttatgtgttaaaattttaagttataatatctcatcaaacattactaacttttacctcttagctaatttttttcagctattatctattttagttctctatgagtgctctaactaacttgttttttaaaaccaaaagatagaaaacaaaaagttatttttttctctcttttattcaaaaataaataaataatacaagctagtgatgcttttggctactagactattgccagtggatgatgcagcactacgctccttcgcatagttgcatgattctcacacaactctatttttacgtttcaggttgctttcattttgtttgccagtcttactatataaattacttttgctttattttcctctgactgctaagatgtttggattcgccaaattatctcttgactgttcataaattcagtaaaaaaatcgaaaggttaacctattcgagaatctctaaatcttcgcttattatatctttatagtaactttgatatgttaatattatttatttatctattttgaaagattggtaaggatgaatatcaatttttgtatatgaaaaattatatatattattttattatgacacgctgaatttatatagataaaagtaatttgttattacaattagagtattaaaattaatttttcgttatgattaatatgaataatctttatgtaaagctacttaattgggaggaatttgaaaattaaaatgagattgagattcgaatcttgatcttgtagtacggtggctcccttaaaagtattaaaattaattttacattataaaataagaataagttttttctactaaatcagaaagagtttgaaaattaagataagactctcgatagtattaaaattagtatcccgttataaataataagaatatctgctaaattggaaggagtttaaaaattaagattagactaggattcaaatcttaatcttttagtatcaaactctcaaaagtattaaaattaacttttcgttataaataataaaaataatcttcctactaaattaggaggagtttaaaagttaatataagactaaaatttaaattttgatctttatagtatcgagattctctcattaattaagcatcaaaatacgtactactttgtagtatttattataataccacgtaaaactaccagaatacctacgttatagtatttgatataatattacgtaaaaatatcaatatacgtactacgttacgtgaaattactaaaatacgtactacattatgtatctttaaagaaagaagaaaacaaatgtataaatattttacactaaaattatatacattttttgtatcatgaaatctaaataaaaaagtaaaaaataacaaaatttttaaaaaaaaaaattgattaggctcattattcctacaatctcgcttatctaaaaagaaatcactctaaattattacaagtaatgatttcaatcatgcatacccaaatataaataaataaatatatatttcattaaaattttcacaaatatatttttctttataaatttaattacacccaatacttatcaaattttcatgctaatataaatcttacaaatcacttacatataaatacagaaacaatgtggaacaaaacacacataattcttttatatatataaatttaatcacactaagcttaatatttaatcacaccaaacacaatattaatcaaaacttggtaactaataactttaatataaacaccataaattactcaaaattatttataaattatcttgcatcaaataaataagaagaagagtattattattattattattattattacaaatgaacggtgataagaagagaggttcacagtaaaatatagtgaggtattatgtagagtaacaaaattaatgtttttatgtaagaatgaaaacctaataatccacaattcaatatttcagacaatcacacaccaatttccatcttcaatcttcaatcttcaatcctcaatcttcaacctccgatctctcctcatcccaatgctgctcttcttctgaattccgctccattgttactttctccgccattcttcatctttggttcgcttctctctctttcaccttttatttatttatttatttttttcggttttgttctagcgagaatgagtagtgttgtaggaaaatgacgccattgttttcgttgtatgaaaaaaaaaatgattttttattcggtagtttcgtttgtttgtatgatattttggggattttgttttaattatttatgaaaaagaaaaaggtttttatcttagtgatatgaaatgtttaagtttgaattttatatgaattgagtatttttttttttaatggttgaatattatgtttgttttgtttttgttttaattttgcagattatattattattattattaattgagatggttaagaagttggattgtgatgaagaacaccctaaggattttgatggagctaaggatattgacctttttgatatgcttaattttccattagaagatgttgaagtggatattggtaaagatgattggaataatattccattgcctgatcttccattagattattgtttgagttttccagttggagttggagtcttcccaaatgatacttctaaaccaaataaaattctgcctacttcggtcagttttctttttcattctttcattatttcattacaacacttagtttcttatcacactattagttagtagtagtaccatttgattaagattatgcttaagtcttactgaaaagaattgatagtataaaatgattgaatatcaggctctttactgtttggcttttgttagttcgtagttcgattaacagttcgtgtacacagggtggatgatgatggaaactaatttggttcatttttttaaaattaaagtttgttttgtttgtggtggtggtgaattttatattataccatgtataaatttttgatgaagtaatgaaagatgatgttttgtttgtttgttggtttgttggttttgatttaaattaatagtttgattaagatgtagctgttgaatatgtgtaaaaagtacccaaatgcttaattttattaatgttgactgagacagtttataattttataatatagttgcataatcatcatccttaacatgtttgaattgttttgttttggtattttgctatgctatgttcttcttcagtatgagaaatcttgtagactaaagcagctcccaactgcttcttctgctgctgagactgagagtactattaagtcttctaatgctggaagcaaactcctcagccatgactctaccgatgtcaaaagcgttcggctttttaactcatccagtccagtttcaacccttgagagcaccaatgcttattttactgaaaaccaaaggcatgttgacaagaaatttatagctccaaagaggcgagctagaagcaaacgtcaacgcttctcaaatctcgatagacttcgctctctatcattttttccaccaacttgctcttcatttgcaagtgtttatcccgaatcagattcagggactgttgatgatggaaaaatgtttaaaccttgtgtgaaaaaaccggtcaggaaaggaggaggagagacgcgaaacaacaagttgaaggaaccgaacacaacaacaacaacaacaacaaagagatgcacacattgtcaagtgacaagtaccccacaatggagggaaggaccatctggaccaaaaaccctttgcaacgcttgtggtgttcggtataggtctggccgcctctttccagagtaccgccctgcagcgagccctactttcattccttcggttcattccaactcgcataagaaggttatagagatgagaaacaagggtggtggtactagtgttgagcataattatggttctcaaccaggcaattcagttagacatgtatttgattgattatattaaaagaacagtctttttatttgtaggatatttcttgttagtctctgcttttggtttgtttcataattattttcttaattttttttttctagttgtagtttattaattaattaatgggaaagctaggttttatttgccttcttacttagcaattttgttacttccttttcaacaaaattaaataataagaaaaaaaaaaattgcaattaaaatcataaaaaattctcaaatacatcttaaaaatatcattcaaattgtttttgtttagtattaaaaactcacatttgattttgattggatttataattgtattatataattaattcaatgaaataataatagaaaaagacataagattggatgttggctttggcctaatatgaaatattgtatataaatatataattgttatatatactaatcttctttctccatgaacacacagactgtattttggcttttttctaaaaaaaaaaaataaaaattgatcttgtcaaaattaaaaaatattaaataaaagagttcatagacaagcaaatcagatctgattattagaatgttgaagaaaaagccaaacgtgaaaattagtctcttcataaataatacatctttctcccatgcatgatgcttatacaaattaatataaatacacatatatatatatataaatatatgggtcactgcatgtgcaccacattacaatattcatcccaccatcactacaatattttcccaattcaattattttttttcccttctttctttccaaattatattaaattaatatgattaatttgatttacattttttattttttttttgttagtagaaaattgtaggatttatgtattataaatatgttattaaaaagaaatactttgttttaaaaggacaagaagagaataactttgtttattgacttttgaacatagaacatgctcaaatctcaatcctttataataagcaatttaatttagatttggatctaaaaaatcaacatggcattaagagaaatttacatgattagattaaaaacattcaaacaatttttttttttattttcggagttgtacattttatttagggataattacataaattattattttttgtaaattttttatttttttacatttaaatattttttttttacattttttacagtattttataacaacaataagaaaattacgtaaaaataacagaaaaatagcatttaaataatacagtagaacctctatttaagaatactctattcaagaataacctctaatgtgttataaaagatcaagtcccaatttgagccagtt

SEQ ID NO: 35150 - DNA, 1451 bp, Cannabis sativa
  modified_base (68)..(69): a, c, t, g, unknown or other
  modified_base (98)..(99): a, c, t, g, unknown or other
  modified_base (187)..(197): a, c, t, g, unknown or other
  modified_base (263)..(263): a, c, t, g, unknown or other
  modified_base (290)..(300): a, c, t, g, unknown or other
tgtaaagggttttatttagggcacaaaacccaacaactttgctaataccctagaaaagacataacacnnaataccctagaaaagacataacacttatnnaaggtgtaagtataccttatcgccgattataatgtcagtacaaatccagtgaactgagaaattatgagaattaaacttttgaacatannnnnnnnnnnatatttcactgtgctgacgacactataattatgaacaaatacatatatatatgttctggacttaanagaatttatacattaaatataatcatnnnnnnnnnnntgtgaaccatgcaacatagaataatttttgatcttttattaattagtaaatttgattatcttaaaattggttttatttagggcagaaagcccaacacatatgtaccattaattcaatgtgaacaattaatctataatgcaattatagatttggatccaactgttagcactctcagaactaacactataagaaactaatattcgatccttttggaaagcttagattctattattgtataatatgttcccaccacccatgttataaagttcctagaacaaaagttgtaagaattatcttctttgagaaactttaacgagtgaattaaagaactcaataaacacaaaaaggagttcatgtatactcaggatttagattgatatactaatgatcatcgttgtgatatgagtaactcttttatgaaaaatgacacgttaatgaaaaatattatttcatattggcacagtcatgtataattaaattttacacggtacctttactaaatgtttatccacatatgtgatccgaatcaaaatctcatgcactagagtataatgcttagtaaaccgtacttggtaattccatattaaagatttcttactttaatacactatcgactttttctattcatattgtatcttaattctcttgtatttttttacaagatcatactcactttataagacaataaaaattttcagatatttattaattatatttctattattaacatattcatttatcttatatttgcattacatatattttctaatatattatcctggtaggcatcaaagaaccattagtaggcccctcaaagaaggtaaagcaggccaagccaatttggacaggtccttacaggaacgtactccagctccgtgaccataaaacctaaggccattgacagctcatgcccaaaagtaggtcctgtaccatgaggcaggaagggtaagacaacatgatcctggaagattggtcagatttcccattttattcctgcacacaaataaggaaacaatcactgtcagatctcgatagaggattgaattaagctaaatgggaaaacttcctataacaaatatcaagcaattaattcacagataattgtccacaatcaaagtacacggtgttggccaaatccaaccaaatctgat

SEQ ID NO: 35151 - DNA, 1197 bp, Cannabis sativa
tggctgctcccatctctgctccgcccttttagccaccccagatttgcccccagtaccttgctgaaaaatcttgaatatatttcccacaccattctaatacatccccagctttaggaagataccctccatgtataaaattattccgaaccgaccaaaaatgccaagaaacaaccacaatgaactcgaaagaggaagaagaacaaaccttttagattgtaaattaaattcttcatctttgtttttgtcgggtgccagtttagtataactgtactatgagaaaaaataattatagggctatgaggaaaagtggaaaaaaagactaccttaaatgtttgctaaattatagatttaaaagtgttgtaacattaaattctaattataataataatatattataatttagttatttatataatcacaaatgtaaaaatttaggttatataaatttttattttcaacgtctatattttttattttcttaatttatatgcattaattcataaaaaaaaataatttaaaaataatcataagtattttaaaaagaatacaagtatataaaaaagtttaagttgttcaaaaaaaattgatgtgattttttaacaatgcacatttaaattataaaattaaaatttatatactttattattaataacatatccaataaacacatattaatatgctctattagctaatttaattctcttaaagtcaaaaattctaacatatgccaaacaactctaaattttaaactatgagatattgggttgtttatttttcaaactttcatatggagaaattttacttttagatttaggaattttattaaatgcacaacacacagttaataaaattctctccaccaatgagaagtcgtaccgaaattcaataaaatatcaacgacaaattcagtaagagttctattttttcttttagttttgtcattcatttcaggtgaataaggtgcagtcttatcgtgtatgattccatgtgagttataaaattcaacacaaacagtgaaatcatagttagtacctctatcgctacgcaacttcttgatctttctactaagttgattttcaatttcagccacaaatagctacaatatatcaagagcttcacttttatttttcattaaatacacaaaggtgaaataagaacaatcatcaataaaaataataaagtagtgtttaccattcc

SEQ ID NO: 35152 - DNA, 4647 bp, Cannabis sativa
ataacttttcaataatacttaatggaatagctatccgatgctaattaatgtggtggcacaataaataatattttattataattatttagtttgaaaaaatagttaaataggttagtagaagtttagtttcatagatatttttcaagttagatattttaatttttttagataatagaataaaaagaaaaaaaaaatagatatatatataatggaagaaatatcataaaacttgtattgggaagaataatttttttttttagaaatctaaagtgaagttataaaatatacaatgtcagatttgaagaagaatgacaaattaaaaatataatcaaaacaatatatagatgaaaaaattgaaaattagaaattttgtaaagaattcacaagtctataaaaaatttactatataaacagcgaaatatgtaaaaacttacaaccatacaacactaatttcggatgtaataaatattaaaatctaccaccaataaacaaaatattgaataaatcaattagttaatgaaaactatatgataaatctcccaacatagtcaacacatgcacataaaattatttttggcaatgaattcagcttattttgctacaacaataaacattatggattaatgttgaaaccccaaaacaaaaaataaaagaaaaacaaaatgaataataacaatattaccttctatatatatatatatattattttgaatggatttatgggaagagttaatgaggaaggaatgaaaaataaatagcaattaagtgtacgaaaatggttacataaatatatatatatatatatatatatgatttaatggtacagatatataggagagagaggtatatatatatatcaatatatatagtttaatgtacgttttaatttttattttttaataattagatatttaagtatttttatattttatagaaaatttattagaattagaaaaataataaaagattgatttattagtttatgctctaataaaatattaaaaaatgagagcaataaggagaaaatagatagatgtatttaagctaatttcaaagcgttccatcaccacctcatacttctcttttatttttattttttttggtgaaaaggaattttattagaaaaacaaaagaggagttacattagagttgtagccacagagggggctacatccctgagatgaccagagttacaggacaaagttcttctagcccaccccgcaagagtatcagctaccctattttcatctcgaggaataaaagagaaaattacatgatcaaagtacttacacaaggatagacaggattcataaacaggataagtaccccaggcgaacggtaaacttccacagctgagagctaaaaccgcagccttcgaatcagattgcaccagcaactttgtaacatttctcaatctcgcctgaacaagagccaagcgaatagcccgtagttccccctccaacaccccagaaacctcagagtaatccgtagccacccaccaatcctcaacaacctcatccgaaagctccaccactcctaaccccgccttcgagttcataacagaagcatcagtatgatacttaataaagtcctgatgggtaagtggttcagtgaccaaatctccctcggaatcgatcacctctaccgtggccatagagagaagcatctccgctgctctctctctgatttccttgatcatgatctgcaaattacagcagtcccccctaaagattatattattccttttacgccagacaatatcacacaaacatgcaatataagattgagcctcatcatccaataatttagaccaccaatgcccaaaatccattacagatgaccaattcaaggaatccgtgcgaaatccccacttacactgaaaccagagagctctggtaacattgcaggagcagaataaatgcaaggctgattcattctccaccccacaaaaaacacaggttttgtcctccatacgtagacggactttggtaggcagaatgttcgaccaaatcttccagagaagaagtttcaggcgaggatgtagggtcgacttccagaaatcaatccacatcctattttttttccttgaacctcagttgttgacttaaaccatacacgcttttcacagagaaagttcccgatttagaagctttccgaaagagaatgtccgaatccgtcaagagaggattaatttgcaagattgcagtcgccatttcagttctgaagctgcttctaatgatatcttcattccatcttctagtgccttccataaagagatcagaaacttgacaaaatctatgtcttctagagtattgaaaactttcctttatcttctccatcgactgtccaggaatccaaggagtatcccataattcagtatctcccttgccaatcagaattcctgccccatttttgcaaatagctctagcctcgaggattccttgccacactctcgagtccccagcctgcttatccaccttccaaatgtctaatcgagagcaatatttagattggagaatcttaacccagaacttatcttcttccttcatcatcatccagcacaatttagcaagaagtgctagattagtatccccaaatcttcttaagcccaggcctccacagttcttaggctggcaaatgtcattccagcttttgaaagctttgtatcgagacttgtgcgagtttcaaatccacaaaaatttcgccaccgatctgtcaagttcattgcacaaggtcaaaggcaccctggccgtggacataaaataagttgggatactctgcaaaaccgaacccacaagagtagtccttcccgcttgagagagacatttggccttccaaccttccagccgagccatgattttatctttgataaagtgaaaatcctttctcttgctagccgaaaagaaaaagggattccgaagatattttccttcgtggcttaagaaattcatatccagaatccgtttaacctccactttaatttccgaatgagtattgggggaaaaaaccagcccgctcttcctcttgtttaccaattgcccagaccatttttcataagtggtaatacattcggcaaaggtcttagcatttagggagttcgcattgcaaaagaaaatagcatcatctgcataaaaaaggtgcgaaattggcataacatttcgtgaaactttgattcccgagaactctcccctgttctcagccttggatattaatttagacaaaacctcgctccataagataaataggaaaggcgagaggggatcgccttgtcttagcccacgcttatgattgaagggagctaacggagccctgttgagcagaatggagtacgacaccgaggtaacacagctcatgattaaattgcaggccttagcacagaaaccatttgcttgcaatactcttagaaggaaactccattctagcctatcataagctttactcatatcggttttgatcgccatcacgccctgttttcctttcttattcttaaagttgtgaaggacctcttgagccaatattgaacattcagctatccaacggcccgggatgaaggccgattgagtaggagaaacaagtttattaataatgcctttaagcctatccgtgagaattcttgatatgattttgtagcaaaaattacaaagacttgtaggttgaaagtgatcaaacctacaagcattagtagttttcggaattaagcaaaggaaagtatgattcaagttactgcttacagtattttgggtgaaaaattcctggaccatcgcacaaacttgatctccaactatcctccaatactttctatagaagattccagagaagccgtctggccttggagatttcagcgggtgcatcgcgaaaaccacctattttatctcatctgctgaagggattttgcataaatcgtgattctcatcttttgtaacagtcggggtgaagagcgagtcaaaatcattgccaatcactggatcaatcgaggtgaatacttgggcaaaattcttttgaaagaactctccaatctcttcacggttgcggagccacctaccatcatcctcaatacttctcctttatatatatacataaatagataaatataaatatagatataggtatttttttttttatatataaattaccgtatttttaaaaataatcttatattttattcattattggttttatggggatagtttatagtttttgttttttagtttgtgccatttttttggctagtttataccattttgtttggtaatgttgtgttatattatttggctagtttgtagatttgttgttagcttgtttgcgcatggattcaacttcaaagagtgctattgtagattttcacaagtaaatgttaaagcttgctttttaattatattttattaattttgaaggagtttctttctatcattttatatcattaattattttcttatcatttatttgttaggcgccaattgagttttgttacattttttgaaaatagttaattttatttggaatttaatttatttagtttgattaatcccttaaatcttatgtatgatgtaagttatattgactagtatagttctaccttgaaagacttagctctaataataaaaaaactttaaagataatttttttcttgttataataataattaca

SEQ ID NO: 35153 - DNA, 2120 bp, Cannabis sativa
  modified_base (1088)..(1091): a, c, t, g, unknown or other
  modified_base (2086)..(2090): a, c, t, g, unknown or other
actgattgttatcatgatttctttgtttttatttatcatcgacatactatagatatagtgtcgatgatgcatcgacaaattatcgatatagtgtcaaaaaaaaaaacaaaaatatcaataatgcatcgaaataccatcgatcataaagataaaagaaataagtacatttcatcaaaaaaaaactaccgcaaaaatatcgataaattgtcaaaaagagtcatccccaacctttggatgttaatcgtcaaaaatccatcgacatataatcgaaaaatcattgataattcgtgaaaatccaattttgacgcaaaaactaaatcttgcaatttcaaagaaaaaacaacaaaataacatcaatgcagacaacaactacacaaatctaatgtaaatgaaatacataatattctaaatgtttaagtaaatgtttaaaaaatacttacaaattattgtggtgaaagtacggcatacttcgggtgtgattcgtggcgtgctccggtgtgagagacaaagagttgagaaattttgaaagagagagagagagttgattttgtttttctaaattaaacaacggtaaatggggagaatagaatataaaaagaaaagaatttttttttatataaattagtgtgacgtctaatttttgatatgaggtgtatttttaagaatgtaaaatgaaaatttcaaaagaaaaaataatattttatatttatttttaataagttattttatagtttgttatataaaaagagtattatgaaggtattagtattgttacgtggtggcgctttaaaaataattagcgatatttcaacaaaattattatatttaattatatgggacctatataaaactaatagcgatataatatatctgtatgtatttaaaaatttaaattcaatttattaaagtggtattgtatgatataatattatattgaacttatgtataatttattgtatttttatatagtgaaataaatatttgatattgaatgtacatataaagtatacaaatttcaatttaagttaaaatgtaacataatattatataaaaaatataaggagcatttggtaacacttttatttttnnnntttaaaaataaaaaacaaaagtaaaatttgagtttttaaaaatttatttttaaaaaataaaaatgtgttctataactacttttgtttttcaattttaaaaatagaaaataaaagtgtgttctataactttcttttatttaagtcaggtccaggtccgagtctatggccgggactgtggtccgagtccaggactaaggtcgggaccgaagtttaaaatattgattaagaaaaaaattgtttaaaaaaatgaaagtgatttttttttttttttaaatttagattcttaattaaaaaattgaataataaaaccacttttataaaacatgattttgaaaaatatttttataatataattttaaaaacaaaaaactgattaaaaaaatattaccaaacgcacccataatatataaaacaatttaataaaatataatctaatattgtgtacactatatcaaataaatacttaaaatattacatagattagtattatttaactagtatttatatatatcaaggctagttattattattttgatggattatttagaaggattagtgtgaacttagaaatccaaaagactccaagatagttaaaactttttcctgtgctccctccaaaaatcaatgacctaattggaaaatctggtgaagaattaagttttagcaaaaaaaaaatgaaggctttaatgaagaatattaatgacaacattgtcttaattgtaataatatataaatatatagggaaggaagatattataatagttacattaaatatgtaattacggtggttatatctattttagttgttcgattattattaaacagttatgattaatttaaaaattaaataaaaataattcataaattacctgtaatctaacttgattttatttattttcttaaaaaatatttataaacattagatgcggaaaatatcttattaaatattttaggagttttttcatctttacacattaaaatagtttttttttttnnnnnttttttttttgtttttttttaaaattttaa

SEQ ID NO: 35154 - DNA, 3506 bp, Cannabis sativa
gttgacgaacaatcaaaattactactagtcatgcatgagttgatttggatattagtaatgagatgattgaaatgagcacacacacaaaaattaaagaaaagttattatcctacattgaaattctaaagagtgtagagttaaaaatctttatagtattatctgtttgagtaatttttgagactaaatttactgttggcaaagccattgtttgattttttttctatgttgagtcatttacttgtgtatttagtttagtcagtgttttgctaagtgactagtaaaatctaagtgtgagggaatttgataagagccttttaggctttaaaattgttgattttttcatagttagaggatgttgtttcttggtaatctaagtatttttcatcgttttcggaattattcgagttttggaagaaaattaatttttatgagtaaaaattaatgtatttagtatttttgaggctaggtaatcttagcagatgaaatgacgtgccaaaataatattttcctagagttttagaagtccatgaagaaacaaaacccgtggggtgttgctacagcgaaggttgaaggctcgccgctgcgagcaaaaagaaaaaaataaagagccaggtgttgtcagtgtggccacgggcgctactcgccgcggcgaggacactgttgtcgcggtgaagggcattgctcgccgcgacaagaaggcagttactgggcaatttgaattttatctttttttaagagagatatctcttttttttagtgagacatttttcaagcattataaataagacttttagggtacaaattttagaattttttagctacgaaattgagagagaaactcagagaaagagcaaggaaaagacgaagattgcaactttgagtgttcttcaacatagctctttttcttctccttaaactcttactatttattatgattttgattataatatctagttttgagtagttttcttttagctaaaagttatttcaaaacccgaaacatgagttttaaatttcatcgatgaatgttaatttctagtttctattatataaaattgcttctattcttctatgtttaatattatgattattattttaatcttgtttagatgatcactaaattaagttttactttaatctattatcatattaggattactattcgcctaataattttggattccaagtgtttgtaataaattgaaatttttaatattgtcaaaggtatttttaaatgtgatgaagaatataacctaggttaaatgaattatatactttattaatttgttgtctagattagtctatctccataagtcttaaagttttatctaagttagataaattgtatgcttcatggatttactacttaggtaaaagagttaattattgagctcttcgccttgattacatgtaataggaagattgagataatttaaatgcttcaattttatctatgggattaatagtttgattggaaaactgaaattacattcattaataggagttaagaataattattgaggatggacaataacctttaactatttatctcatatcgtatcacatttaattcgtatttatttttatttatgttattttattctcatcatcgaaatcccaatttttaattattgtcactaatttttgaataattgaataaacataatacttgtgggatcgacccttatatttatactaaaataattaaaagtattggaatcaaaataatagtaaagctgatacaacatatgacacgcatcaataaacctattgaatgtctatacaaagaaagaaataaaactagaaatccctaatgtctcattctctctttctctttcttattcatttttaaatggccttttctatggtggattcgaaatttatctcttcctttttcatagacttcagccataaatgtgctcttagtgattcaagaaattgaccacactagtcataagtgatacctagagtattaaggaagtctgtaatgaaaattagttagtcagagaaaataataagatcaaggttgatcacttgataatacattactacgttaagtgatcaaatgttagatagattgaatggaatgagttattattctgctgcgtgatcgttgttagtatactcaaacttaaagtgtttatattctgtttttaaaaaagcatgttccaggttattagataattatattaattatcaacatacgcgatattaaatgtaaaattgataaaataagtttcaacaactgatattagagctactagtaatgtttacttttatgcatgaatatgtttaaatcaaatttacatctttgtatgtgatttggatggggttcatgttttttttttttttacaatttggtaaatttttggtaattgatatatgtttatatgataaaatatttttgtaaggcgtgttttatgcttgaaaatattttaaaaactattttggttgaaatttgcacaaaaataattttttgggatcaattacgagtcaaaaagtggtgttgaacacttttagggggtgctggatgtacccggcgcacaaggatgtctattagaattttatgtcttaaataaaactaaattttaatatactcttatttactaaactactaatactagaaaaaatacaccataaaatcttgagaaattattttacaatagatacaataatatcaatttttcatttaaaaatttgatcgctgagagatttaacaataattttggagtctctatacattcacaaaagtaattctttaaatttttttgacatgatatcaagtgcatctataaaataagagtattgctattggacaccagtgatgcccagtactttttataggtgtcactctataattgcttagcgatatttcctaaaacttaatttttttaagttatatggacttcctatttaattacatcaatagtgatatgacactcaggagagtgttagcaccatagtgctttttagcaattctcataaaataattatgcatagaattatttaataaataaactcttcttgagaaacaatgcattaattaataaaagaaaattaattagagaatataaatcatttttaaaggaatataaatcatttttaatgctactttggaaaatagtttttaaacaccttaaagtgttatgcatagaatcatttaatagacaaactatttttgaaaaacactgcattaattaataaaagaaaatttagcaaatgatataatctcgtgttttatataggagaatttacaaaaatattaaaatttaggttaatttttacaaaaatattgttccacgaattttttcaaaaatactatctttttaccataaaacaacaaaataaaacaattaaaaataacagtggaccaattaaaaaacaaacgtggaacaatattaaaagcttaacacaatacacaaaaaatacacaatatttttgaaaaaaatatatataataatttttttaaaaaattctatcctacaataaaaaaaaaaaaaaaatca

SEQ ID NO: 35155 - DNA, 1455 bp, Cannabis sativa
ctaaagggagaccaacagtctgcttggaaatgctacaacattactctttctaaagaaaaaaaggaagacctactcaccaagagctcgaacagcgagtccgaccaagggtattgaggattcactcaaggcaaggagacaaatatagatcctgttaaactctagcttgcatctctacaaatctttgctcccagccctgaggagcctgtggtggattttcaaaaccacctctaaaaaacctaccacgacctctgttgcgaccatggggatgaagaggatttagatctccccgcctgccaccagtctcaaccatattgccctgacctctagtgttttgacatgtatccattctataggatatatttgtgaaatcacaagtcaggtcaatcaagcagcgatcaaaattgtaaattaattactgcaaacatgggaaacttaacatgctcttaatttgctatcaagctactaccatgcctcttatcatacttttctaattatgcataataaatttaaactactaagagcatgcaaagggcttattgaaccgtgagtcgagcttatctctgatgacgattgtacatatcacgctgatctttagaagacaacctggcgactctgataccaaattataatgccctactagtttaggcgcgctacaatgcttacttaattactgtgcactcctttgctaattaaagggtttatcaaaaaattatgaataattaaaactttcataaataaacttaaataaatatatacaaatagatattttaggatcttgtttaaaagtttacaactatttataaaacatgtttactacaaaagttgttgcctagcgtttaccaaaataaaggcccaattgtattaaagatttgaacactccaggtctaaccacctcaatatgtacaatcttcatttagcttcagactcactggtgctcagcctttgcttttctcttacctacacatgtaaacatatctgtgagtcgatagactcagtaagaaaaacataaatataaacatgtaacttaactgtaaccaggcacccatacacctaactgcagtcctttctcggtactctagctgatattctcagtaccctagctaatacacttggtactctagcaaatgttctcggtaccctggctaatatacttggtactcaggctgatatactcggtactctggccgataaactaacatgttggctatacatgtatgcatgcatatctttatacaaatcttacctcaattttaaattcaagtgtgccagtcaatctataagtgaaaactgctgctcaacgatttaaggttctaaatcacattttatgtaaaactaataagtgactcactaaatcacttccagtgactttgaactcaaaactaaaagtttctctattgatagatagcatgccagtaccctaaatatcaatacaacaccaaaaataatactttggga

SEQ ID NO: 35156 - DNA, 1570 bp, Cannabis sativa
attatttaattaaaataatatttttagagtaactaaaaatactaaggataagtaatgtcttataaaaaccaaacatatcataaaatgtctaataaaacaaaaacataacatcaaatgtctcataaaactcaaacgtaagtaaatataattttgtttctagaactagaatcatattctattatcctagaacaaatttcagcaataatgacatgatgatttagaaatcactaaattcttgagaaattgttgccctccttatcatcatcatcactactactacccccatcgtgatcatgaatatcctcccattcatcttcatcaacctctaccaagcgctttcgttttcctaagaaaaaataattacaaactaataatcaataattgattaacataatgcaatatgtaaattaaaacaagaattagagtttacgaacccccttttaaacttctttctgactggtttgaattgtcagtgaaatgagtccattccaattctccaagttgggtatccttattccttggccttgtcccattttcatcttcactttcactaacaagccattcatcattagatggcaactcatcgatcgatcatcgatcatttgattgagttgctgaattcatcttcaaaaatctgtgtttcaatcttttgtttcacattctgtatgctaatgaatgcattcttaaggtagtcaaccgatttcttttttttttttttatgaatatgattgaaagtactccaattctgctcgcatcctgatgccaagcaagtaagacccaatactttgatggcaaatttttcgtaactctagcgtttgatctccatattgagtccaccattccactaaaagaaagaataattacttatctttattattcatactactatacattttaaaaaaatattagaaatagatttagacatttaattacctgctgatcgtttttgaaatgtttgttgagctaaggtgagtccaaagaacccttccttgttgtaaaaattgctacattgaaggtcagctttcattctctcttcagggtccggtataaatctgtccatacaatgaaataaacccaacttgatctctcggtggttagaaaatccttgtgaataatgacaacggggattcaaaatgtacgcaacggcatgcaaatggctatgcaattgaaattccaatttcttatttatgatttccaatatctctttgtcatccttttttttctccacccaaagttattgctatttttcttttgttgtatccatagcattgtacatataacccatagttggctctatatcaccatcaactagcctcaacacttcaaccaaaggttttgtggtcgtaatggcataagatacactcgcccaaaaatatgtgtctttcaaaatcttgtgtcttgcctcctttccatcagctttagatgcccaaggacaagttgcccactcttcagaagtaaacatagcttccaaaggttgcttcacttgatatatgcgttgcaatgtaagaaatgcagttacaaatctagtggcagcaggtcttataatatctcttttgcaatatttccttgt

SEQ ID NO: 35157 - DNA, 1848 bp, Cannabis sativa
aattaataaactcttatgctataattttgacataggtgaaattgtgttttgcatttattttttttattattctaaatgaaaaatttttgcttaacagattcgaaagctcataacatcaatgctgcaagattaagcagagaaaatgggaatttccattgtgatcaagacaattctgtacaagcatatggttcatgtgaaaagtggaagaaagttacagcaccatgggggacttccttaacccaacctaacagaattgatcagccatggaatagtaatgtgtggacatctagacgtgctgcttcgagccataatatttcccgggctgatgttagtaacaattggcggcgcggttcatggaaaaccaatgattacagctcaatgcaagccaaggagaaaaaccaaagttttcatcatagttaacaatatttatagtcaatattttgtaagcaaatggtgtgttttttgaacaaagcaaatgtgtgctttagagaagtaaactttcgtacgtttttcttttgcattgtgtctaacaatagttgaaagtggaatatattgactgatttatgtcctgattagatgtgaaatgatagaaatttctcaaacatcttcttggtattttatccattattttcactttgaagaaataagactcatttaatcaatggtatttgttcggttgttctacattgctcataagtattttgtgatgtttatattataaagttgggatttagacttgataggaatgagaatgttaaacttaacacatattttggtaaattaaaattttaatgatgaagaggtttatctttttacgtgggtctcaattcaatctaatgcgtaaagtgtgaatatttttttgcgaattagattgattgaaaaatttaaaatctctacctgtatagatttgatgttgatttacatgtgaaaattactaatcaaatttaattcacacatatttatataaattttaaaaaattatacctgtaattaatattttaaagtaaaaagaaaataataattcaatttctaatactaacgatacgaccgtttcaaaaaaaaaataatactaacgatacgactattaagatattaaaaataaaaaaaaaataatttaaaataaaatcaaacatttttctctacatacattatttttttcttaagatttgttatttttttatttattttaatttgtcattagagatatatgaacaagaataatttaacaaatattaataatttaataatataataatttgttgttaattagtaatgtaaaaaaacatattttaataaatattaataaaaaataacatatcaatttaatttgcactattgcaaattgaattgtatttaatttgaattatttgtgctgatctaattggatccaaaatatgaaattcacacttatactgtgaataaaataatacggattggattggatgaacacctccaaaattaacaagtagtaaaatttgaaatcttataactaataatttagaaaaataaaatatttattgaaacaattaaatatttcttacacataatatctatataaaataattcaaacatagtttcaatttcaaaatttaatttctctaaaatccttataagttaagaatgaaatcttattgaaggattaaaaaaatatagttgatcctattataattgacttttttttttttaaaacaaatgaacaaataaaaaagagtttaccaataagattaaacatctcaagataaataaaattctcaagatcacctcaagtccattcaactaatattttaatattttttaaggctctaagatcctaagtgatcaatttgccttgagtcatcattttattta

SEQ ID NO: 35158 - DNA, 3402 bp, Cannabis sativa
  modified_base (27)..(30): a, c, t, g, unknown or other
tgatattaagaatattaaattttaaannnnataaataaatgtaatgcatatgggccctccacgtgtccatatttatgagttaacataagtagtattaatgaatgtaaaagaattgtaacattgagtatttttgcctccaaaaataaaaataaggtatttaagtgtataaaatctaaaacattaggtatttatgccacaatttacccttatctttttaaaaaaattcaactgttattataaattacaaatcgtttacaacaatagaaaaataagaagaggaatttctcctatccaagaggtatctctatccaactctagcgcatgttttgctaacccatgggcggcaagattaacatttctcccgtacatgagaaataggaatactagataaagaggataaatacaacgaacatctataatcaaatccaagaaacaagataagtcatgagatgtagtgttcaaggctgtaaacttacagagataaaagcagagagttctatgagaacaacactgagaatttgagcaaatgaatacttgaccttacaacagatcaagacctttatttatataaggaaagtacaggctggaacaaaacaatacagagagaatacagagggtttgttacaaaacaaaatattaactaattattgacagatttaactaactaattttaactaatgttatcagcccccctcaaacgaaatggggtggaaacaactttgagtttggatttgagatagttgaatctgtcagttggcagcggcttggtgagaatgtcagcagtttgatccaccgacgaaacataacgaacagataattccttggccaatatttgatctctgacaaagtgcatatcgatctcaatatgcttgcatcgagcatgaaaaacggggttagctgcaagggcagccgcactttgattatcgacccacaagataggagatgttgtaagtggttgttgaagctcttgcaggagggagcgtagccaacgaatctctgaggcagcatttgcaagagcccaaaactcactttcggtgctagaacgggcaacaactgcttgctttttggcagaccatgagaccaagatgtcaccaagaaatattgcataaccgccagtagaacgacgatcatcggggcaactggcccagtcagcatcagagtagccatggagagacaaattgagggcaggtttgataagtagtccctccaagatggtgcctttgagatatcagagtaaaggcttagttgcctcccagtgaagtgtagtaggtgcgtggaaacattggctgagtttttttattatatatgcaacttcagggcgagtaagggtgaggtactgaagggcccctactatgcttcggtacagatgcacatcatccataggagttccatttgttaaggataatttcgaagtagaacttgtaggacttgaacatggcttggcaccatcgaggtgtaatttgaccaacatattagttatatacttggtttgagagaggtacatccccactttgtttctgtgtacttcgataccgagaaagtaatggatgtttcccatgtctttgagagaaaaattggaattcagatcacctataagcttggtaataagtgttgagttaggacctgtgattaagaaatcgtcaacatataccaaaagatagatgattgtggatctttgcccaaagataaagagagaagcattagattttgcttgctgaaaaccccatgagaaaagtgtttgtttgagtttatcgttccacgcacgtggagcttgtttgagtccgtagatggccttatgtagtttacacacatgagttggtttgtgaggatcaacaaagcccggaggttgttgcatatagacatcttcattgagggtaccatttaagaaagcgttgctgacatctaattgtttaacaaaccattcgaatgagacagaaagtataagaacagcccgtacagtcgccggtttgacaacgggactaaaggtgtcttcataattgatgtccggtgtttgaggaaaacctttagctactagacgagatttgcatttgtcgagagtaccatcagcctttagttttaccctatgaacccatttattagtaagattttgcatatcagatgtctttggaactaaactcctagtatttaactttttcagcataaagatttcatcatttattgaggcattccatcttggatccttgagggcagctttaagagataatggttcagtaggcaaaagagattcagggagagggtgtcgtgttgccatgtatgcctttggtttataaatccctctttgtgatctagtaaccattggatgagtcctttgtacagcagaaacttggtcagtggatgtagacagtgatggagttgctgaagtatccataggagtagattcagtttgttcattggacacgacaaatgtgggaatgacaggagacaccacagtagcaggttcaggttcaattggggctgcttcagtaaagaattgagcacttggaagagtagaggctgtgttcggctgctgttgttgctggtgtgatgccgaaggtggaaaattatattgaggctcattgaagatgacatgtcgggcaatatatattcttccttgaagattttggcatatatatcctttgtgatttggcgaatagcccagaaaacgacatggttgagatctgaaactcattttatgtgtgttgtatggtctcaagtatggataacagatgcagccaaatggttttaagtacttgtaatctggttcatgaccaaaaagacattggtaagggctgatgtgattgagaacctttgttggcaatctgtttatggtgtaaaccctgcattgaaaggcatgccaccaaaaagataaatctagtccagcttgtgcgagtaatgttaatcctgtttcaattatgtgacgatgcttcctttcggcctaccattttgctcatgtgtatgtggacatggatgtataaactgaattccctgtgcctgcaaaaaaggttcaaacactctatattctcctccccagtcagattggacagctttaataggtaaagagaactgtttctcaacaaggcatttaaacttaataaaaacatcatatgattgagattttaatgtaatgggaaaaatccaagtaaatcgactataatcatcaataaaatagacatagtatcgaaagccatcaagtgaaggtgtatgggaaggaccccacacatctgtatgtagtaattcaagaggttttgaggcacgggttgaagataaaggaaaggctagtttatgactctttcctttttgacaagcatcacaaaattttagattttttaaagaacatggaatagctaaagaggagagaattcgcttaagtgtttgtggtgatggtgttggaatttattttac

SEQ ID NO: 35159 - DNA, 1607 bp, Cannabis sativa
gatttgtccccctctccaccaccctaaaaaatatatgtaataaataaataatctgaagccctacatatataaataaatatttcccaccttcatcttgtcaaatttttcccatctttactatggtaataattaatttttagtcaaataataatttataaccattattaaaatatgatatagtagagtagattattgattatatatatgtttttattattgaatattgattatatatattcacttggtttttgttacaagagaggaatacatttttgttactttaaaataaaaacaatctatagaattaattaaataaaatggattagaaaatttcaaagtgtgtatttgattttctcgtaattattttacttgtcgtgcgctcatatgggccagctgatcatatcaatatatatgtacctacttaaaatttatattaataaagaaataatggaatataatatatataccaacaaacacttcaatttttatatatatataactagaaataatcacctattatctgtaatattaaaaaaaattaatccagcaaaaagaaaaagacaatttattttatatatcactgcaaaattctttatttttagtcacaataaaattttgtgactaaaaataaaaaaatcgtaattaattataaattagtattttttattttgactaaaagatctataactaaaagtattagtcaaaaattacaatttattatgactaaatatacttttagatacaatacttgttgtgactaaaagtaaattaatgataacttgtatctaaaaattatgttttagtcacaaaaaacttatgttgtggctaaaagtttatcattaaagtaactattttttgtagtgtatacacaacacataaacctaatatatatatactagaatattgttacgtaaatccacgtgtacttataatatttttaatttttatttatgtgtattttaaaattttatagattaaagaaaatcactttttaatttttttttaaaaaaataatatttaaagtttataaaaattttaaaaaaataaatataaaatttaaaaataataaaattgagcatactcttaatattaaaaatatcaataaaaaaaataataatgttacaaatagtatagtaatatttatatatatttaaattaatttaaaattggttataccaattataatcatctaaaacaaataataataatattattattatttttatatatttataaaactaactctactaaaatcattaaattttataataaaatattttatattcttaaaatattttattaaatcaataaatttttttaaataataatattttatatttgtggattttcttatgtgcattaatgtattttgtttatatctctataactattaaattatgttgttaattatggagaactaactaagtatatatcaaactatagtatatatgaccatcaataaaatttaagtacataatagaaaacaaaatttactccctatatatatatcatgtatatttatatgaataaaattcaaagttgatataataatttcttattaccatcattgatatattgactgtatatatatatatgtggggcaaact

SEQ ID NO: 35160 - DNA, 1419 bp, Cannabis sativa
gatactatgttagtttattaaaaaaaaggccataattaatttttttattttaattatttattttttaatttttttatagagtattgctaagaagcactaagacaccaacataaaatcgtgtcctataattagatagcaataatttataatatttgttaaagtaaaataaatgagacttaatattaaattacaccttagattatttttaatgaaagatataaaagttgagctataattagtacaaaaaatagttttgtaatatttttacattaagtttattattgtactccaatacataattgtaaatcttgatgtaaaattaaacatatcattttatgctcatgtaataatttattaaaaatataaataataataatacaaaagtaaaaatataacataataataatgcaaaagtaaaatatatatatattaaaaaaaaaggaagtaaaatgttctgatggaaattgatagtttggtttgtgttcaggctatctagagtgagttgcatatgcagcttgagtttggttcattggttaatgattgtagaattgctttatcttctttgagtcatgttactattcagtttgttgaacgatctgtgaacaaaaccgcctattttttagcgcgtagctcttgttttttcccaagtcgtacttttcaagatgatcagttaagtcttgaattgcgtaatattgtacagctggttattttgccggttaatgaaagtttacttttattcaaaaaaaaaaaataataatgcaaaagtaaatataaaatttaataataataatgcaagtcatttaatataaatgagcatgttaactaaaatgtaataataaatattaaaaatgataatagtaaatataaatacataacattaacatttagtgtgatgcatattttgcgtcatactgatttgaattattttttattatctgacaaatttacatcataacttaatatatcattaaagtagattatttacgaaattaattatattttatatttgtattatttatttgtcttcttataagaatgctaaccaccataagtaaagcaccatgagtggggtttgttctcttttatatgtttgaggaattgtttttgttttgttgttaatattaattatatcttaaatggaatcctaattaattatagatatccgacgaaaaagaaatataggaatgtataacatgagcaccgcgtgcagcgcagtacccattagacggcaactattgtcttatctcttctttttcctaagttcctcattgtttttttcgtacataatgaagttaaaggcgtgattcactatatatttaatattaatacacccattctaaaaattaagaaacaaaaagactacgttatattttttgaggattgctattaagtactagtggtgtctagcaccttttcgac

SEQ ID NO: 35161 - DNA, 1210 bp, Cannabis sativa
ttttagacctagtatttttttttttggatcggattggatccattcaatattttaagtccaatatatattggattagattggatccatccaatccaaaaattttaatattaatttttatatatacgtgtatattttacgtaaaaccatataaaatctaattactcatcctaactaaaaaaaaatactaattagttcgattggatgttggatgttagatgttggatgtattggatttttggacaccccatccaatatccgatccgatccaattggatattcaaaaataacatccaatttgatccaatcacaattggatatccgatgtttggcagtcggttatattagattggatgatttatgcacaccctagtctctgtctagacttagggtttctctctctaaaattctatgttatcattttctggcgcctaaaaaaggtatttgtaggatgaataatgttagacacattctttcaaattgggcaaaatttaaaattttcaattttaatgtttacacagaattattactcttgtcaattgttgatattcagaatcataatcattttcttttgttcttcctaaatttgatagataaataatacgtgattgtggaacactcatcgttaagctcaacttgggttaagtgaaagagctctggaaacttcctaggggtatctcccttctcgtctggttcaatctccagtttttagttccttcttcatcttccccattagttttcttttcttttctttccttttctttccccttgcatttattgttgatgttttatctcatcattacctcactatgctatcaaccatttattgtcgatctgagaggcaaagaggatcttttggatttgcatttaattttggttgctaatcctcttttctcgagttccatttattgctgcaggtcctaatctttggctaacattttccctattatcccatcacccatttattgcccgtcgttccttcttcttttgggtccttctgcagcacacgatcttccttccaggtgcagagctagggataggctccccctttcaggcttctctagcttcgaggtgaagcctttctcctccaggtattttacttcttttgtctatttaaggtttcttctttatgagatttctgccatacccttttattctctgctttcccttttcttctacatagccctctttacctaccaacccttagccatgg

SEQ ID NO: 35162 - DNA, 1019 bp, Cannabis sativa
tataaaactgcatttttgtaatttttttgttatttttgtgtatctataaaataatccctaaaaaatgtatgatattttttaaaaaattaaaaatgttacggttaaactaaaattataaatcacagtaaattttgattattatttatatttgtttttataaatagcacttaaattcaacattttttaataaaaaataatatttttttattgaataatatatataactaattataaaactaaaaaaatatataattaaaataaaaattaaaaatataattaaatacatataatattaacttaatatatatactagtgacaactaaacgtgcattgcactagaagtatgtattatgcaatcaaacttatgttacaactgtaaaaagaatttcattatattagttttaaagtaagtaaaattcaaacatgcacttataaaattagtacaaaacataattatatagttttatctcaaggagattattagtttcattaagttatattataattggtgcatttgaaatatatcacatactatagtagataatttgatatatatagctaattaaaataattaaattaagtaatttttttcactcacaacaattgttatctatgcctcactttttgtctctcatattttcatcaattcaatgcctaacccacaccacgctctggctcacccctagtattgatttaagttatgcccattggacagtgccaacatctttgagcatgactcaatgtataaatattttgttttgtgtaactatcattggcacaattgataaaaattggcatgtgtgaatgagcacttatccattgtgaatggatgatgcttttttttttccttctgtgagaggatataattctttaaaatatgtttagcagtataaatttgtgttatatttaactttttaattaagtatagtctttaagatataacaatttaaacccacaaagtaaaaaaaaaaaaaaaaaaaaacaatagcatccatatattagataaaatatacatgcat

SEQ ID NO: 35163 - DNA, 1140 bp, Cannabis sativa
atttaaaatacgtatggcaatgaaatttattttttattgtatatataaaatacgtatatatatataatcatatctaaagattagctgcaataattaaaaaaattctcaaagaacaaaatctcaaatcctatttcaaaaattaaaaaaaaaaatacactaccttaaaaaaattgaacatacatgtattgtactttataatatcacttaattaaaaaaaaactaattatacacgtgcattgcacataacatcaacgtagtatataaatatattcctatacctatttatgtaattgtttctaatatatatatttttatatatgtacacacatgcatattgtatattataaaaaaaaaaatcttattttgtgactagaaataaaaaaaaaaattgtgactaactaattaataaaaaatgaatataatttttttagttaaatttacatgataattattgcactaattaaatggttagtagtgcaattacataccttacatataatagttgagcgctcaaactacgaagttgaatgaacttaattactgtaaaaaaatttattgttgtgctttctgagcggtggatgaaacaaaatataggtattcttaaagttaattaattgtgatgttacaatctttttcatctaattttattttagttttttgtcaaacgattcaggaattagacagtttattttttattttttaattctaatagtcgtgtctccaataaggagatgtcccaattaaattctaagttattatttttattgattgttattaataaaattctactatttattcaaaaaaaattataaaaaatatgaaaacatatatggattaatatatatacgacaattaaattgaataatatattatgctttaatataataaaaaaaataataaaataaaaatatctcaataataataagaaatatttatgtgaagtaatattttaaattaattatttagttaatttaatataaatattattttactataattttagtataaatatttttaataatttaaagagaattaatatactatataggttattaaatttgtattaaaattaaattatatattatttaatcaatatcattttaaaaatttaattaggtatactcaaaattatacattttc

SEQ ID NO: 35164 - DNA, 1303 bp, Cannabis sativa
  modified_base (921)..(928): a, c, t, g, unknown or other
gcgagctgggatttagaaccactcgagccatttgatataatcaagattacaggctgtagggattttagcggatactacggtccttctatcccctcttctagtgatagctcgccttcaagtagttttggtaaatttattaggtggaaaattacactccacacttccctttcatttgcctttaaataatttttatattttatcttgtctcgtagatatgcatttcgaggatgtcatggaacggaaagggaagaaaaggggaaccaactcaggggctcctgctgatacggaggtggagccttctaaaaggccaaagaaaaccaccgcccacaaaaagaagaaaatatctaagcctatcgacctcgaggtctctgatactgagacccatgaacatactcctcctccggtcgatcccaacaccaaagcacctcctcctaacacaactcatgcctctgcttcctcgagccagacaattgaaacattatctgtcgcatcggggaagactggttcataatttgcccaggtgtttgggactgcctgttggcgccaactcaaggctctcctcccccacgattgggatctaatcaatcgtggcaatccagaagaaatgcttttgaggagcttgtatcatgcccacatggtaagtatactgtattaatccatatatttcttctttctttttcctccctatttcttatgttcatttgctcgtaattctctagacttttttcctctctttttcctcccatcagcaaatcctggagcagctcaaatacttggagagcgagatctaaaagtcactagcccaacgcgaggccatgattaaacaatggaacgacgctcagcaggaaatcacccgtctcaaacaagaagtcgagaggtcgaagaaaagccttgaagaagccgagaagaccatcaaggccnnnnnnnntgaatttgagaagaagctcgctgagaaggaagtcaaaaccacagaaggatgcaacaaggttgtcctttgtattgtatatggagcctggatggcgaatacgaacatggacacaagcttcatggaggagaaggaagaggaaactctggctttctggaagaagtccatgaaagaggaggaagaggtcgaggcagaagaagaagaagaatatctatccaagtcgcccaccatgtaaacttggttcttatttatctcccttttgtttttttttttgaaaatggccctttggcttagacaacagttttccccttgtggcactttttgtaaacacaaatttgcgtagttggatggccaacttttaatgcctcatacttttaa

SEQ ID NO: 35165 - DNA, 1415 bp, Cannabis sativa
tttattggtctggtttggtttctaatattcgaaaaactgttatactagtttggttcaaaaataataaaaattcggaccaaaccaatccgtgaacacccctaaggaatagggatctcttctatcttaaaaagtgtattgtctatcagtaaagtatgtttagtcaatttatgagtcataacgttaaaattacgattattatgagagagaacagtctcagaataattagataacaagattttaatatctaaagaaaaacacttataggtcattaatatacatagagtgattacttagagctaacacgagagacaaaaaaagaaaattggagaaaaaactttgacttgcaatccaatatctcgtgcctatcttaatcctatcaaatgcaagagcttcttcttgaaaaggagataaagtacctaaaacacaacaagctctatctgcattcaaactataaaataagagcacataaaatagtaacaaaatctaaccaaagttctagttgaacctacatctcaggtcagttgcatcgagttggttggggaccggagataattgtgtctccaacaaactttgtgcaaccatttagtttgggatgtttggttcaaaatgaatcatatatctatttatagagaaggttattaaatatgtaattatgatggttacatttatttttagtcgtttgatcattattaatgtaacctgatactaacctgatttgatttattttttcaaaataataaaatatataaatataaatttataaaaaagttttatgaaatattttaattaaaagaattaatttatttaagtatataattgatttaagtctaaacataaaaatttaacatgttagaacatctctaatagagatgtaaataagtagtgaaaagctaaaatatagtttatttaacaaaaaaatatgctctaatagtgtgccaaaaagtgatgtaaatttagcacatagcaaattttgtgccaaatttgacacaacatttactatgatgtaaaatttacaccacaataaatgcattactttttcatttatatttatgtcatttcgattatttggttagtatatttaactatcacattaaattataaaatatttatattatttttttattatcttacatattaaaataataataaattttcttaataaacaattaattagatattaaattttacatcaaaattttataaatgtgcattggagtacaaagttaaaatttgttatgaatttactataaaactactttttgtgttaaatatagcacaatttttatatctcccattgaagataatcttagtgacctgttattgcaagtcataaaaaaaaatgtaactattataattacatttctattgtaactattaaatactcgcccatctatctatatatatatactaggtga

SEQ ID NO: 35166 - DNA, 1004 bp, Cannabis sativa
aaaaaaaaaaaaacaacattaaaaattaaatgaattgataagaaaagaaagttaatacaaaatatttgaaaatctttatctataaatatatatattttagaagacataattatacaaaaatttataatccatatttatgaaacaaattgtcaaactaacaatatgaaatactaaaatttataaaataatctcatttgtacagtgtaaaatctataatcgttttaagatcataatagtcatttatggccacacattgtaattgatgctcgtttatgcgaccaagattattttgctaataattttattgtaaagttattttggtaataaatttttcataaatgatattttggcaacatctcacaaaattttaacttaaaatgcgtagcccaacattcgctgcggcatgatcctcattggcacttaatggcccaaatctaatgaactaacaacaatgttgcatattatatagaataattacataaaatattaatttttgtaaaataatttaccttttcacatttgaagttttttatttttacattattttatataaacacaagaaaataaaaaaaaaatacatgaaaataacaagaaaacaacatcaaaacaacatataaaaataatatacaaattataaaaataaacaaaataactaaaatacaacataagaatatatatatatatatattaggttgatgttatgtgtaatgcacgtatcattagttttcttcttaattatgtttaattaggtgatgttaagtgcaatacatgtatatttaatattttttaattaggtacgtaatgtattttttttttaatttttgaaatgaggtttgaatgaggtttgagattttaatctttgattgttttttattttaattcaaagttaaactaacaaaattaaaaatttcgttaaagctatctacaatattttaagtattttaaattaaaattaaaattttcttatataaaatatttacattatttttatttttaaatatata

SEQ ID NO: 35167 - DNA, 1648 bp, Cannabis sativa
tgttagaatgtacatggttgattaaatgtaatgcattttttggtttctcaaaagaaaagaaaaaatgctctcttgaatacagataagaaatatattaaaataaatcttttagtaattagagcttgtttagtacataattgtattgtaatagtattatttaatataatactatgtatggtattaacttgtattaataagttatgtaaaattataatatctttacaataaactcgactctaaccttgaccctaatctagacttgaaccccgacttagatctgatcccagacctataccgagatctagatcaggattcgagagttggactcaaaaccgggtcctgaacccttgacccggaccttggacccagacccaggactaagatcgagactcaggtgtggcgggcccgaggttcaaagttcgagattggagtccagatcctgatctagggttctagtctaaggtttgaggtcaggattaaccacagactctttgtaaatattataatacaagctaatacaggtcatttattatgtattaaataatacgattcatgttgtattaaaatataaggtggtaataattaatacaatataatattttatttaaatatagtattgtttattatttaatataatacaatctttatccgacataccttcagatatattagaatatactacataaataattaaattcaatttttttcaagctaaagaaaatagtgagaccttttcactttaataatttagagtgaaatgtgtataaaaacttgtatattattgacaatgcaagggacttttcgccatccaagtcataagtggaaaacattaaagcctttttgaaaaaaataacatctattttcttttttgttcatttttttccatcaaaaaagtaatttttcttacttttctataatttctaattaataattttattccagctatatacatagattctactttgatttttaaaaaagtataaagactgtagtctttgaaaatggataataataatatactttaatataagaaggtaatgattataaagcataattttacattatatatggttgtgattgacactcatatattatatcataacttataggcatataaatcatatctatgagtaaatattatatggtttgtactatgatatatataaaattaattaagagtaagaaaatattaattatttttaagaaatattaaaggtttgcttggtacctcatattgtattatattgtgttggattgtattgtattaatattaattaatacaatactatatttagtattaacttttattaataggttgtatatattttcaataaactcgaccccagcattgactatgggctgagtttggggtttagtctgggtttcaggtctaggtccgagtctcgagtatctagtctgcgtccgtgtctgtggtctacattcgggtcctaagtctcgggtctcgggttcgggtcgtgtctcaagtccgggtccaggtccgtgttctaggtccagattcgggtccggggtctgagtctgggtttgggatccaggccggggttcgggtttcaagtccgagctgcgggctctagtgctagtcctggtttgggtacagtctgagtctcgggtctaggttgggtcccgagtc

SEQ ID NO: 35168 - DNA, 3318 bp, Cannabis sativa
aggtattattaagaaaaattgagtgcttttatacttaattttaattttgttatttaattaaagattttttttttatttttgtattatatgattgagattattttatatcaagctaagagagaaatgtaaaaaggattgagtttgagttagagagtaataaaagtgggataagttgagaattactttttttattagtcattaattaattaaatatggtcttttgattgataaatactctcttttataatcaaagtactaaatatagcttcacataacttattaaaattaaaattcctaatgcacataatgagaatataacctataaaaatgtgtataaattaaagaataataaaaaaaaagtaaaaaataaaatagaatatgaaaagtggatatataatttaattttttcaataaaagtaaaattaaatataaacatattttttatatagtataaaaataaatttttttaattaaatagtaaattaagcacaaaaactctaatttttcttttattatccattattggattaaaatctaatttttaaaaattaatatttaattatagttaatttttaaaatttctcattaataggtaatactcattaataaataatccatatacatttatatgagtgcactcttaatgggtattacccatgaatgaatattattatgaaaaatttaagttttttatgcttaatatttttatctaattaaaaaatatatctcaattttacattatatgggctagagttattccatatgctgaaagaaataataataataaaaacaatattttggagaaaaaaataagataaaaaaaaaaaaagttgagttcgacatatataatttttatacataaacatatttttgatatattacaaaatgagatacttttttttaactaagtatctagattaagcataaaacttaaatttctgttttattatttgttattagatcaaaatctaacgaagtagtatatttaaaattagtatttatagtcaaatttctttagtaactattaatggataatactcattaaaaagtgttcagtatatataaatatatattagggtgatctacaatgtatcccttaaaagaggtcgatgcattttctatctacttcaacatctaagaaaaacttttagtctatctagtcttgtatgttatggttacttaagatactatgcagaattttaaaaaatttgtaataatttacaatatataaaatagtgttcaaacagtttgtttaatacgcgtataaaataaaagagttacacgtataacaaattgtttgaactttatttttagcatgttaaatttctcaaaattttgtaagatgtcttaaaaattataatacatacaaccatgaaaaaaaaaactagactaaaaaattcttccaaatgtcgaaacagatatgggtgcatcgatgcacccgttttaggagagtgcattgtagagctttcttatatattataatttaaaattaattaaaatttaaatatgcgaaattctatattaattttcacatttaaatgtaagtatataattttattggcattttataatatatgtatatattatatatattttaattacatgatataatatttattttagataatatttagtttctactttattatgtacaataatgatatataattttattgtcatagtatatagattttaattgtagcatataatttagttagtataatatatatatttttagtaacatatttttcttttattattgttggtatatctttcttggtgaatgattcaatatagggtgttggatttctccatatattcttagcatttttctatatatttataatgaatggtttaatgtagggtgttggcttctttttgatttcttctgactgttcctactctaacgaagtgggtaagaaattttaggtacaagtgtcgaacaaatgttatggctctaaaatctactagttgcgaacgaccaaatatagtgttgtatgctgtcaaacagtcaacgaccacaaaagtacaatacttaaaaggtgctctaaggtatattaggacaaagggtgatggggagacgtacttttcccatgggaatgagataaccctcattgaaattagtgagttgggaactgcatggggccagatcttggttagtaagactaaattctaagaattcagcctcgaacaagatgttaactgagctttcattatctattagaatgcgggctacaattttgttggcaactggagtctttgtgactaagggatcatgatgaggaaaatatatagatcttacatccttctgtgaaagttatgacttagtccataaatctaggtctttgagcatgcaactgatttgattctcacacctcatcattgtgatccaatgctttgacatactattttttttatctctttgaggagttctttcgatatatggacctatggagattatggctatttgccagtttggcctaggaggaagactcgattgtccgataggttgcccaggacctaatgctagcgggactgctgctagaggtgcttgtatggctctcaaaggaacctgagctcctggtgcatgtaaaaaccttcttggatgccttgctaacgcttgtagtcttataggtcctcacatttacgccaaatgattccttacccattcatggaggtggcctagcttgatcaagtttttaatctcgtcctttgaggacttgcattcgttggtatcatatcaattatcatcacgatactcgcatctcttattggggtcctcttgaagcagtctcaaaacaatggcggaggttgaggtagtagacattttggtgagtcgccaagtagacgctctcttgggtgtctattaattctgtacattgggtatactttgcttataactaggtgtcttcctccttttcttgttatcggttcgtgtgcttcccttattcaatctcttacttctgatggtttatttagtggaagcaacactagtagttggagttatttttcggggcaggatactgggagagtgctccaaaagcaacattaaaagttgttggtaccccatattcaaaaaaaaaattgtgttgctaaaccaaatagaacatggggaacctacatagatttctccgacctgaataaagcatgtcagaaagattgctttccattgctaaggttgatcaatagtcaatgcaatagcaagacatgagctgatgacctttatagacgcatattttagatataaccagataaaaatgtgtaatatccagtttatatacatatattggtatttggtatattaagtgtgatacaatt

SEQ ID NO: 35169 - DNA, 1671 bp, Cannabis sativa
ttttttttttttaagtttatttttcttaatatatattttaatataataagttacccaatcctaatcctaatagaattcacataagtcaatttaaactaaccttttatatctctatataaatatccaccgtgaacattaaattcatattcattattctttagttactttcctttaaccctaattatgagttattcagaagaaatcattgttggtaattccatttaccaaataataccatatcattttgaattaaatccaagacgacaagaatcacataatgcttgtttctttaccattaaattaaatgtcaagttcactcttgctatagatgatgaagaatcttatttactcgatgatgatgtagaaaacccatatgttgttgtacaatgtgttgggcgaatttcatatgatacattgatgaacaacaacgatactcaaacccaagttaccattgaagacatgcttgttgccattgaagacatgcttgttgaagtaagacttcctcctctctcttttcttgctgatgaagttattgattgcagtagagagatgatgaacaacatagattattgtaattcaaatgaagaagtcggtgttgatgttcatattataatttatgttgatgaactacctcaactttatttggatgataatgatgaatatgatatcaatgatcttcctatctgttttgtggcggcaagtgaagagtcaattaaaaaattagaaaaagtggaggtaaaagataatccaattttttgttctatttgtttggaggatgttttgattggtttggaagctactaaattaccatgcactcatgcgtatcatgaagaatgtattgttgagtggctacaaattagtaaattttgtcctatttgtagagttgaaataatttaacaatcatctacttaattttttttaactcctataaatatatataagctatgtttggactattttcattatatatattctcattctccattccaacagtattgcttaatagtagagattgaatttaattattataaaagttttattttttaatttcttcgtaaatattataattgattattgtgatttttttttttttgtagcaaattgattattgtgaattttgattgtataaatttggtgtctttttgagaatattgggttagttttggtgatgggtttcctctttaggcatgtaatacgtgaaattaaattttggaaaatttctatttaatgaacattttcatgtcaattataatatatatatatatatatatatacatatattttctttgaaagagttcgaagaaagaatagtcaagattcaaccaacaatctaagtgttaagagttacaaatacacacatgtatacataaacctttgatagaataattttagaatagaaatattctatatatcaactattttttaaaaataaataccaacaataaattccttgtaatttatattttgaaaaaatagtgataaagttacaatatcgagttttcgagaagctcgtctctctccaaatttctaatcttccacaaaaaagtttactcttttctaattcccaatatttatttattgtattgtattctgattataattttaatttgaagtgtgttctaactgagaaatcaacaatcagttgtttttactatcataaatataaatatt

SEQ ID NO: 35170 - DNA, 2355 bp, Cannabis sativa
  modified_base (38)..(45): a, c, t, g, unknown or other
tgcaaccactttagaaacccaaatcgtaaatttgaaannnnnnnnaaaaagttaaaaaaacagtatattgggtaattctttttttttttaaaaaaaataaataaataaagtagttgttttttctaaacaaacaaaaaaatcacatgtgtacgtacacactatcataccatgtaacttctatttgaatttaatgtgattggccaaaaaaaactaccccatgattatggcatgagactccattattatcctatgggggtgagcagacttttagagcctttgaacatacatctaatgactaaaaaagacttgggtgcacaataatactatggatcttattgtatcggattattttttaaatttaattttgttatttttataattaattatattttttcttactctaatcaatatttgacttttactagctatgcgtgttaaatatttttatagtaatatttagtaatttttggataaaaaaaatatgtatgattatttattttattttttatatataaaagtgcattcattttcacttgttaacacattcttatattttttatgacacattttaatatattcttttttatttttaaaattatatatgtgttttttctttaaacatatatttttttttaataacaaaaaaaataaataaataacaaagccgaaaaaaagtctattaatgtatacatacacacgacatgtataaagtagccctctttctttttttaataatcttttttataaagcagttgtttttctttaacaaaaaaaaaaaaaaaatcacaagtgtacgtacacactaccataccatgtaattatctctatttgactttatttttattggccaaaacaactacacccattatattttttttttatttgttacttttacgtgcttgtagatattggacctaagtatgtatgttcttttataattttttatgatattttattttgcagaaagacaaaagtatttttttttttttttttttttttgtaaggggagataaaaataattttgaattcaaagtatttctaaaatgataataataaaattttggatgtgtttgtgcaacaaatattagtagtttatttatatttgaattaagaaaatgataaatatttttaaaaactgtgtagtaaaattattttattttttaattttaaaatatgtattaaaattaaaaaatcgtcagttttgtattttataaaagttaccaatcagtttatctattttattaaatgacaattgttaatcgatatttttgataactaattaaataaatgaagatttagagttggaaaagaaaagagaatatagaaattatagattttacgggcgttaatgagcgttagttcacgagttagagatagagaagatgaagttttctcttgaaaatttggcagtattttggcttaacaccaaattggtcgggttgggttgggtcccataaaaaaattctatggctacccataaatatgaagtcttctatcaatgggtcgggtcggatctgatccggctaagataagataagagcccctttacatgtgacctcatatttatgggcagccatagaatttattttttttattcgtctaaatgcttcattgatagaagaaaatacattgatagacataaataaaatattaattgctaatatgcgggcttatcttgtcttgtttcttcaactttattggaaagacttcctaacatattacatcaacttttttgggagttttgatagttagtgggtacaccatcatttgtctttgtttgacaaaagtagagacaacaacaataatgctctatttttttaaaaatgaaatataataataccttgagccgaaatttggtcatatttttatttaatatatttgaagccatttttagtataaatacgtgcaaaaaaaaaaaggcctctaccttaaggtatttttatatttttgactaaaattgagccgagaatattataatcttctattttgaaaacatatagttctaatagtcatttaaaaatatccaattgatatttttttataaaatacagtgaaaataaataaattactttgaaaattttgtaaacaattttatttaatcataatctattttgtaccttttttaatcaaaattcacttcatttcttcacttaaaaaaactataaaataaaaataaaagttataaacacatttttatttgaaaaatttatacaatatacttaagatcagactttatataaatatttcacattttagaaattttgttgtttgtacaggttttttcttgttttcttcgagaaagaaatattgttttcaagttgttttcctcttgaaattaggggtgttcataaaata

SEQ ID NO: 35171 - DNA, 1189 bp, Cannabis sativa
acttctaagaacactcgaggaaaacgtgctcgaactgttgtggagaactcggactttgattctgagttggagattgagtttgtgaagtctcctaaatctgtgaaggtattttcgtattgatcttgtgttgttttagggttttttgcattttcattgtattgttcacttatctgtaaattattttgggtttttattttgcattttaatttttttgtttcttgattctatgattttctattttttttcttgttgtttattgttgttgttttggtgttgtttcgtttaattttagggaaagggtaaatcccctatgaagattatgccatcaacagctgttgttgaggaaattattggcaatagggttaaagaggtgtgtaattttattctttttgttctttttttttatcttgtttttgttattatttaatttttttcgtgtcgttatagctttattttagtagtgttttttttttaaggattggaaatccaagtacacctgatctcaatactatcattctagagtagtaacatctggttattattctgtcattgaatatcaagaaaattctaactaaaacccaactacaacttttttcaaaaactgtgtttgggtattttcttcggatcccagagtacattatccattaccagcttcttcattgtttgctcttgagggaggttcaacagcctaatgaattaaagttttgggtttgtgtacaaggaaaatatcttaggtttagtattgaggagttttccttaattactaggttagattatcacattgattatgacctttatcaatataagcaagatgataatattattgttaaacagtgcttaaagggttacaaaaaaaattaccaagggtgttattcaaattgcctttattgctgacaatctcaagggtaatgatgatcttgcagtcaagttggctctgtcatattttgttcagtgttatttgttgggtggtcctttaggtaaagttgtttcgatagaggaaataaattttgttgatggtggtcgatacaatgaatttaggtggggtaagctttattttgatatgactattcaatctttgaagggtaagattgattctggtcttaggagggttgttccgtgtgttgaggatggtgggtatgttgggttttatgccctaaataaaactctgtttcaatgtaatccagattat

SEQ ID NO: 35172 - DNA, 1003 bp, Cannabis sativa
ggtgcgatttgatggctacggaggtgtgttcgaagtggtgtggggttcgatttgggtgattggagaggggaggttaggtttgtgggggcgactgggaatagctatgctcgattgggtgctggtgtaggtcgttggttcgaacttggaggtggctcggctgggtcaagtttaggaactgggggcttcggagttggtttgggttgctggctgtgtgctctggtgtgcaattaagggtatggatgatgaaaatggctggtgcgaggtgagccgtgagtgatgaaggcggctgggatagtgaatgtgagttctgggttgctgtttgtttaggtgggacggctcgagatggtgcttgggttgggcaaatggagcttgggttgtggttgggtaaatactctggtggtcgacggctaagtattggaaaggaaatgaagatgatgatgttggatgtaatgtagggttgagaacattgggctgacatgaagtgggctgggtgaatagtgcagagggggccagttgactaaaaccaaaagattaaaaccccaataattaatccatgtatgctttatttggcatttttgagtacattggtcaactatagtacatcaatcctaatgattggactgagaaaaaagagttgtgcccaatgattgctccatttaaacaacttcaatcacatgttctattccaaaatttttttcctcaaaccaatactcctttcctaaacgctcatatcagaacactttgctgccaaataaaattgatgagaccttgctatagcaactgaatagcattctgccaccccaaacttaattcttttgcacaatttaaaattccttcacttccacagccctcttcacttgattctctgcacaaagaaaagaaatactttctcaattacaccatgacatttatttactaaatacataatatatataatttttttttcttttttttttcttcttcttgttttttttttctaaattttttcttttttttttctctt

SEQ ID NO: 35173 - DNA, 2484 bp, Cannabis sativa
  modified_base (2450)..(2459): a, c, t, g, unknown or other
tttgaaaaaaattccgccccacagtataaaagtaaaaaagttgaaaatttcagtatgtagtgtaattatccattttttaattatctatttaccactcagtaatactattcattaataaaaaaatatttttgtatattattgtatttataagttattaaaataaaataaataaagttaattatttgtatattttcaatgaatattaatagtaatgttgacttttataactaatttatactttgtgcattggagcacaaatacaaaaattgggctgattataactttatagtatattttgggccaaatatacaccatccattggagatggtctaagaagagagaaaaatgagaaggggtagtcattgtcttggccacgtttaaaagagattagaaagttaaaacacagatttttcatgaatcaaattgaaaaaattatgaaataacctattttttattaaaaaaaatatagataaagtgataaaaattaattataaaaatataataattataataatgtttacatatttgtaaaagttgataaaattgtaataaaactttacaaattaataaacattatttaaaaaatctaaatttactataattttgtcactgttttatatttttcactaaaaggagcttcaagaagcataaatatttttattaaaaaaaagagcataaatttttatgttatattaagcgatatgataaaaagtattgttcttttttaaaagaataattgaatttttgtcctctaaactttcagcactctttgattttaccttaaaaaatatacgtcttgttaagaatttcccctaaaatataacagttacataattttgttcattttgttaggaggttttcgttttacttaaaaattagtatttttatcacctaaactttgaccaatacaaaattttttctcattttattaaagaaaataattttaaaaattataatattctattttaaaacaattataattttctattaatttataaaaattaataaaaattattaaaaataggataaaatactaaattaaataaaaaatattaattttacttaaaaaatattttcaaacttttttttattcatcaaaacgtattgtaaaaaataaatcaaaattactgagaatttaataaataatttaaataaactaagatattttgaagaaaaaatcaaacttatttatatttataaactcatatattaacaaataaagaaaaataattaaaaaatccaataaaaatataaaattattttgaaaaaaagttataaattaaactaaaaaaaatattatgtttacataaacaaatctacatttttgaatgaaaataaaatatactcaaatttgttcctgtaaatttagtatttataaattaaaattttaatatctaaataaagtttctaataaaaaatcaataattttttatattgcttgattagttgtaaaattttaatttatttttttaattttcttattcattcaaaataattgttcttaaaaaaataattttattttattaagattttttaagattttattaaaaaaatgttgaatctgtcttatttttattttgagatggtatgatttgatagttgtcaaagtttagggagcaaaatttttaaatgagaatgacacatcatcatttaaacggaataatagaacagaatctaacaagaggactaaatttttgtaaatgtaacagttcaggggggattcttaacaagccgtatattttaggacccaaaatcaatattgtcaagtcaggaggcaaaattgtaaattattctttttaaaatattacaatttaaatttaaactaagtacacatatgatctttctcttatcttttatcttatcttaaatgtaactatataacaaagtatttttttttttaacagtgcatttcaaatttaaacccattacacatatctaaaatatatatttctattattattttttttttactcaatccacatatctaaaaaaaatctttctactatcattttctttttaaacaacaaaatagaaaaaaatattaattttcttaaggaatcattgttgtaacgccttaccttttaaagttacaaaaaaatatcttttcattttcttttttgagagaatagaaaaagtatatgatatttcaataaaaatgtaaagtattataaaattaaaacggttaaaataaaattataataaataacaaattttcagtattattatgtttattttttataaatatcatttatattaaatatttttaataaaaaaataatattatttattgaataatatcataaaaatagaattatacaactaaaaatatataactaaaatctaaactaagaatataaataagtatatgtgtattgcacttagtattaagctagtatatatatatatatatattattgttataaaaaatataaaataatataaagtagatnnnnnnnnnnaagaagaagatgaagagagaaagag

SEQ ID NO: 35174 - DNA, 948 bp, Cannabis sativa
cattgatatctagtactgttctcgatgacggtgaagaatcggcgattagaattgggggtggtgctcttggactctctcgctcatgaatttgaagaagaatatgtatgcagtgatcaatgtaatgctctagagttatctcgttcatcattgcctttcctctacaggctcgaactcaacttgaaatttggatgaaagtggtgaacggacatgtttacaccatatttatgcacacaaatagaaattcgagtattcccagatcaacgaccaggtttacgctcaagaaaaaaaggaagaaatatccaacggtctgggaaaaggcacagtcggacatttaatgcaatgttttgaattgagaaaatctgaatgattatattctccttgagactcacactcatttaatcaactgtcatttcatcaagcttcgccacacacggctcatcggtgaaagttatctccataaactgataatataatgcaacattttgattttttttaaaaaaaaaatggagagttgtcaaccacaaacaagattaatgtggaattcttaaaggtccacctttagtctccatctgtccatccatgaggaaggatgcaagcttccataactcctagagttcttgaagcttgggggtaaatgttatttgtgtttctgaatggggacacgtgaaattccaacatcaaataccatttagttattttaggcccaacagcgggcccaattagaataatggacgaggtccattagcaagaacatactttccagatggaaggcagaaagctcctctaggtgagatactcttcgagcacaacgcacatctgaaagacatcaaacaaaacatccagagaagtaaacaatgagcatccagatgtctagctaaaaagcattctcattaattacgagatcttgagatatcaagaattaagttccaaggatcacgctcgaagatc

SEQ ID NO: 35175 - DNA, 1493 bp, Cannabis sativa
tgtgacagtcagagtgccattcacctctccaagaattcaacattccattcaagatccaagcatattgatgttagatatcatttgattcatgatgtacttgagataaaagaattacacttagaaaaggtgcataccagtgagaatgattccaatatgttgacaaagactttgcctaaagagaagcttaaagcttgtaagcgaagagcgggcttaatagagccaaccaactgaggcggagggggagattcgttgggtccgcccctttgttgttggacttggaccattaagggcttaaggccgaaacctaaaagaaacaaccaaaaagaaaaaaaaaaaaaaaaaaggctagtggtgtatcgtgagcagcaagcagccaagaaaaaaaaagaaataaaaatagagggaaagaagagaaagaaaactagagagaaaaggatttcggtattctgcattgaagatcaagtggttgattctcatccattttagctcaaattttgagtggtgaatccttgcaaggtgctcttcaaatctaccagtttcgatttggtaattgtcctctctaaggtgctcttctacaatacccacttggtgagacccaaacttttttatttgtgtattcatcttttgagatgatgatgattgtattggtgatccaagattaaacaatcttgatgttgttgtgagcctctagttttattagagaagaactttgtaataccagtattaatctttggtgatagtggatgatttgagcggactacggtcccgtaatttttctcgcattgggtttccacgtaaaaatcttagtgtctcacttttatgcttaatttgtgtattttatattgtttgtggtgctttggttgatatttgataattgtttattgtagtgtttggtgtttgataagtatcccatttttgacattaaatattgtagttaattgcaataagttttccaacacaggttcactgcaccctctttatatttccctctttatttaatgaaatggtctgcagtcctttgagctgagtgttcctatcaatattatttctctaaatcttcactctgaggggttgggtccataacatgctctttgtctagtaaaaaatataaaatagagagttctaataatatatagtagtaatagtataatagtagtgatagtaatctatggtataaccaactttgaatgggacaagctgtgttgcgtgctcagactaatgaaatagaccgtgttgcctcctttggacaatcttctccagtcatccacaagtttcagatcccagtttcattcctatctggctatccagatagtcagcttctgcttgtgtaaaggtgtaacgtgtaaagaagtacgacacattgtggatcaggaagatcttgggattaatgagccaaggtttagttggaacttggaacattgtataagaatattattatttaaggaaatatatttgtatttaaggaaataaataaataattgattttctgataa

SEQ ID NO: 35176 - DNA, 3698 bp, Cannabis sativa
gattattataggtgaaatttttggtcataaccatgttatttatcttacttgaaaattgctaatgtttcggttgattgacttgtttcatttagattgtgttatttttaggtgttagtattactcgagggcgagtaagaatttagtttgtggaaatttgttaggatatttttagtctattagttatgttatttttagagttaattttcttctttattatcactttttggaatagaatcacgcatgtttttattaatttcaggtttcaacacttagaatataaattggtcaaatctcacaaaaagatgatctaaaaaatagagaaaattgtgcaagaaaataaagcttaaacttcaagcctaaattagactatgttctggtaagattttggaaaaagtcaaaacataaaagttcttgatctctcttttatctttcgggaacatcttgaatcgtccaattccgaacaatatcaagagagttatggccaaaatactatcggtcaacgcagtagaatgctcactgcccaaataaaggggggttatgccacgacataggatatccatgctgcggccgaccccttctaatcctaagaaaaataggttttcgacgccatttatctttttttttattattattatttggctataaaagaagtggactttaatagttttcaacaagcaatcaaggagtacgaattttggagagcaaaatcaatattgaaggctttctcaacaggcttttcaacattcttttcttctctattttcttcttctattataaattaatatgtgtgaaattgctacaatgaacatgagtagctaaacattttattaggatttaggtattgtttgatattaatttttagttttaatataatttaatttcccctcaatttctatgtattctatttcattcatacttaatttttttatttgtctggccatcaattaattgtttatgattttgatacaaaatctgagaagtgagtgtcaattatgctatagtgaaatagaaccaaattttgatataggacacgagtacttatatggtttggatagcgtatatggtttctgtgtttaatgcattttacatgtttaatttgtcacaagagtaaaaaatttgcatgtaattgaggtttatatatctgagaagactgtaaattacctaagtaaacctgctattgcatagaatttggtaataggaatagaatcatgttccataattaatagatgcaattgaaatcgaaagccctaacttttaatcattgttaatttccttattgatttacttgctttttattttcattatttctttatttgttattttaattttctcttaattttgatataactaaatagaagtaaaaatttagttttaaagtatttaactacaaggatcgacctcactctttgagtctataacttgttaacgatacgtatacttgcgtgttaaaataccacaacaattaacagatacagagcaaggttggttgcaaaggattttcatcaacaaccagggtttgatttaattaaaaccttcaatctagtggtgaaaccagtcatcattcaaattgtattgactctaactctatctcagggatggccgattaggcagttggatgtcaataatgctatcctgaatggtattctttaggaaaaagtatacatgacataaccaattggttttaaagtcacaacaacaactaacattgtttgcaaactttacaaagctctatatagtcttaagaaagcacccataatatagttggagaggttacaaaaatctctatatagggtttggttttatttcaacaaagtcagattattacttattcattcaaccctcttctcagtctacaacactaatattggtctatgtagatgacatcatcatcacatgcagtaatcctcatgttgttactcaacttgtctctaatttgaacaatgaattttctcttaaggatcttggtgagttaagctatttcttgggaatagaagttcaacacattgcaagatggtttgcatctctcttaagggaagtatacacgagacctgttgagtaaaattcaaatgcaaggtgcttaaacagcatctgcacccatgacaagtggtcttaaactatcactagattgtagtcaaaagaatactaaggtacctaagtggcactatgaactatggtttgcatctgagaaaacctccacaccatgaatggttgcattctatgatgctgattgggcagcagatgttgatgacagaaggtccacttctggttatgctatttactttggtactaatcttgtttctttgtcctccaaaaagcaacacactatctccaagtatagttctgaagcaaagtttcgatctctagctaatgtggttgctaaagtcacatggctccattccctcctttttaagcttcatattactcttcccaggccacctatagtgtggtgtgataacttgagcactgtgctcttaacaacaaatccatttctacacgccaaaactaaacatatagaactcgatttataacaaattgtcgatatcagacatattccaactatagcccaaattacagatggcctcaccaagttagtctctagcaaccgattcagtcaatttagacataaactcaaaattaaagatgcttcaattctaagtttgagagtgagtgttaagggtaccaattctgttagaaaagttggttagaagagttagttgtttgtgttctaactgatttcttctccttctctttgctttgtttggttagttagtgaaccgttcggctctagctctatcttcttgtatatatgcttttcactgtactcttttcaatatatgagaactcactctttcttttctcaatctttctctatgcttttctctgtctctttctttatttcttcttcatcatgttatcttggttgtaatgtctaggaaatctaataagattgaatggtaaaatctaacattccatatataattagatcaaatctaaacaagcttaaaaacattaaatgtggtccaataaacactcttactataccaatcaaactgttcttttactaacaaaatatatttactacatcaaaaacatatatttattataaaagcttaataaattaatttataaaccaagttgtgaagaaaaaaaaaatataaatattatatatcactttaaccaaaatcttctgaaagaaaaaagctctaatcatattttgtgtatttctaattcgttctcatagatcttttatctgtttcgatattttaaaaaaattattctatttttttttcataattatcgcgtacgtgtagctattaaacattactaacatcacttataagaaaaaaatattcgtacatataacaaaatatttaaattttattttcagttttgtagacaacttgaaataattatttaggagtacttaaaataacgtacacgatcatgaaaaaaaataactaaaaagtttttctatttgtcaaaacagataaaagatctactgaaatacttgtttaatgagtgtacttagacttaccctactttatatacattatgtatatttttgtagttctgtataatacataaaatgggacttcgggagacagagcttatcccaagctcttaagtggaaaccatggtgtgcacttaagagcttgggataagctctgtctcccgaagtcccatggaggtcttggatt

SEQ ID NO: 35177 - DNA, 1853 bp, Cannabis sativa
agggttcgagattggtgaatcaagtcgtagtgcacctgcccctagatcatatcgtgacaatccaaatatcattcaagacccaactagggttagaacaaaaggaacaggtaatgcacaacgaagggatggagaacctacaaatggcacaggttctagacaaagacaatgcgggctttgctgtgagatgggtcataacagtagaacatgtcctaatcgtggaacaacaccagctaggggaagagggagagccacaaccagacacactttggaacaaaacacaaattcggggaacgagaatgttcaaggagacacaaatatgccttattcgacacagggctcatttcagagtagttattactagaatatgtagtaacaaccgagacctcaagatttaatatttcaaaaacatctataatatgtattgtattaacaattaactaggctgcgctaaaaactatctaatggcacatcattagcttaattatatagttgttttgatgatgtagttagcaaagtatcataggaagctcatcaaaatattcaacatgtttacggcgtacttcatgcaagacacatctttttaaatggatctatatttattttcatcgaacaactattattttttttatttggaaaaatattcttaaaaaaataagacctatataaaaccttcaaattaaagatttgtaattatgataatctcactcatttttataatattcttgatcattgtcaatatttatattattttacaacaatttcaacaaaatataaatatataattaatataaagaagaatttcacatttacacaaatgagattgagaaacgtaattccagcacaagtatctagaatgggagattcaaatctaaaaggagaaaaagtttgaactcctcactctcagcgacactacaagcatcattaataattattaatgcctaccaatttgtaaataaataaataaataaatggtggaactattttagttattgtgttttgtgaatgatgacattataagttgttaaatttagtaattaaattacatgtcttttttctttttttgaaattatgtaatatttatgtatctgccaaataaaaaacttattaaacaaagtaaataataagctagtataaatgatattattttaaaacatttaaataaaaaagtttatttaaaaaaaaagaaataaatattaattaattaacataatgtaattattctttttttttcatgtatttgcatttactaaaaaaaaatactttaactgcagtccaaattttttttcaaataaaaaaaattaatttttataaaaaccaacaaaataatgtgaattttttaagaagtattgtgtgttttaaggtggttattgtgtattgcatgacaccataatattaaaaaggggacaaaactacttacacaataaaaaaaaaataatatttatcatataaaattactacattatcaaataaaatgacaaaaaatacaaataaataaagtaaataaaccggctttagccggtataggttgtaataataagactcaaatgtgtcagaatgtattaagtgaaaaggaaaaatattgttttttattataggtgacactgcgtcacttgttccgcatgtggtacaagcagaacggaatcacttgccataatatataatatctatatatatatataattacccgttactaaagccaatatctatccatctatttcctccttccatctatttttgattcatcttaaagcaaatatctttttaaacaaatatctatattactattttctccttccatctatttttgggcgaacgattttgtgcccagaagtgtgaatcacggattggaatcc

SEQ ID NO: 35178 - DNA, 2238 bp, Cannabis sativa
  modified_base (2056)..(2056): a, c, t, g, unknown or other
tatttttatattttatttataattttacaatttaatttttttattaataaaattacgtttataaaattttaaaattacaaaaataaatttttctcaaacaaagtcagaaataattaaaaaaaaataaggagaaatcaactcgacaacaactataaattaattataaataaactataaaataattaaaaacaattagaataatgatctcattgcaactataatacaattattaataaattataaaaacaacaaaaggagcattactagtgctttttagctattctctaattttatgaatacaggccagatcttggacatatgcagactagccctgtatctaaagcccacttaacttaagagttcaaaaaaaaatcttttaaaaataattttttttttttttgctgattttagaaaatattatattttttgttaaaatgagggcacaaaaatgaccataagaatggaatattacttatttactaccacaaactactattttttcttcaaaaatattttaataatattgtatttattttaattcatatgtattcagtattttatatatatgtataaaaataaaaaatgaaattttagtgatatatttaaaaaaaaaaaaaattgaaagaaaagaaaaaaaaaagtgatatttggagtgctctaattaataacctatttattttaaatttaaacaggaattgatggtgaatttccaaagctacgtgaataagatgactattgttctgtctgtggacgaagccaccattcctgatccgcatcgattgtgtgatgatattgttgaatcgctcaaacttatgaaagatgctcttctccaaaaaggcctcctcaaataatctttttaattataaataaatatattaggtcaaacaggatgaatacttagtattattttgatttgttataatttttaaattattatatttgaaaaattatataattaattaatatatcatatataataactattgtccttattagggatgaaatattaagggtgacactttagtaaagaaatagtattaggggcgacactttaagttaatacatgttgctcctaataccttttagattattatttacggacaaaaaaagtaacccttaaagctctttttgttatatttcgttattttgatcataaatgaaaattgatggcattatgaattagtgaacaagtgctggacctgcaaaggaaagatgaggatttatcaatcatgtagttttgagtttgactcctagagtttggtcccttgcacaatcaaataataataataataaaaaaaataactatgggattttcttattattgggcaaggtcattttgaagcaagcaaatcatttatgatgaagatgatggggagagatgtttatctcctttcaatatttctagcattgaattttttttattccaatctacatccatataataaaattcatcataaacatatttaattttatattgtgactcttcaacgcctttcgttccaccaagtatgtggatccaaaattcaattatttcacaatttgatttttaatggactggtacaaagatcgatcggcattcaaaaataaacctaattataatagcgggtaataatagtatctatgaaaatgtggttcctttagtgatgagaaatgataattaatataatagcgggaaaaattatgttaacgttaattttttaaatgtatgtaattataataatatttttaatttaattaaataatattctaaattatttttaaactcaaaatgctaccacacacatgtatataattattgttaaaaaatattaagtagacacatcaaaatattttaaaaaaataccataatgaccataaatttgataaagtttaagaagtaaatcaaaaatataatatgataacatttaaatagaataaattatagggtgattctacaatgcacctccttaaaagagatgtactgatacacctttgacttgtttcgccatccagaataaatttttagtctaattttttttcatattcatgtactttatagctatttaagataacctanaaaattttgagaaattctgaataatttataatataaaaagtaatgttgaaacagtctattttacacacatataaaataaaatagtcacgcgtgcaatacactgtttgaaagtatttttcggcgtgtcaaacttttctaaatttcttaaaattttgcatgatgtcttaaataactataacgta

SEQ ID NO: 35179 - DNA, 1356 bp, Cannabis sativa
aagattctaaatgagtctaatagtctaccatattacgtacatctggaaacaaccaagatgtatcacgatgtaaagccctatattggtgggcagatatgaaagatgacattgtggagtatgtgtcagatgtccaagttttcagcaagtcaaggcagagcgtcagaaaccagtagtagtattttaacctctaaagatatctgagtggaaatgggaagaagtagccatagactttgtggttgtatcaccaagaatagtagggttctatgattctatctaggtaaactggtaattgggcttaaatatacaaagttagcacagtttctttattagtgcagactatgtatacggtggatgaatgcgctaatctatatgtcaaggaagaagtttaactctgtggtgctccaaagttaatcatcttagattgagattttaaatttacatccaaattctaggaaagtctgcaacgagcagtgggtactaagttagattttggtatagtttttcacccttagactgatggtcattctgagagaattactaagatatctgaggatatgctacgagtgtatgtattagattttaagggttcttgaaataagcatctccctctaattgagtcttcatataataacagttatcagaatactgttgatgcagtacagtaaaaaatgctttatggaagaaaattttgttcacccattcattagaatgaagtcagtaaacggaggaaccttaagcctgatgcggtctaaggaacgagtaaggccatagaaaggatttgagttcgtatgtttgctttatagagtggacgaaaaagctatgctaatccaaggtgtagagatattaaattccaagttgggaattttatctttcttcaggtaatgaaggaaactcagaaattgggaagaaaggaaagttaagtcccaaatttatcggtccgtttgagtttttggaaaggggaggttaggtagcttatcagctagccatactccatgccttacctggagttcacaacttatatttcaatgtttcagaatgatgaggcatgtacgatttgtataccgagttacaaaaatatggaacttcaaatagacttgtcatatgaggaatagtcgattcaagtttttgaacaagaaaagagaaagtactatgaaacaaagattatatcgttagctaaaacgctgtgaatgaacaacaagattaaaggtgactagggaatcaatgtcgcagtcgcgggaacgggaacggtatcccgagtagtttagacaaattttgaggacaaaatttccataaggaggggatagttgtaatatcctagaaaatataatgatatttaattgggcatattttattaaa

SEQ ID NO: 35180 - DNA, 999 bp, Cannabis sativa
tgcttggtggaatgagtcttgtttggttcttagacagctattcctttccctttgtctttatggacacttgaagttccaggatcttttggatccgctttctcagggacattagttgttggagaagcatgtatgtcaggagctatcttagtcagggcagtcattacaacctccattctagtcagctttgtgagtaataactcattgagtgatcttgtcgagttaacctgctttctaccagttgaatttttttattcatgatgaccacggggtgtgactcatcaggttggcttttctctccaatgtcatcatcagcagtcttgtcctgggggccatcttcgtgcatatccttcggtatgtcctcggtgttgtctttagtgtccttagagtttttttctccagatttttcatattcgatgatgggattatctcgatttcgatattcgttttggcaacctttgtgacgactagtcacctcgtgagggtgacgagagtctcctactttggtgttagggccaataaaatgaagaccagactttgttcgagtgagggtcatgattacttgaatgtaatctataagctgtctcactacttccttcaactcttaatgaaagcatcaaaatgtttactgagatttttagaaacagagtataaacaataagatctaaagaaacaactaattaaaagagaaagagtaaaaagagacaaacggttttttacgtggttggggcgttaattagccatagtccacgagttagtcttattcagtagttctttagcttgaaaaaagcctttaggaatacaaggaatatatgttctcgagttagcctgagcaaaatttgtaagagaattcaacccttgatccataagattcggtgggtgtatttatagtagtgtgagaattacatttagttttcctttttcctttattggggagtttatagtaaataatatatttgggtcgtctcatgaatttcaacccacaaataagatgatatgctg

SEQ ID NO: 35181 - DNA, 1444 bp, Cannabis sativa
ttgcaaagcaacatgagacattatgttggcaattttaattcctaccgagttcatggacctaacgggcaagcaatccatcagacacaactcggtaagatctcaaaaattgtacctcacttggtgaagccaactagtgatttgtgtgttgtgctgaactctttgcatgatcttgagagtaaaatacgcaatgttgcctaacatccggttctagtgacatcacgaggttgtttttctctttcactgtctggtgatcatcatgtgatttttttcaaacccacctgcgcattacaatgaccccatgagcacgtggtatattgtcttttcttgtgccgaaacctatccgttttgtgtacatttggtagaaggcttcccatttttctagtttgtcgagactcttgcctagcacgtcagatatttcaatctcattcactaattttgtgatgtttagctctcccattcgtaagtttgttcctcattcatgttctgtgatggagatgcctcatccatactgtatatgttataacaattaacaatttaaaaaaaaacaaataagggaaagatagtgatcataatattaacactactacaaaaatggtttttctcgacatttttaaatagtcgtttaaagtattctcgtcagtttttataaccgtcgtctatatgactgtcgcaaaatgagcaaaatatgcgacagttaaaaaccgtcgctaatgtggatttcccgatggtttaaaaccgtcgcctataagagggtataggcgacagttttaaaccatgccctatacaattgttcaattgaaagttatatatttatttaaccgctgcacgtgaagcacgacctatttcctagttacaacatatattttatgcattctaactaattacaacatatattttcaaataaaagtaatatttataagcattatacaatatttggtataatggtaaaattatttcatgcacatataacagaggtcataagttctaattccaataaaaatatatttactttactttttaaatttgactactttttaaatatataccaataacagatttgtatttagtattttaattattgaactcaatatttttattgctacttttttttttaattttataatatatttaatatattatattatgtaaaaaaatggatgccccatcagttacaaaaaaaaatatcgcttccacttgttagagatatcaaacacagttagttaaaaccgttattggttttctgttaaggggttagtcagttagttaggattgggttggttgtactctttctattatatttgtttgtagctgactacatatataaatatcagcttctcagtctatttctcaacagagcttcattttacattctctctttcatctttctatctttccatttatgtctttcataacatggttacagatgcttaggctcccatggcgt

SEQ ID NO: 35182 - DNA, 2100 bp, Cannabis sativa
aaaaaaaaaaatactaacctctcaacaacacgagtgaaaagctctaattcttctaatgttccgtaaacatcatatatatcatcgattattgtaatcagaacatatattcttgcagatattctcctaaagtagctgaaatctggctcaaatcttaatccaacattccataaaaaacaccccatcaacctatctctcacaaaattcagtttttctccgagtttagtatgactccaccacctatacatataattatatttgtatatatatatatatatgaaagaaaactgcttgattagttatctctaaatatcctccatgaaaagaaagcaaaatataaaacaacacaaacacgcaagaaaagtttctagtaattaactagcgagcataaatatcatggcgacaaaaatgttgacgttataagttaaacaaattctcgattgagaaccacataaattattgattgctaaaactatcagctagtgacgagagtatgtctttcgtcactagaatttgttttagccaaggcgaagatattatcatcgccaggagcaccccttaacaataaaacatgatatacaacgaataattatgtcgtcactaaagacactatttcttataaagagttatggatcaaataagaaatacctagacaaatgttttagatcgtcttgatgcattgattgtaccatgttgaaatctagttttgcaaactcaagcaaagtagaattcatatcttgtcttttctcgtatacatcgataaaccacttggcctccgttcttgcagtcctccaatgaagtggaagctctaacgcatgtctaattactacgataatattattacgatcatcatcatcatcatctaatttgttttcctccgttatcatcaagtaattttcgagacacttggttgtgaaaaccctagcttcctccaatatgctttcaccatttttctcatagaatgaagcttcatataacgccaatattcccataatatcatcatcatttatgattgctttaaattttccactcatgtctttgaatatattaaaaatttctgcaataaaacaattggagtaattagcatatattataatcattacacatcactataaaatttgtgactaaaaaaatacatcattattcctatatatatgctatcacacaaaagtttacggcctatattagtctcaaactcacaatttattgtgactataaacattactaaaaagtcaaacttagtcacaaaaaaatatatattttaactaaaatattgtcccactaaaagatagttttttttccctttcaaaatgtatgtaaatatatattatacgcatatataaaaaaaaataccttgaggaactgcatagccatgttggcgtagaagcctaaattcgagagcaatggcgtataaattataattatggttagtaatattattgttaatataagtatttgtgtattttttcttcaaaatagtgtttatttcattcttaaaatgataagatattccaagcctttgcaatgtatcgattagctcgagtagggctaaagagttaatttccattcgaaggagcatccttttaacttctttctttaacttatttaattgccttgtataggattctccctgcatatgcataaaaatatatatacgtattaatttaataatgcatgatataggaaatctattattaatcttctttttcgaaattagaccaaatatatattttgtataattttagagaatttatatttaaaaaacatgtatattaatgaaacgatgaatacaattaatgataatactcagattaattaattaatcttaggtaagagtaacacttatattttttattttttgtatatagagagattgtaaatatatatataaatgtggcggtatatattataactatataactagtaattatatgcatttaggttggattcactctaataggatttcatgttagaaactctaagtacaaaaaattaaaagtacttgatagtaaggtaaattcgctatcggtagagataaaaatagtagtattatatttatatatattacgaaataaatctgaccttatattgggttgaaagaga

SEQ ID NO: 35183 - DNA, 2192 bp, Cannabis sativa
ttggtgctttcattgagagcctacatgaaaaaagttcagaaaaaatccctcctgacccaaaaataaaaaacttttctccatggctgacaatagggaaaatgatgataatcaacttgaagagactactcactgtcctagaatagagttggtgggcacacggaggcctcccaactcatggacaactcaatctacacgatcgacacgttcaaggaggaaccaacctgaaggtggcaaaaacccagaatctgggaatgaagtacccaacaatgactgtggcggcactcctagaagtgggggtttttatgacttcaacaaatacataccattagtagagttaaaaaattgccaactcaagcgactgctggaggaggcaaactgacaaaacactaagttggagtaggaggcagccgcagccagggcggctcaggaaaatgatgctcaaaaccaacctgatcttgaggtaaggaggccagacagacctcgtggaacctgaaccaggaggttggagacaactcagggggaccctcaaaatgctcataaaaaacaacctagggatactgaggatgcccctgatgatgagcaatcaaatgaccaggctcgtcgtcaagaagagcctcgaagaccccgggtttgcacaacctagggaatggaaattgtgatttgctggaatcttctcgcaggaatgcgagtaggaggaaacctcgaagtagggaacatgaatcccttgtgacaacaagagagatcctaggactcaacctagggcaggtgggttgcccccgagacatcgtcaatgttcttctcgcactgatagggaaagggcacatacaaaccctagtagggggcatgtatcagcccgttctcaaaagagaaggccattacgtgacgaggcatgttccagttctggacgtacaagaactcgtattcgatctacgcaaggaggagatagaactcgtcgcagtattgatcgagaaagtatgggcacaagtagaatagaaggttactcaaggacgaggtccgtgagtaactatgattcacaatagccggatcttcgtaatcaattgaaccaaaaaaaaacctaaccgtcgtcaacaactcaatcaaaagcaagaggatcctatcaaattgcaaattaacgagttggaggacaagttcaaaaggcaccaagatgaggaatttgggaaactgcctagttacgactcagatgaggagcttgagcctttccatccaaatattatgagtgctgacccccaaggattcaagaaccctcacgtcttgttagacgatgggacaatagattcggtcgcgcacttgaataattttaatactatcatgcgagccaacaatgtgatgaataatttacgctgtattttattccctacctcactagttggggcagcaagcagctggctcaaaaaatttacacatcattcaatcacctcttgggaaaagttgtctaaggacttcaagaaacaattcccagcagcaagtgacaggcgacctgaggtgtcttctcttacaaatataaagcagcagttgggcgagacactaaaggcctacttgagtcgtttcagtataactgctgcgagagttagaaatttgaacgacagtatccagctcattgcccttcaagtagggatcacgactgatctctcaactactggaggtgagttgtgggatgacctacaaggtcgcccagtgaaaaacatcagtgagttcaatgagagggctcaagtgtttgtacgaaaagaggaagcgagaaaagagacaaagttgttaaaaactggctcggaaagtaaacccagcagtgtctcgatgaaggctaacattctaggaggctttaaatggaaagatgactccaaggaatcagccaaggacaagaaaaaaatagaagaagcgcgacaagtacgtgccaatctacactatttatactgagcttagagaaactcgagaaaatatatatcttgcacatgagcacagggttgcatttcgtaaaccttagcccatgaggcatgcgagatataagagagatgcaaccaaatattgtaagtatcacaaggacattgggcatacgatagaggaatgtcgttagctgaaagactagatagaaagtcttattgcgcgaggtcactttcggcaatatgtgaaaagacaaggcgatggataaaacaagcctaatctgcccaataacccag

SEQ ID NO: 35184 - DNA, 1150 bp, Cannabis sativa
tatatatatatatagttttgatcgaaaagatgtatctgattatttaaaatgttattatattatttctattttatattgtttgaagggagtcccctactctcaggctctcagtactaatttacacgcaccattttaaaggcgggctggtacaagctggtagtaggcatgatatttaggctttgggctttactgataagtaaaaaggggttttacaccataagctaaaatttttcactttttttttttttactgtagggtagattttttttcaaaaatattgtgtattttttatattatgtactgtgttaaattttcactgttgctttactgttattttttagttgttccactattataaactttgctatttttttttttgttattgaaaaaaaaacaaatatatttttaaaaaacacatataattttgaaaaaaatatatatatatatactagaatgtgtcataaaaattatataatgttcataaaaatgtgttaacaggtgcaatttatagcatttggctaaactaaaatttgtgtataaatgagaaaaagtgtatgaattcgagttgtatatataggttctgttcgggaaccattttgtttctttttttaaaaaaaattttacttaacaaaattttgtagtttcttcatgatttttgattaattaatcaaaaaactgattttttaatggttaccgaacactactatagttgtattaaagagagcttcaaaagtagatttaatcttgtacaggaaagaaaagtgtctagcatagataaaattgttcttaaaaatgtaaaagaattgtaagtttctcttttgaagaggaatcctcttgtggatgtaattgactcaatttgattgataaagattatcttttttgaaaaaaaaaaaattaatacataagtttataataatattaaaacaaattaatttaaaagatgattatggtagaactatgtatgcaaataagttggtagcgaaagtacttaagtaatcaattttgttatagttaactattagtataaaaaaattgatatcaaagtttgtaagtaaaattattttttgtaaataaatacctatataaaaataatttaaattaacttgataaaataataataacaattcaaattaaaaattaataaattttt

SEQ ID NO: 35185 - DNA, 1603 bp, Cannabis sativa
  modified_base (1560)..(1574): a, c, t, g, unknown or other
gagataaagctccgagccctgatggtttgaaccctcttttttaccagaaaaattggtctatctttggcccggatctctgtcgtgctatgctacatatcctcaatcatcagggtgacatttccttgattaataatactattctggttctcatacccaagaagaaaaatcccaaaacagtccgagacttcagaccaataagcctttgtaatactttgtacaaatgcatctctaaggttcttgctaatcgcataaaaagtgtcctgcactcgattattagcaataaccaaagtgcatttctcaagggtcgtcaaatcattgataatatccttatagccaatgagatcattcatgccatacactcaagacgctctagtaaacttggttgggcagccattaagcttgacatggaaaaggcttttgatagagtagaatggcatttcatttatcgtttgctcactcatgtcggttttcctccttcttttatcactcttatcatgaaattcctttctactgtcacttatcgtttatctctcaatggtaccctctctcacccttttcactcttcttgtggaattcgacaaggggatcctttatctccgtacctttttctcctggttgctgagggcctttctgctgctatctgtttacacgaggctaatggtagcttttcgggcattcaaattataggggagccccttccctatctcatcttctatttgcagacgatagcatgctgttctctcctgttactcctcgctcaagcgaagctcttaatgttgtccttctcctttatcatcaagccactggtcagttggttaatagagataagtcttccatcctattctcccctaatacttcaactgaacctcagcatgactttcgtacgtctttgcaactaactggggaaggttttgttagcaaatatctgggagtccctcactgtgtgggtagggttactaatttggttttccattatcttatccaaagtgtttcctcccgtatgaatatatggaatgataaacttttttctagagctggtaaggaaactcttattaaggcagttgtccatgccattccctcttttgcaatgtcttgttttaagatccctacaaatatctgcctttgaattcagagtgtaatatccaaattttggtggggttcttcaagggctaaaaagattcattggaaaagttggtcagcaatctcggtctctaaattttttggtggtttgggctttcgaactctcactcaccataaccaagctcttcttgccaagcaagcttggagactttggactgatcctggctctctcctccattctattcttaaagctcgttactttaaaaactctaattttttgcaaacccctactgggtataactcttctttcacttagaaaagtcttctttgggggcgtcaactgctcaaaaaaggtcttgtgtggaagataggcgctggtaataatattcctttgtttgcaccaaactggatccctggtatctctctgttcgaaatattttaccaggatctagatgtactaccaagtatgtttcattaacnnnnnnnnnnnnnnnctaaaacaatgaaataaagacatataaag

SEQ ID NO: 35186 - DNA, 977 bp, Cannabis sativa
ataatatggacgcccagcaaaacacaaggagtcaaggtaatatggtcgagaccggaggcggtttgggaggtcaagatctttcgaatccctatggacgcagcagaggttgtgggaggttttaaaggggtggtcatgaagatccaccaccagctcctcaggattggaaagaaaggtttgcaaaaatgcaagcccaaattaatcaacaagaagagaaaattcagaggctaagacagtaaggtcctcctacagtgcctccacaacaagtgtcggtcgttttggttccaatggtgccagcagaataacctgttgctggaaaccatatggagcctttgtatgagagattctgtaaccatgcaccttcaatttttctgggaggcccaaatgtcatgaaggccgagcagtgactgacagtaattgagagaatcttgaactttatgggtgtcaccgggaatgatcgggtgacttgtgccacatttcagttctaagaggacgctctcgtgtggtgggagttggtatccctcacctcagacatcactataatgacttgggaggagtttcgagaactattcaattcaatgccaaatattataatgaggcggtccgcactgctaagcgaaaaagagttcagattttggaaaaaagtatgtcagtaatggaatacaccaccaagttcaattgattaaccaagttagcttcgggtatactaccatggactttcagtaagaaaaaggcgagtttacatgtgaagattaaacatgatcaataaggatagtataggcaccgatagtattttttaccaattctctttaggagcattactatatgcgggcgcaccactacattctataactttggtgccccacttgttaccccagtttgttgtaagtggtccaagagcaatgctgatctctaattggccagaccacgtcgcccatcaaaaaatcgtcacaagttgcttatatacaaaaacgatctct

SEQ ID NO: 35187 - DNA, 2268 bp, Cannabis sativa
cctgtttgatcaaggcagttggttcaagtttggctaattatgtagcttcatctgatgtcattccagcaaccacggctaataagattgacaaactacttcgagacttttggtggggtgactcaaatgacaagagaaaacttcacacaatagcatgggagcgcctttgtaagcaaaagattaatggaggattgggttttcgaaccacggagaccatgaataaggcatttcttatgaagtgggcttggaaggtattaaccaatgatcggtccttgtggcgccaacttatgaatgacaaatacataaaggatggaaatttctttgatttggagattaaacagtctgatacaatgctgtggaaggccatactccgcactcgtggggactttcaagaaggaatttgcagaaaaattgggaatggaaacacaacttccatttggttcgatccttgggtgcccggagataatagacaaccaatacctcgggtagaagcctctgaaggagtgagcttggtaagtaattttattttgaaccagcaatggaatgaggagcttgttaggaaatggtttacaagggaagatgccaaaagaattctcaatatttccctttcgaaccatactacaactgattcctggctttggcttccggaatcgaatggagagttctcgatcaagtcggcttgtagaatgctctcaaatcataatcacaatgagaatttggagagaaaatggaaaattatctggggtgcaaaattccacaacatgctaaaatttctctggtggagaattttatccaactgcctccctacaaaaggcaagattggatccctattttcaattaatgacatgaactgcttattctgttcggcatctgttgagagtagttaccatctcttttgggattgcatttatgctaatgccatctggtttggttgcatgtggaatgtgagaacatctgttccttccatttcaaattgggaggagtggattgagtggtttattgaggcggtcaacagaccgaatgccatgcatctcaactgctttcttgaaggagctgcaattatttttgaaggcatctggaaggagagaaactccattctccatggacaccagccaatccccttgtctttgcacattgaacacaccaactgcagattcatggaattatctgcaatcaaagagccttccgatcctcccaatgctcactgggatccccctccccaagggtggattgcttgcaactcgaatatcgccattggtcaatcccaagcatcgggggctgctgtgttcagggatacaactggtactatactaagagtcaccacattcaaatcgaatcactgcgacccgctgcctggagagatctctgctattttcgagggggcggcagcagcagtcaaattcggttacaagaatgtcatcttccagagcgactcgctaaatgcagtcagcgcgttgaaaaccagcactgccaacatccaaaccctgtacttcaatatacaagataaggtaaaaaaggttcatcgaactatcggggaatttcaacattcatgaagttatttgaacccctcgttcgtgcaatggtgtagcccactccgtggctcaatgggcaaaccgaaacaacatctttggagttttggatttggccaattttgatgatttcctgcagacgatttctgtagatggtcattctactgattagtctattctaggttctttagtctttcgttttagttctattttagttcagtttttcctttcagtttttcctttcagttttagttcagtttttcctttgtttcttgttgtctgctgtttattgcagcttgttctttcctttcgtttgcttccctgtaggaagttgtgtctctgcttgtgtttttccctgcttggcagggcttttgtggcttttgagccgtttatgtttgttcaaaggttccaacaatcaaaaaaaaaaaatgactaaaatttataaaaatactgaaatttagataaatttttacaaaatattgtcacatgaattttttttctttcaaaaatactgtgtttttataaaactacagtgaaacagctaaaaaacaaccgtagaacaacagtgaaaacttagcacagtatatagtataaaacttacacagtatttttgaaaagaaaaacacaatatttttaaaaaaattctgccccacagtaaaaaaaataaaaaatttagaaatttcagtatgtggtgtaaataattcatttaaaattaaccattgtttcttgtacatcttcaatt

SEQ ID NO: 35188 - DNA, 2380 bp, Cannabis sativa
  modified_base (2354)..(2355): a, c, t, g, unknown or other
tgaaaaataaattatttattataaaataaataattactattttgacaaatcaaaataaatttttcagaacttctatatatatacaacttttatccttaataataataataatgtctagctttttctctctcgatttcttacccattttaccatgagttctgttcctatttatagatatctagggtaacagttattcccttgagatttattcattcataacgactcatgaaaacgttaatatttcccatgtttaattattatgcatatgggataacattaagtaaccgttcaactgctcttttgtctttatatatagacaattatgctgactctttactgtctttgtaggaaaactgctaagtatagagataaaacacttctcgtagttctcttttgtcattttggaaggtattagcgaggcggttacttcaacgcataaagagtgagatgaatgaagttgctatcactctttgaacatactcatgagtatgtgggtcaattagttgcaagctcttactcacaagtatgtgggtcaatgagctgcaagttctttgttaattcgtcttgaacaacttccattatgtattctattcatcccgagatggacttgatgtctcatcaatcttactagttaataatttttattcttatctcacttctgcctatgtggtcacgatttcgaatatttctatcaaccataatagcagaagtgagttatttaatgtgcatttaataatgcaattctttagctgattcatattccttccctgatacacatgtcagcttctcattgctcatgcaatcatatcctcatgaagaacctctggctcataaagcttcggcttttgaaaagtttttgggagagttttcttttttagagagaaattttgaagaagagaagatgaagagagtgaaaaggaaaataagagaagaagtcccttatttatagttttctgaatttggttcttccctcaaaagtattaatggggagttaagtccacataaataggcatgcatgggagagaaaaagccaagagttcaaaaatgggatagtgtgcagccgtcaacacgatttctcacaataactgacataaaagagtagccaatcaaagagatcaaagtgtgaccatgcatatctatgtggcaaagggtgtcatagtaccaagcagagtgtaaagtcgctatccaattagacgtttggacaggttagggacaaatgttatctcaatttcggcccacctgacgtggcacctgcacgtggccaaaagcagaagacacatgggagataggtgaacactaattggccaggctagtgtcgtgcagctccctaaccctcaagatcttagggttgtaagatccacttgttcaagcttctaaaacaagttcatcttaatatcagaatctccaacaaagctatggggatcatgaacggtttcaccaacaaagacagggatacacaagaccttggtcgaacctctagttggccggccaagggtgaaataacgaaatttgatcctagtcagactctgcttcagttggctaaatttacattcaacacacttcaagacatgttacttttgctagcacattttttgtgctggcaaaagtatggtattacactggtaatatggaatttacttcggatatattggcaaaaggggttagcaaattaacgttggtgttagaatttttgtcagcacaaaatgaaaagcgctggcaaaaatgacttttttcagcgcgtaagtgcgctagtaaaagttagattttagccactgcaaatgtgcgctggtaaaactttgacctttttgccagtgcagtttgcgaaatgcgctggtaaaagttacttttaccagggcagtagcaaactgtactgataaaaatgatatttcttgtagtgacaccctttacttggtttctaagtataacttttataactaggggtaaaatagtcataagtaattatcctcgtgtaatcccaacattctaactatctataaatcttgcctcgctaattctaagatactaaatcgtatctaagtgactctaatgtccaaatcatcaaattcaactgttatgaggcataaaacataaaaatatcataattcataaataacatacatggcacacctagaattcaataaaatttttaaaatcgagaaatcaaattacttatgcccatttatgataatacgacttaatttctactaatgaatacataatcatacatattaattaatttactaacaaatgttactagcttgtctgctaattccatgtctaaatatgtgatcactaaaattattcctccgttaaaaggattttgtccccgaaatctgtgacagtcagtagtcccnngatccgtaaggggaaacaccgggta

SEQ ID NO: 35189 - DNA, 2806 bp, Cannabis sativa
ttgttgtaactaaaagtaagattttttgtagtgagatctctatagaaatctctagaaaatttatatgaagctcattctagagctaagatggatgacttaagaattttattgcaaacaactcgaaaagaatcaggatcaatgattaaatacctttaacagaaaagggtgtgatcaagtcagctagcatatagctagcacttgcaggagatcatatccgaaatctcaccttgtttcaaatgttcttagtggtcttgaagtggaatacattaccagtgtggctctcatcaaagctaaatccaatctcactccaatcacttggcaggaactttaggatactctttcgagttttcatagaaaattggaaaggctaattggtcttgaagctagaaagacacaaggttcgtccataacttcaccaccatttgcaaacttggctcacaaatagaataaatccaccaacaacaacaacaacaatggtcgaggcagaggttattcaccaaatttaggctgtggaggcaaaggttacaattcaaatggcacaagtggtagaggcaaaggggtggaagaaacacaaagcctacttgtcatgtttgtgaaagatatggtcattcaacagctttttgctactacataaatgatgatagcttcatgggaatagctccaggatctagacaagagaagaaagactctacaactttcactgcaaaacctaagatagtggaccatgaggggtggtatgtgtttatggtactaaattagatacgcagcaaaaaaattttgtattgttgattattattgtaccatatcccatgtggatctccatatgtgtgtaaattgaattaaaacataaaatagtaataagttttgaatataccttttgaagactactaggatatcctcgaaacttctcgtatattgtattcgttaatccagatgatgagaataatgcaattggactcaaggacagtgtcttccaaatcgatctaccacacataaggaatagtgtgggctattaggataaagtgtataatattgtttttgttgagttctctacacatgagcaagaaaagttgagagaaaaatccttttttttttcttttctctctatatttcaaaaatatatgtctaaagagtgttctgatttctcaaaccaagcttctatttatagtagttaaaaccttttaattaaatcatatttaattattttgaataaataaatatttataaccaaatttagttattgatagttatgagagaatctctcaactacttgagggaatatttcaacaactttgaaatatctttaaccactttttgaatttagatatttatctaatttaattaattaactcgaaaatacaaactccgtagggacaggctacaatgtaggtgcctaccttttctatttaggacaatgatgatgtcttttgtcctgacaacttcgtcccaacaaatattttctcgacaaattttgttttaactatttttgtcttttttctattttaattaatgtgaaaaattatttacttattataaaaaaaaaataattataatttttctgattcaaatagatttttctaaactaaattatactacactcttcatccctacccttaacagtattttaaggtggcaattcggggaccatagacctataattttcaccattagatcatcattaatggtcaaaacatcttatttgtattttccctttttttgggcctctttcacctataaagggagatctcccttagctaatttttcaagttcagaaaactacccacaaggttagagcttctctctcttgtttctctctctagaaattagagcttctaatagttagtctttttttgtaattaccatctcctgggaagtaaaaactcaaagtagacgtagctccattactgttgcgatacagggagtaaagtactataaatttcctatgtttctcttataattacttaactacttaatcattcccgccatctagcgagcaagttttgcttagaagtctaagatttttaagtcaatattttggtactttcattgaaagttgtagctcaggaaagctactagcaagatggttgcaacacattctacaagtgcagatagatagacttgaacaattggccaagcaactgggcacacaccagttgatggagtaggaaccaggactacttctgtgccctagacaccaggagtaggcctcagaactggatcctcaacaacttgtcctccaaggccaccaaatgctcctgggactagcaacaacactagatcttacctgggtagccacacatagagattgataaccctgaaaaggctaatccttgggttgctcagctcacccaaactatggctaacttacaataatagctgggagactttctcgataagaaacatgaacagtttcaacattggtttgtggaaaattggaggaacattgaaaggcaaagcattgaacaagaataacagagagctaacctgtctcaatggattagagaagcttatcgccctaatcgtggaactacttcctgtagaagtatttatgagttggtgagagaaactccccgttgaccaactggtcacgtgggaattagtgcccaaggcaaaaccttaatgctcggaacacactactgcacctagtaactgagcaagaaataggtaaacactaggtggggagacctcccgaagggaaactacctttgagtaagagcctcagaggactcaaactcgtgggtgccaactagtgggccctccacccgatgttgaacaacaccaaaacaatgagagaaccaacatgact

SEQ ID NO: 35190 - DNA, 1821 bp, Cannabis sativa
gaggaaccatacggcagtggatgcctaaggcgacacatcaacttcgtcacacctgggaagacgaaagcgatgcatattgactgtgaaaacacttagcacataatatacaaactaagtataacagttgggtgaacttaagatctaataagcgaggcacctatctcgttgtaggaacgcgtgcttcaattattttcaccaatcaacttcagacgtctttcagtgagacttatagtcttgactagtcaacatccgacattcgaataattactgatgaagtactctttttatcattaagagctatgattgtcaaaatgaagtgttacgccttcaagtaaaataacaatgaggcgtatatcatcaacctccgaaagataggggaaacgctccaactcactataaaggtcattggtactgagttcctgttgagacatcccaaaacgctatgattaaaaacatgtttcaatacacgataatttttgacctagtaaaagtggataaatcacagttgtgtgatattcaaataataaccttatttttttttgataaatcaatgaattatattgcacaaaccagatttttacaatctatgcgcacccaatgagggccgaatattatatacagaatctatacaaaaaaatcaaattcactataaagcaaggaaccattccctatcattgttcttgatcttcttagtcattactctatcaattcaggtcttgatagtccacttagtttcttcaattattctttccggattgacccttgctatttgccaaataacctcatttcgggtcttccacaagttgtacaccagtccaatgggggcagcagcaagcacccctttcctaaaatttgacattttagctctatcaatccatctaagtagctgatggagattacaggcttgaacattccagttcagccacttctttactgccatcaaacagaaacttgcaacatcacaatcaaacaacaaatggtggcaggactcgggctgcaattcacacaaacaaaaacatctcccacttgtattccaaaccgcagcaacctgtcttgagtttttaatctatcaagcatggccaaccaagctataacattatgtttgggaatgtttagcctagaccaaactactttgcaccagttcagccgagttgggggggggtcaaaaacaagttgtaaccagcagagatagtatatttttgcttttgaaatatagcagggtccatgagtattttaacctggtctttgagggctaccatcttcttccaataccagctagcatgcactgaagtagtgtagtcccaccagtcttggctcttaatatacacactatgaacccatcgaagccataagctttcttgtttgttttatatagcccaaatatacttacatattgcagttttgttccagatttctaaatccttgattcccaaaccacctgttgactttgattggcaaatgttattccaagcaacaacccctgcaccttgaaacatagcttgccctttccaaagaaaagctctacaaatagcttcaattgatctcaatactttcttctgtaaaatcatcatttgactccaataggcctgtatagcaatcaagactgagtttattagggtgattctcccagcaaaggagagattcctagaactctaacttttaattctagcagtcattctttcagcaagaatttcacattctttccctgatatcttcttccaacatattgggatacccaggtaagtgaaaggcaactcctgcctcatgaaacctaaaatatgtacaatatgattcacttctcccgagagcatgttgctacaa

SEQ ID NO: 35191 - DNA, 2390 bp, Cannabis sativa
ccaatataaatatatttatataattgttagtttttataaggatttagtttagaatcttgaacagatatcattctagtctcagctccaatcattaaaggcttttaagattcctttgttttcgagtaaaaatgatatttttaatcattttaatgtattatccataataagcattaacatatagctaatgatgattagtgaatatgaattgcatgtgatattttatttctcctacctcctatacacttagcagcatctttaaggctcccagcaaagtactgcctaagaacagacaagcttatattctctgtacttctagtcctcttctcctgtgcttttctggccccagaagagctatgcccacgaaaatagttagaatctgcaccttcattactggactctttagacacagaacactgctgaagttgcccaaaatctatagacactttccctttgggcaaatctccatgattcaagttgaacccatgaggtgtcaccctgaactcttcaccgggctcttctgtcagagaatctagtgaggctgagacctctctcccatgctgctgtgcctccaccacaacatgatcaaaacaagaagactttttccctgaggattgatctccaacagggtaagtagtagtattagcactccatagtttcagaccctcttctggagtagaaaccgttgtttgatcccgagtctgtaacattacttgatcttctttaagctctttctctacaacaacacgtaaactcttacactcacaagcttgctgtataagaaatgataaagagttggacatttgcttttgctcttcttggtcttggcaatccttaggcaagaaaagctccaatacgaaaccgaaggaggagaccccagtgtagatgcttcttagagggatagccaaggctgcacgtaggccaaacatcctggcatggtgagaaagaaggtattctttttggtccaaggctgttatgtcagtggcaaaacaaggcttgttgccggtaaaggctgcaccaactatgccttgattgcgaaacaagtgatgctgctgagaacaagcctggtggaagccaaggagttcgagatctgagactaagctggctgaagagacgcaacgagcatagttctcgcctgagtggccttgttggtggcacgaagcccatgtttgagctaacggtattctgtgaatttcgcaaactgataccaaaacctctgctatctcattcaacactagttgatatagctcatcacatacctgaaacaaaaagaaaaagaagaattactatctcaataagttttatcaacacctttggccaaaagcaaataagttttcttttcattttttaatattgatgtttcttaacaaggttttacattgggaggactgaagttgggcatgcttggagcataaacaaatattaatttgaggaaagaagtcctctcgtacgtatgtaatgtttgtggaatttattttatataattatatatgtcctttatatataagtatgtgtatgtacgagtctatgaagacagagatatttatatgaaaatgcttttaggtatttatgttttcttattagggaaaaagtaaaagaaaggaaaaacagattgaatcaactactagtggtaggaaatagcaagaataatgctacaaaagttgggcaagaaaaatgattacaaaaatatgtacgtgtgaagtcaaaaattacatcaagagggttacaattttcataaagctttcaaaatgagacctttggggatgtaaagggacgcagacgattatagattctcccctttgatatgacacgagacaaccctacgatatgctataggtcaataaaagctaaagagcatttataagccttgcattgctaacagcaccatataatggctaacacaattttgatattaatagttgtaattaatataaaattgctgaatagtatgattagtgtctagctctatccttaaggtcaaattactattagttaattaaatagtgagtcctatataacttaagaaaataagttttaggaagagaaatgctaaagggcaccagtggtacttaacactttcttacgtgtcaatatcgctattggtccaattaagtatcgggttccataaagtttaatataatagcttttagggagtattgttagccaatcgcaacgcgacatgtcgagaaggtgctaggcaccactagtgcccaataacaatgctcttttaagaaatatcgttaaccaatcataaggtaacacctataaaaagtgatacgcaccactggtgtttaataacaatactcttaaatatacattatactttaaataaaaatatatagtagaataagaacttaattagagagaataatgagatatttgactttataact

SEQ ID NO: 35192 - DNA, 1911 bp, Cannabis sativa
agattcttctcacaaacccttccaatatgctaattggaggattagctccaataacataataaacgactgatggttgcaagaaattaacttcatcttcgatattagcaaactcaatcttgaccttcttctttgttccttccttccctgtatcattcttcaactgttcaaacgaagtttccaggttccttactatgctagatctgagaattgggggagaaatcctcttcccagaattaacatcttgagtagctcgattcgcaacagtaagccagtctgagaagtcttggcgaatctcactctgcctaatactcagttcctctgattcctccggggagaaaactttttcatactgttctattgagtgatggcactgttccattgaatcatcagcttcctcgacttctaattcttgaatccccagcacagcatcaatagatctaatcttaatgactctatccgaggatgagggaccagttttcttgcccttcaatttccctttcccgaccatttttgctcttttcaccatagctccggtgaaacaccgaaagagagagaaggaacggaaaaaagttttctaactaatcactatattagtaaccaaattttttttttcctgaaaatagaaaaaaaaaatatatgcttctcacatcttgaaatgttcatgttgaaaagtagattgtaatagtattttgtaggctcattcgaataacgacgtcatcataaattatttttaaaatttcagagaagagagaaaaataagaaagagagaaagaaggagagaaatatagtaaggtaagataaggaaaaaaatgaaaaaaaaaaaaaaaagatataaataagggtaatgaaacatacccaaacaaataaaaatgttatagaaatttagccaagtcacttttgacaattagatcaaaaacaagtcattttttacaattttcctaattaatatgaaaaaagacacccagtatctctttatttgtttttttttcaaaatcagataatataaaaaagttcatctatttaatttagttaaatttcaatttgaatgatctatttaaagaaattataaacgaccctatatttattaaaatagtaaagaatagtctcctgaatacaattttagtcaaattttgtttaaacattttttttaatttagctttaattacattttagttgatttgaagaattaattattaaaaatgaacaacattgttagtctttttgaaaaaaattaccaaaaatatgttcatggaactatttttcaccattttaattatgagagggttatttttattattttttacgacataggatttaaaatagaatttaacaataaatacataatgaaatggatcataaaatgatggactgatattaattatttgttttggaaaatttaatattttttgtttagtatttttggctcaataatttaaaagatgtcatgatataattcccatatgacaatgatattttttttattctgaaatttcccccattcataatttttcttgtctctcactatgtgagagatttttttatcttctctctctaatccatctcctaagttgaaattccaaaacaactctaaaaaaatcattaaattaaaggtgctctaaatttggaaaactcattgaagtaaacagaatcgtagatgttgttgatgcattgttgtcaagattgtcattgacaaatcaccgaaaaggtacagactattaaagttgccaaagacagaattagtgattggaatgaagtcgtaacaaaatagttgtactgaaaggcgggatcacctcctttttaggaagaacttcaattttttcttatttttttatttaaattttgtctttgttagtacatttgagattttggtaatttgattcaattttttatatatacatgggattgagtttt

SEQ ID NO: 35193 - DNA, 1318 bp, Cannabis sativa
agagagagagagagagattagaattaatagtcttcaatgagccatgggtacaaaagctgaagttcagtacaactttccatcctcaaacagatggtcagtccaagaggatgattcaaatattagagaatctgctgcgagcctgtgtgatggattttgaaagctcttgaagtaagtatctgccattgatagagtttttatacaacaatagttatcagagtacaatagggttgactccctatgaggtgttgtatggaatgaaatgtagatatctaattcattaggatgaaatcggagaaagaaaatacctaggtccgaagtcagttcaacaaactaatgaggtgatagagaagatcaaggctagaatgcttgcttctcaaagcagacatagaagttatgcagatccaaaacatagagatatagaattttaagtaggagatcttgtcattctatgggtatctccaatgaaatgagtaaaatgtttcgagaaaaagggcaagttgtgccccaaatttatagggtcttttgagattcttgaaaatgttggattagtagattatcgtctatctctgcccccaactttgtcaatattatacaacttattcatgtctctatgttaaggaaatacatttctgttccaacacatattttgattatgaaatcctagaggtccaaccagatttgtctcatgaagagaaaccaatccagatccttgataaaaaggataaaattcttcaagacaagaccatatcaatgataaaaatacttgggagaaacagtagggtggaggaagctacctaagaattagagtttgacatgagggtccaatattcaaaactattcaagttatatttcgaggacgaaatccttttaacgggaaaataattttgatgatcgcttagttttatataagaattagcagataattaggatttattgttagaaatatactttaaattattatttttcactcaatgagttatatttgaattctaggtgtattaattatgttatatgtgaaattttatatttttcatattttatgctcgataacagtgaaatgtgacgatttgaccaattaaaatcatttagatatggtgtacgtagtatcttatataattagcagaaaaaactaattagacattgaaatgttagatttatttggaattatggttttggaccattttatccctaaatgtgtagattacttcttagtaaagtaagagtaaaagtgtcttttacccttttgttgttagtgggaatcatgggattttaataaactaattcctaagttattcattacataatagttgaatttaaa

SEQ ID NO: 35194 - DNA, 2413 bp, Cannabis sativa
aaacaatatccatctggaccctaagtaagtgtttagctactgatgttcgtggaagtgaaatcatacatattaacttaagaaaagagaagaaaatcaagaagaagaagagaatgttaaaaaccctctgaaaaatgcctccagtattgactttggtctttgaaattcatactcatttttctgccttttgttttcttctgaattccttgatgaaatcaactgaagttcactctttatatagccattgagggactaaaaagatagaaaaatgcacatgctgaaaatcctattaagctttgaattaggataggggcgggccgcggcatgccttttcttgggccgcagcccgtgtgcatttttcacacgagtatagaagactttaaaagtacaggtcgtggcatgcccattcctgggccgcagcccgtgttcaattcccccacggtttcaagtcatgcaatctttttatctaggaaggattccaatttttgcacagtgatattttatgcgatcttttatcttttccgttgatacttttctaatcttcttctattttaaatctgcaaaaataaaagataacaatcataaaattactctaaacacaagtaaaactaaattaaaaatatactaaaattaatacaaaatataacctaacaactcatggggtagttcatcttctcacatggtgcctcttgcctccatatgagcctaagtgtgaatcatttgcttctctttgtgccaataccttggaattacacttgataatttctagggtcaacaactggcattacatccataagacaatgtcacagagcattagggttgatttccctccttttgtgtagttttcttagatattggaactcattcttaggtttctaatctccagtggttattgtggccttggtgcctgccttttatcatctttaataggaatcaccacaggtgagattttattctaagggagccataatgttcgtggagccagagatgtcaccttggtgggaggtctagtggttggtgaatctagttcatttcgtaccctacccccattttcaggtatttcatttacttgaccagtgtttttcttgtgcgtttgagaaagagtctcttggtgattgtttttgcttcgctcattttacaattcagacacttttgggaggttatccttaccgttggcccgtggcaggagtttcacttggttctccccctgtgcaaggagcattttttgagtaagggtcatcacgtcgtcacctatgggcatgtggacacttatctgtcaagttgggaaatgactttattatctctcggtaccgtacttgggcataccaattgtggggtgttgggctgaacttgttttacctgggtattacaccatattcttgggtcttttacaattagtgaaacgatcttgcaaagtcattttttgttgtccatggaggtagcttcagtcgctaaatatttggcatgtatgtagctcttctcctgtgaggttctaggttttttttcgctagaaaaaccgttaaaatcatcgttgcttaaggccacacttgttgacgttgccacttaatgtttaatgtggtggcatttcttgtcatcagaggcttcaagtccttccccatgctctttgttggagtattttcaagtatggcttccacctttcttattttcttgggtgtagtttcgatgactttgttctggctactttgtttttcacctagtctttaatcgttgccatgttggtagttttcatctcagttttctctggtgactgaagctaagaggtctcttatggttacaacccatcgattattgtcgagacatatattccaaagtcttatggatgtcgagaatgccttggcatgttggaacattgattactctttctaggaaaaatgcaactcaaactttatctttccctcagatggtgcaaaacttttgaaggtaagaactcgtcaactatatcatggctagaaatcttgagtaatcactaataaaaatggtgaagtgatctttatataaaaatgtaagagagagacagagatgtgaaatactttttatttagaaaatagcctctccaaattaaaaggttcaaaccctctctctcatggacgagtggtatttatagggtcgctaatagccttttggttacaactgagatgatttatgtggttccctggaggaccatgtactatgtggcaggttgctaaagacaaagagtttggtaatagaattcaggttgagttggtcgagtgtcgggtcaggtagatacttgggaccatgctccctctcttttattccataccactaccttatttgagtttttgcaggcatcatgattatgttgggatttgtgtcttaaataaaactctatttcaatgtaatcttttatatttattatcaataaagaaacagattt

SEQ ID NO: 35195 - DNA, 1792 bp, Cannabis sativa
gttttgttcatcttgaatctgaggatcaagatcctcatcctatttctcgcctttttcagttgtgactgccattagctgatgactggcttttctattctgtagctctatgccgtagcaattacgagccagtagtcggtcacctcgtaccactcctacacctgtcagtgtctgaaacttcaaggacagttgcttaattgaactaactgtccctagtccaattagtgctggtcgacccaacagtatgttgtaggctaatggcaagtggacaactaaaaaatcttgcattattgtagtggataaaagtgcctcgcccacagttaatgggagttcaattattccttgactggcgacactatcacctgtaaatccacacagatttaacatgcaaggttttaactttactctttccagtcccattttcttccgtctatcaatataaaggatattcaccgagcttccgttatccaccaacaccctttttatccttttgctggcgagctaacttgtgatcactaaagggtcgatatgaggatatctcatatgctttgcatcttcctctgaaaacacaattagaggctcctcagtcttagctttcatagaaaattttggagcaaaaactgactgctcgttcttaacttccttgacatatcttttttgggcattgttactttctccagcgagatgtgccccccacccccccgagataactagagtgttctctccttcaagaggaagaggttgtaatccttggttgcctgggttattgagcggattcagctggttttgtccattaccttgtcgtttcacatattgctggaagtaacctcatgagatgaggctttctatcttgtctttcaattgacgacattcttttgtcgtatgccttatgttcttgtgaaacttacaaaattttgttgcatctcttttatgtctcccatgcttcatgggctcaggtttatggaatgcgaccctgtgctcatgtgcgagacagatattttctcgagtttcattaagcttggtataaatagtgtacattggcacgtacttgtcgtgcttcttctattttttcttgtctttggctgattccttagagtcatctttcctctttgtactagagcctcatggattgtcaccctttgtcgagacagtgctgggtttatttctcgagccagtctttaacaacttcatctctttccttgcttcctcttttcgaacaaacacctgagctctctcattgaactcgctgatgtttttcacagggcgaccatgcaagttatcgcacaacttgcctctagcagttgagagatcagtcgttatccctacttgaagagcactgagctggataatatagctgaagtttctaacccttgcagcagccgtgctgaaatgacttaggtaggcattaagtgtctcgcccagttgctgctttatgttggtaagagaaaacgcttcaggtcgtctatctcttcttgcctggaattgtctcttgaagtctttagaaaactattcccaagaggttatcgagtcactactacaaattagacttttagtgacactatatagtaacacgcataaaagtgtggctcactaaaaagttaagagtggttttagtgacccacaccaaatgactctaaatatttagtgtttatcacctaaaatgtgggtcactaaaactatggagtgtcaaaatttgtaattttataaaaattaaaaaaaaaacatggcctatagagacgtgccacgcgtgtgagcaaaaccctttaccaatacgttatgcgcgtcactaaagcca

SEQ ID NO: 35196 - DNA, 4114 bp, Cannabis sativa
taataaataatcgaaccaaacagaatggcccatcgcatacgtggagcccattttggggagagtgggctacgagttcaatgtcagaatccatacattgggtttattatgggccccaacggaatggcctggaaacttcaagcttggcccaacataaaggacatcctcttccacaaatatcactactatgaattcgaagtagtggtaaaaacaccatgaccttggacttggtacttttagttttggaaaagggtcagaagaagttgaagatcaagtagttaactaaagaaggatacaagttgcaaagctcatcagaaggtactttgaatttgtggcttctgctccataaactttgattcttttatgtgtattcattcctaatttattttatttaattttctggaaggcaattcttttgctttaccaagtgagtttgtgaatacatgattgatcaattctttgcagcccaagtgggtttgttaaagacagccttccctatgagaaaagttaggtaaatttgttgactttactcttttagtacccaaacttgaacgtatttactattcttgattagtattagaaatatgtagtttatattttaaaaatctctacaaaagtctgtcttatgaaaagctgtgtctggaattggatccaaaattatctcttattgttttgagattacaagttcacttgtgttgttcttcaaaacattgggctaaataaagatataaaacggtatataccttagtgttctatcccaaaaaagaaaaaaaaaaacttattatataaaacttaatattagtggagagaatatgtaaaatttgctaattatataaaatctaatcgtaatcacaatatttattttgtttattatatatcaaaacttgtttaattaatcatcaaagctttcatagctcagttggttagagcacccgtttagtaagcgggaggtcttgagttcaactctcaatgaaagcaatttttcatttatttttccaccacacaagttttgcccatctgactttctttttttcaaaaaaaaaaaaaaaacagaaaaaactcgagattctttaactggtatattttaacgaataaataatgagtaatgtagaaatatgttcttgggattggattaagatctacatttgcatagattaaaacattgatgctaacaacaatccttatcatcacagattacaatgggctgatagagaagaatggaacataatttccaactaataataccaaaaatactaattccattccaacaaaactacaaagatacagtttttcttttccccagatgaatggcaacaatggaggctgagattcttctaggatttcctctacatttccatatacctatactaaatttctgcacttcactgttacataagtgaaaacaagacaaacaaggttcttactttgtctaatgtctaatgtctaaatttcagcacccttccaggtctcgccacttgaggtaaacaagaccagcgcgataatgagtgaaagcacctgcaacaaccaatacatgaaatagctggtggctgtgccctgcaatgtcaaattttccaggcatccatcgttctggaatccttgtggcataaattagtgctccaagaccatagaaaagtcccatcaaaacctcataagcagttgtgtggagaacctcaggtcgatcccagaacaagaaaagcttgtgcatgataggtgcaataccagataagcccatgccaaagaagagagatgcacgaacagtgcgaaattcagggttctgaaagaacggcaagagggaaaccaagatcgttgcgattcccagtatagttatgaagcccatgtagaggttgcaaaagaaagggtcgcacatgaaggagtagtagacaggtgggtagaaggaggtagaaatcagagctgcaattcctgcatagtcaagcctgagcatgatgtaggagagccgctcggagtgacaagagaggagatggcatgtgctgcttgctagcaagcaaaacatagcaccacccatgaatgcaaaaaatggccatcttgtaattggtctcaccagaagaggggctattatgtttgcaaaatcatccttccagctatgctgcattcataaataatcaacaacaacaaaaaacaaaaaacataagcttagtggattgagtatttgaaattattaaaaccaatgcactactttatctccccactctcccacctaaagagcaaaatgcacaccaacattaagatgaacgtccaagatattaacaagctcaatgaaaagaagaataagaagtatcaaaaaccaaagcctctaacaaatatagagttttaatgagtaaaatcatctgttggatctcttattgttctttttaatggtttaataggacagctatctagaaaagcatttaacatatagtttataagaaaaatacaaccattcaactgaaatgtaatacttcataatcttctagaggttttgaggacaaagtgcagtaccagaacacaaatgtcactgctgtttccaggggagaatcgctccggcaaacaattatacaaaagatccataacatgccatcctgagagggatggaagcatatccatagatgtagtctttagctccttaagtctgtgtagatcaggcatgttgggtaaggaaggaaggcattcatgcaatttatgcagatcagcccttctcagcatatcaggaacatgaagagtgtgaagatcaaccgttggaatcttcatggcagtgtatatggtcaaggaaaggaaaataaagaacccaatcaaatgcctgcacaagttttaaacaagacatattattactacaacactttgttgacttattaaaatcacactagcgtgttctgacccaattaaaattttccacatgaggaaaaaatagccgggaactgtttcaaaattaaaacaagtatcttttttttccattcatttttgttttataagaacaaagaatactgtagaggatagaaaccttacgtccaaacgtttagtgtctcgttatgaatgctaaagatgcttaggaggatttgctttaaaggccactcagatcgataatggccgataatgtactcattgtccctcaaatacgcgggcaacgagtggaattcaactagctgatatctcaccttcttccatagcctctttcctctagcctcctttgaagaacaacccaattcactttccgtcgtctctgacgacacttttgaatcttcaccgttcttttttccactattcatctcttctcctgctcactgctcaatgctcaaattaaaaaaaaaaaaaattatgtcttaacgccacatttcctgaaagattcccaagaagatagaaatatgatgaattaagttggaaaaaaagaaaaactgactcagttttgggtcggtatgaatcaagttattccattttctaattttgacaataacagaagaaatttgagggcggtgatttaaaatttgagcctaaaaaccaaaacccaaattagaaaatcaaaagaacagcatattaaattgaagaaataccagctgagatcaagtactgagtttctttttgtcttcttttttcttttttgatcctcctcctgtgttatctgaattgaatgacaagaaaatataaatacaggatcgacggagaaaatcagagcccaattaggggaattctcgtcgaacttaacaaaaaaaaattgaagaaggaattgttcttagattccaagagaaaaaaaatatctaagaaaatgcagtttacaatatctagaatcacgaaatttgatgaaattctttctagtacgaaaaacccaccaaaagaaagaaaaaaaaaaatcttcgactttattgatttaaaaatgaaacgagattgaaggaaaatcagtgaaatattcgcttaagagattcggagatgccaaagcttgaagaagatgcttgtgctgatgatgatagataagttttaatgcaataccccaaccttgccgtaaactattttatggtccttaaattctactttgtatgattttccaatatttattaataataatttattttattatttaataataatttagagggtgtactaaaaaaataggggttctttattaaaaaaa

SEQ ID NO: 35197 - DNA, 1625 bp, Cannabis sativa
tggagggaacatgattgagtttgatgatgccattggtcagtttctctcggacgatgtggcaatcaatttccacatgtttagttcgttcatggaacactggattctctgaaatgtggattgttgcattgttgtcacaaaatagaagagcagggagtgagatgtcgacttgaaaatctttgagtaaggagatgatccattggagatcacaagtgacattagccatagaccgatattctgcttcaggtgatgaacgggatattatttgcttttttttgacttccaggaaatgagggagtctccttggaaaacacagtatccaaagatagatcttttggtgtcgagacaagctccccagtcagcgtcagcaaatgcttggagggtgagttttgatggtgctgaagcatggaaaaaaaggccttgaccaggagagttcttcaggtagtgaagtattctgtatgcagcatctaagtgaggttgtcgaggtgattgagtgtattgactgagtttgtttacaacaaaggtaatgtctggtcgagtgattgtgagataggtcaattttccaatgaggcttctatattgtgatgcattttgcagcagagttcctgagtctttatgcagtttggtgttcggttccattggtgtagaggcaggtttagagcctaagcagcctgtttcttcgagaagttgcagagtgaagggcctatgagacacggagatgcctttcgaacaacgagccacttccagaccaaggaagaaacgaaggctgccaagatctttaaatttaaactgtgcatcgagacatcttttgaacttcgttagttcatcaagattgttagtggcaacaacaatatcatcaacataaatgagtaaggaaaagaaaacacctgatgtatttcgcaaaaataaagaatgatcagctttggaggggtggaatccttgctgaataagatgatggctgagtttggcataccattatcttgatgcctgttttaaaccatataagcttttttgtaatttgcaaactgcatttgtgggaatcactcctttgggagtgtatccttgaggtagtttcatataaacatcgtcatttagatcaccatggaggaatgcattgttaatgtccatgtggtgtaaatgccaattattgatggcagcaagggaaaaaaggattttaagggtattgaattttgcaacatgagcataggtatcaaaataatcaataccaggctgttgtgtataccctttggaaacgagacgtgccttgcatctttccacactgccatcgaggttatttattttataaacccatttgttgtcgatagcatgttggccatcgggtaaggtgacaattatccatgtgtggttgtcctcaagggccttgatttcaattcccattgcattattccagattttgtatttgcaagcttggcagccatctaaagttatttgaaaacctggtataagccagagtatttgtgagaggatgagatgttgaggtagagactttgattaaatcacacatgtattgctctaaatgtttaggcttttgtgtgggtctgccatattttgtgtggtgaacatcagctatctttttaatattgctggtgttgagttgctgtttgtca

SEQ ID NO: 35198 - DNA, 2120 bp, Cannabis sativa
cagttttaaagactggtcaccatgttattctggcttccaatattcccaagaaccccccattgcttgaggtctatacttgcttcctctgcttcttttttatttttgtcagtgaacaattatctttctttatataaatatttatatattaattattgtatgaatttttaggcagcggctgagaaaattttgatgcagaagctaatcaatctcggctacacaaagccaaaatcagaggcctcatcttcatagctgctttatacttaggtattgatttctgagggggtggtctgtgttctgaaaaaagatgtaaactctacttgctcctttaatcctagtttgaagttcatggtatattaacttcatcattttgattgagaatttgttttttctaatacattatcgttataaagtatgtaagtagtgccaattatctgtttgagtgttgagtttattaaacgacctactgtaatgttgtctaaaaacgatggaagaaaccaagaaagaaaatagatgcacattcagtctgtagtggctacatcaagatattgatcagtgaaagtttcaacatttcagatttgctttgttttgtttggtatgaactatgaatcctaatttttatgagatcactttcattatcaaacaagtaaaatttataaatgtcttgtttttggttttatggtactgcctctatttgaaatacaaaatgtgagcataactatctagcgtcccttttgggtagttttaagaatggtaaaaggattatctgcaattgttttaaccatttttaagagcaattaagaatatatgctttgtcagaagaaaatcctttaacattttgctttactaaacaattaagaatggacaattgtctgcagagaaaccctcaagcaggagattgtcagtgtcacctattctctgctacaagacaatcttctcaaagcatgggattacacattttacctttatgttgttgagaaattctatgaagttagtgtgaatttcgttctcatggctgttcttacctctgttgatccggatggtatattgagcttcccattttgatttttgaaagcattctttttgtgcagtataatttgctttaatctaacttagtggttgaaagttcaaaacctaagatcttgagtgttgaatgtagcaatgccacaaagattcttacaacaatttactctaagatcttgattaaccaaccaaagttcaaatctaagtccccggaagacaagctccatttgcttcgattgagctgaaattctttcgctgtgaatctgaactctcttcagatgaaacaacttccattatcatttcatcacaaaagcatgaactctaacaatggatgaacttgcaagaaacaaagaaaaaaaagatttttgccctgatagagaaaaatctctatcaaagaatcaaatgagtggagttggttatgattttaggaatcaagtatatataactctaattctcaccaaattgacattgacaactcacatgtcaattcatgacagctggccaagatatattatcacccaaaagctaatctatataaagtaaaccataaacgagtaagaaatatattcaaatggaactaccgagtgttcagatgaaacaaaattcatagttttctatacacaaatatttcttgcagtggtgttccagaatgagaatctacttggacttttcaaacataatatgacttgagttttcattatatggcaggaataatttgtagctataccaaataaagtttcacataagctgtaatctcaattcatgtaaagcttatttgaattcagctcttatgttgacttcatgttgtttagtgcctctgtctgattgcacctatcgtcaatatcggattaaccacctatacattacatgatcaaaatatagttatcttcattgctaatgaaaaattgaacagatcaagaagcgcaacaaatggtgcattttcattttcagcatatgactactaaggccacggcattgtacatcttattttgtatattctcccgttgtgtgctatttgtgctcataggctatctagtatctactagtattagaatatttctatttatggaataaaataaaaaattgattttgtgataaat

SEQ ID NO: 35199 - DNA, 3735 bp, Cannabis sativa
  modified_base (1659)..(1664): a, c, t, g, unknown or other
ataaccctaggccattaaaccgctcattatagggtaataactctaattcaggtttctaattactcacaaatatcatatttaatataagtgctaccgcgcataactctatgtgctaactactatcttacctgatgtctcacaaatgtgaagattccaaatccttggatgctcctaaccaagtaacagtaatcctagtcacaatttttgggattcacaagtataaggttaatccctaaatccacttctacaaaatataaaatgggcattcaaattacagataatcacatagagctcgtaacgagcttctcaacgatatatagaactcccaaaacggagttcagatcacaaagttatgaacattcgaatatcgcgttcgaatctacctagaaacaagaggatgggccgcggcactcccacatggggccacgacacctgggttcgaatcccaggccacaaaacaggggcgggccgcgaagcccaaggagcaggggcgcgacccctgggttccaaacccaagaaaccccatttttccagctcgaaaatcaagttaaaacacacccaattcaccccaatcatacacaaacctcaaaatcataatccataattataactcaacaaaatagagagttaaaatataaatttcattcattaatccacaaccaaaaatcagattaacaacataaaagctaggctccaaatattgagctaaaaatcaacacaattccttattcaaaagcttgaacatcaaatcatgctttcaacctcatatttcaacagcaaaaacttaagataacacttgaattcacacatgaaaacaccttaaaatctcatgtaagttcatcaagaacatacaccaccacttagcaacacaatcatgccaaacacatcaagattgaatcaaatttcacaaacatgcatacaagagtaaaacgccattaaagcttaacttttcaacctaatttcagtaacaaattcaatctaaaacagtaaagaaactacctcaattccttctcaaactcaaatattaacacccaagctccacaattcctcaatcacaggctaagcttcaagaacaatatgagatagggagagggaaagggggtttggttatggctgagggaaaagacaccagaattttccttctaattacgaaaaaaaaaaaatctcttttgttgaaaatcaaataaatggccgaaagaccaaaatgcccctagggccataataaagcatatgcataaaccaagggcaaaagtgtcatttatcatcacatacatactcaaaatagaattttagaatattcacacatcaaaaaaatgtcaataaataatcttaaaattctcaattgtgactatactgtgccgacctgccagaaaacacctgaaataggacaagacaagtatactatataataatatagtccataagtacatcgtaatataaattttacagttttacccttctcgggtcaaaattacgaaaatactcttgacttaccaacggggtcttagcatgtcatttatcaattaattcacatataatcaattatataataatataattccataatgaatacatatttaactagttagggttcgctaattcgttttcttaatcttaggatattacagagtagtaataaatttaccgttctacccttcnnnnnnttttatcctaaaaacacttagcttacgataaatgatatttcaataaactaatataattactgaactaagagcttttccatttacttttattaagccaagatcgaaggaaatcatcatttcacttctatgtcaatatagaagttatagattttatatctattattagcgctcccactcaattgtactaccatgttctcaagatgtaagtattaagccgatctaattggtcagctttaatgaacaactcaaagaacataaataatacagttaagctagaacctaaccaccacatgattaagatctattgatttaagatcaactaagtgatattggcttagaaagatataacggtaagtttatgatatattgtccaagttgaatatcggttcagtccaatgtatactccatatatctgatcctagcatatttactaatgtcttggaaaggatataacacgtatccaagatgtaagtaaaatttatcgctaattatcaggtcagtgtaaatctagtgcattgatgaatcatgggacaaaactttgaagtatataatcacaattattttctactacgatgacatcactgtaattgtgaataactatatattctaaatttatcataaattgtatattaaaccataatcataaaaaataatatgttaacttaaatgacttctaatcttctattgatagcaaacaaaattacattgaaaggagttttatttagagcataaaatcccaacacataataccaagctctaataattaagatatttattgaattttcaaccaaataatcatatttattaattccatgattactccactgtaaatatagagttgaactcttagtaaatataaaattatatttactgagtttattttttgagtccattgatattatgatcaataccagtctttagcctttcttgtgtcggttcataattagttttggtcaaattaccgttttacccatctaattatttttcaaaacacaaaattttttaaatcaaaattcaaataattcatttagcacatgcatttttaatattttttatatttgcgacaggtcttataaattatatataaacatagatatatattatacaatttagagcattatttttgggcaccagtggtgcttaacattttttataagaggtacctcaagattagttagcgatattttttaaaagttattttcttaagttatatgaaacccgatatttaattacactggtaacgatatgacaccgataaaattactaggcgcgaataatattttttaacaattctctacaacttattatcatgcaatgaaaatactaaaaatactcataaatattaagtagtagttaaaaacaatcattatatatttgtatatatatgattcacatgtgtttcattgcatgattagattcgaaaattaataacggcaaaatctcacttttgataaaatttggatatggctaagtgtgttttgggtatttataatcaacatgttccacgttatttggtttatgggggacacatttacatgtaaaaatgtcaatatatataatcattatatatattgatagcataacaattataaatttatatatatgtatttacatataatgataattatttttgcattattaatgatcgaataccttgaattgaattggctcggggattgcttaattcaagttttaaatcaaattattattaacagaaggcaaatttgactaaatatacttatataacattaaattttttcccttaaatttataattatcaatatttgtaatctaagccaactttaatgttatccccaaattactcttcccatttacatcacatcgaaccaaaaataaataatacataaaaagcaatcgggtccgatgggggtccgatggtggcccgatgctacccattttttttttatatatatatttttgtacttaaaaaagttagcatcaggtgaccatcggaccactatcggaccaccatatctgctaccatttttattttatttttttttttatgtttttgtacataaaaaaaaaaaaaaaaaagtagcatcaggtg

SEQ ID NO: 35200 - DNA, 1542 bp, Cannabis sativa
gtatacgacatccctttttatttttgatgtcgcaagacctcggaaattgacccacgtaaagggcgattgatttaggttcaatcagttcggcctcgaaggtaacattggagttctgaagcatcttggactttcgagctttaggaaccataatgtcaaattcaagatcatctgatagaaaaacaatagtgacttggggtaaaactaatagtcttactaagagaatttttactaaactgggcaattcagaccagactgcttctcacaaattatgatctaccctcaataatttcatctatatattgcctatagcaaactgatgtttgtaatcaactctctaattattttttatcttgtaattttgcttttattccctgtggttgtaattttgctgcccataatgtggctagatgggctttcacccagaacttttcaggagttatggagtctccctccatacctgtatctatcctttgtaatgaccgcgaggtctaatgttttctttatctatgcaacgttttatttttttaaaaaaagaaaaaaaaagagtgcactcatatatatatatatatatagatttaaataattaataacttaatttccctaaaagtgaaaatggtattaattaatgtattgagcatgcaatgcagtattttttttttttaataaaaatagcaacttttattaaagatagcaatcattagaacgcacttcagaagaatagtcctcaaactgaagtgcacgagctgaagagaaacaagagctcctagcaagacagtgaacagctttgtttacagatcgtttaacaaaacaaatatcaacgttacttaatgacaataacagtgcagtgtatttaattttgaatttctagtaatgattttctctgtagtaattaatttcctgtactagactataaattaagaggctagaagcaaattctcatcgaaatagaattaaaatcacactcaaattaatatatttgaacttatggaggttgatgaataatatatgaagaatactattttttcagttacctaccttgtattacacttattactctgtatgttaagcaagcataaaaaactgaaaatcaatgaagaaaaaagtacaaaattattaatgtaaaaatttaatttgtcaacgtttcattggttgagattaaaaaaaaagtatggaataataaaagcaaaatatgtaagttttgtcattggtttagtttgatagtggagaaagaaagcaataagaattgatggtgtgatttatagtatatgtaccaaccctttatatatatatatatatatatatataaactaccttaataactaaagatcaaatgagatgaaatagtaaaaaaaaaaaaaagtaatataagatataaatatttatatcagtttaattcttaattctaaataaatacttaaatttaattttttagcagtaaacatttttagctatttttttttaataaatcaggagattttaataattaataaacttatttaaaataattgaacgcactttagaggaacaatcctccaattgaag

SEQ ID NO: 35201 - DNA, 2037 bp, Cannabis sativa
tttttttaataaccattaagagtaatatccattaagaagtgttacatatatataaatggacgtctcaatgggtaattaattaatcattattttgaatataaatcttaatttaaatttgaattagacgttaatttaattaattaatcataatgtataataaatatattaattatattgtttaaaatatataaacgtaattacttattttattatttaataaaattaagtagatattttttataaataaatttaaaactagattaacttttatatatttaaaaaatatcgtcaaattgtattaaatttaatatttattattattatttaaattaataattaggtaataacaactttatacaactgttgcaaaattttaatcacacaagtgtacgtatacatgaggtcgagcccacaagaactacgattaagtactataaacaattaaattcttaattctatctggtgacaataatttttaaagaatatttgaaattaaaaactaatttgaaaacaataaaagaataagcaaataacaatgattagagtttaggacaattaatttcaactgtatcaattttatatggccttatacaattttgattcctattctaatttcatgtgatagcagattaactacttcaatctatattcttatattataaatttatattataaattttattatttaaacctgaaacaagtatagaaaacaaacataattctgtacaatataataatcaactaaaacacaaatctaaaatactttataaaatgcacctaaaactaacacatcaaacaactcttaagaaagcatgcaattttactactacttagcatatatatataattaaatagttatcattgacttgatcatgagacaaaacccaaatcaatcatatataaatgttaaggcacatataattaacaaggatatatatacataaaatttgtttgcaggaaaatgtctaaacaaatttagattaattaattatacaaatttaaattaaatgtgccaaaggaggacggcaagaaaactacacattttaatatgtttttgccacaattttttttaattaattatatatacatgatatggagtctctatatataacaagttgaatatgttttaggaaaatgttcaattacataagccaaggatttttttttttatttgagttcattaatatattttaatgaattataatttgtttctttctctatctccgacttacaatttgtcaaaccattttataaataccaattcaattaattagtccttttcctactcaatatatatatagtaatataaattaatgaagtcttgttacttttctacgtgactagtatcaaaaaatatgaagaaagaaacaaattaatatataattaataatagtaattaagcacacgtacgtataacattaaaaaagaaaaatattttttggtcttatatgtaacatttaatttttaaaaatatatatatatatgcactaccaacatgcactacataaacagaaataattacttacttataattatcagaaaataaaatgtctaaactactaatactagtctcttatatactaatcatcataatacttactaatacttcttcttcttcttcttcattaaaatctaataagttgttcaacaaaattccaagactaggtctcactagagacaggttgttcctccacaaccccgaaacccttccggaagtttcgatttcggaggatttagaaacgtttttctacaaccaaacattggatcatttcaactatagggaagagagttacacaatttttgaacaaagatatttggtgaactcaaagtattggggtggccctaatgctccaatatttgcttaccttggagctgaagcatctattgactatgatatcaatgatattggcttcatcaatgagaatgcccctcactttaaagctctcattgtatttatagaggtatcaacttacataatatttatatacacctaacctaacacaaaaaataatggtatatttctcaaattttttatag

SEQ ID NO: 35202 - DNA, 1534 bp, Cannabis sativa
aaaaaaaaaaaaatcaggattttaattaattaatggaatggatattttaaacttattttttctctgaaatagaaacgaggatccttcagttcaatccacccaaaatatagttaatacacataaaatactctactttactttacatatctatttttttaaaagcaataaattatgagcaaccctatttaatgctttcaaatgttcttttattgatgtttttagtttttaattgttctttataattatatttaaaatgaataaaatattttataaactagaatatttatattttgtttagtgataattaaatggggaattaccccatatataattttttttttaacttttttttttttttcaaattatacggttagggtttctagagtggttgcagagttagttgcaataggagtttctatacgatgttttgttacttgcagcgctagttgcaatagggatttctatgtagaatttcgtaaaaatgtaaaagaaaaaaaaatattttgaagtgtaaaaataaaaagcccctaattaaattataaaagaagattaaatcttaaaatttaatattttttttatatattttaataatataagtaataatttagtagacttttatttttttcaatcttaataagacaaaaaaaaaataatattttacaaattattttaaacctaataaattatactttttaatttattaatttattattgctatattataatttttaaaatttatattgtttgaataaattaaattgaaattcaaaaagtatgtataatataacaactaataattctataaaaatttatatgatttcaaaactattgttatcatcaaatttgatgtagttgccactacagttaaagttactgtcatcattgtatctcacttataatcgtcactatcattctcaataagtttgctctgtatacaaaataaattaaatattgagttcgctactcacttttatacataagtaaacctttaaaagtatctaatcaaaattaatgttattattattagaatatttttatatggtaataaatcaaatattttatttgatttaatttataaaatataattatttatttattaattaattaaaatattctaattatgataagatttaattaccaaattaaaaagttacccgatttaatttttaaaattaattatcaaaatattctgacattaattgttgaagagatcttgaaggaaggtctcacctatataaatataggatttcggtccccgagctcactgctcattctgtgaaacacaataaatccatctaaaaagagtagagagagcttggaagctcgattacccacataaaccagtttcctttgcagatcaaagcttgtgtgggattgaaactcaaagaattaatggttgcaggtatttcgatcttataatttattgtgtatatgttcatttaatttcgcatttgatatacacatttatatatttatatatacacacataaaatgtctaacaattggtactagagcaaattttatatctttgtct

SEQ ID NO: 35203 - DNA, 2485 bp, Cannabis sativa
gcatacttaaattacattttttttacacacatgagtaatatgtctagcacattatttctcagtattatattattatttatataattaagtatcggattccatataacttaaagtaataacttttaaaaaaaatatcactaaccaattgtagagtaccagttctaggtggtgctagacactattagtgtccaataataatgttattttgtttaaagaactaaataataaaatgctctttgtaactaagctagacactcctttcctttggttgaaggttattaattagcaaagagaaaatgaaaattaacaaaccaaaacaataagaaagtatagtaatatgaaagaatgattttttattttttattttttatctctaaattattataattaattaggtgtgctcatgtaacttactatttaaattttgttttgcgtatcataaattttccataacttttcaaaaattggaaaattttaaatttataactatactatacatcacataaaaagagaaaaatctcagtgccaaaaatataaaaaacaatcttaacatatataaaacactcaagcaacatacataatccgaaaatttaatcatgttactaaaagtgttgtaatgtaaaaaattttaattcatttatataacttctgttatattaaagaagaaaaaaaaaacatgagagtggatcgacggtgattgctcgaaaagttttaattttttaagaatacacttttctcttatgtatttctttgatgaaaaaagaaaatacaaaaatcctaatattttttagaaaccactacttatttataaaattaataataatttggtttctcattatattataaattaacttataatatctacacattattttcttgccaatcaaacactctttaatagttataacatagctacttaatgagcactgctactgggcatcagtggtgcctaacacctctaaatatatcgcattgtgattgactagttatacttcctaaaaattattatattaaactatatagaacgcaatacttatttaaactaataacgatattaacacataagaaggtactaatcaccactaattcattttaacttttctcttaattttgtatcacgatagcattatcctttacgcacatatatgcgcccatatatagaattttaatccaacaaacaacactctataataatagcaattttgcaccaaagaatctccctactattattattacacatgaatgatgatacaattttacactccaatattatttatatttatattgtgtgtgttattgtgacttttttctttaatgatatctatatataaatgataagatcttacttaaaaaaaatattggagagattaaaaatcaagcttagttattagttatgaatttaagtataacttaacttataattatatccattctcctttattactataattattaattatttcttctctcttgaaaaacgaagttagagaacattaactagtttgtttgtgttacgaaatagctagctatgcttgaattaattaattaattagaagattaatgaatattgatgggttgcctagcctattttaaagttaatgcactttacaattttgataatttattggattattgacctttaacttgctctaagcctctttttcaaggaattttttcaaagttttgttaattgtctccacatatttcgattaattagcttacagatgagcaacaaaagaaaatcttcaatgtatatcgttgagaatggaaggcgctttattccattctcagagaatatattatcacacgactatccagatactcgagtatgtaactaattaatgatactcattgcgacttacttacttccaaagtttttgttagtaatatgcgtaggtcaggtttcatctcaaaactaaattgacaatgaaataaatagttcctaaattttatattctattatctttctacacattaacaatatgggactctctaacaatttttatatccaaataaatagatcctaaaattcattaggagaatagttactagggcctcataacatgggaaattggtgtgtggtgctccatgatattttatattcctcatgggttgaggtgttagaatgtaaaattatggttcagaaagtatagtgaggtgtacaatatttggtttaattttaaaattacttggtgataagtggagtagcttattgtaatattaagtttcaacacactattaatgtgagattttctaacacgagaaattttacaagaacccatttatatagaattagtagagaattttctccccaaaattgtttcattgtagaactttgccttgttacttttttgttttttgaaaatatcgctcgaacttaaaaacctttacaaatatgccccttctagcattatgttcattttttaaatcatttgttgttgtagccacgacccatgcacatgtaatgtataaatgcagtaagagg

SEQ ID NO: 35204 - DNA, 2340 bp, Cannabis sativa
atatatatgcatgcttattgtgatttgtacactaccagcactagtacggcggcggtactgagtgcattggtatagtgtatgatatttaaagagaaaagtacggtgttgccaatactagtaccggtaggtatggagtgtatagggtataacacttagtggtactcgaggtacgggacaaaccctactaacacttgtacggtagcagtacgtagtgcatatggtatagtggtcgtaccctagtaaagaacgttcttacttaccttataagtcttgtggataggtgtatgggcgcttaaatgcatgttggtaatgtattatttgttatatgcttttcttacggagtctgttgactcatagttgccactttcatgtgtctgtaaaggaaaggcgatggttgtacaagagtgagctctgagcttggatggtgattcaacatgtcgggattgcgcgatctggagtgctcgggctcgagacatcttgggcagtattttgtagtagcggtgagacatgtatgcaaaaatattttggttctatttataaaagtttaaacacgagatcctggcttatgtaaaatatatttatttttataaagtttaataatgttaataaaagttttaatttggctcaatttttgaggaaaaccctttgactagcaaaggttgcaagtcaatgagaaaataattgtagcgcgcctaagtatcacggcgttacaattttggtatcagagccgccaggtttgtctaccaaagatcgtcaggatatgtacaatcattgtcagagaaaagctcgactcacggttcagtaagcctttacttgtttagtaatttatgtgattagaaaagcatgttaggaagcataatagtttataattatttatttgaatgcattgccttaaaatctataagtgcggtatatagagtttatgtgatcactgtctgacccacctgatgtatgggttcacaggcatagtcctattagatggacgccaagcgaaatacaaggagtcggggtaacaggttcgagactagaggcgattagggaaatcaaattccccagaatctccatggacgcgacagaggtagtggaaggttttagggtggtagacatgaaaacccacctcaagctccttcaaaatgggatcaaagatttgcggaaatgcaagctcagatctgccagcaagacgaaaagattctgatgttgagacatgagggtcttcctgcagtgcctccaccacaaattcaggctactttggtccctgcggtgccagcagaacaacttgttactggcaattttatggagtcactgtacgagaggttttgcaagcaggcacctccagtttttgtgggaggcccagacgttatgaaggccgagtaacctgcactacattttatttccaggaagacacactcatgtggtgggagttagtgtccctcgcccgagatgtcactgttatcacctgggaagagtttttaggtttgtttaatgccacatattacaatgaggttgtctgcagtgctaagtggaaaaaattcacttaactggttcagagtgatggtatgtcagtaacggagtataaaacgaagttcgatcgtcttaccaaggtggcttcgggtatagtgcccacggacttcagtaagaagaaaaagtatttggtggatctaaatgcaaacattagacacgatctggtaatcaccactagtgaagcaacaacttatgctgaaatggttgacaaggctctacgagctgaaggtgtagtaaagtttcttcaggagccccgagtgactccaagtggtggtggaacccccgcttttcctactcctgcatttagtagagatagtggttattccactgtcgatcaaaaaagaaaggctaccccagatctggttgttcgagatagattaagcagttctaagggaaccaagggagaggtggacgccaacattattcttactttgagtgcccaggttgtaagaaacatcatctcggagagtgctaccggaaaacatgcttctagtgtgaaatggttgggagttttaagaagactgccctcaggtgaagaaagaagagcagaagtaggaagcaaagccagtacctgcttgggtgtttgctatcactcaagctgatgctgcacccagtccttccgtggtgacaggtcaacttcttgtgaacaactcctattttactatactatttgactttggggctatacactcatatgtggcatcaagagtaatcaatgaattgtgtaggccttgtgattttattgaaagatggtttggaaccctactacctagtggggaattggttatctccaaaaggcgaattaggtctatgccaatt

SEQ ID NO: 35205 - DNA, 1444 bp, Cannabis sativa
aaatattttagttttttaagtatagaaaatcaaatttcccttacaaaacccctccaccactaatgggacaattttactttcgtcagtgtagattatatcttcatttatgattaatgtgtaaatttgtatattttaagcctctagttgtatacataaaattaatttaattagacattttcatgattttaattgtaaaattattttaattgaaaatatttaatttattttaattttgtgttaattctcagattttgagcaaataatggtaataatagggaaatttacatggtatactaaattttgctactttttttacaaaaatactgccagacgatattttttacttttttactgtgttttttataagtttcatactgcagtatactgtgttaacttttcactggtgttctactggtgttttttggttgttctactgttgttttgagttgttctattttgtgttttactgatgttttataaaaatacaatatttctgtaaaagttaactcaaattctagtattttttgtaagttttcctaataataataataataataataataataatatatgtgaatggaaatgttagaactcaattcaatccaagcccaacatatcaacgttaatcaccatgggctctatttatctatcaatatacttcaaaccaatctatctattaatggcccttttatcatcaatttaagtagttggatcaatattcattaattgagctgcgttgtttcagcttagtccacctggtccactcacaagccatcaactaaaacgtgttcttgactttcccacgcctagtatatcatatagttacagggaaattgatatatgggcttatccaactgaagcaatgaagccacttactcagcttttcatgccactttctccactttttttcatgcactaattatatggatcttggagtaaagtttctttataaatgagagccatttacattgtaaaagccatcaaatttttaaagtgaaaaataaactgtcattttgttacttttcttttattattttagtttacttattttagtgataaaaatgagtaaattagagtagtaattttggtaaagttagagtgtagctattgtactttttattcttaatattgatattaatttttttgtgattcatctccatatctcatttattaaattgtttttcatcttttaatttttcttccaaagttaatagtatcttttatataagttcattcatgcttttcttatgtaagtttagctattaatattttggtatatttattatattatatgttgtttactgcattttgccaataatggtattttgtcaatttatgatatataatatgatatgctgtcaagttagaggtgagattcaatttatgcaagattaattaatttgtgcttttaacatatatgtcttccggttgtaattaatggtgt

SEQ ID NO: 35206 - DNA, 2865 bp, Cannabis sativa
accacctttcctcaggtgttttaaattcaataacactggaaggacatttatttatcagataggcagatgtcataacagcttcaccccaaagaccatgtgacagttcatagtgtattaacatacacctatccttgttcagaatggttctattcattctttcagctacaccattctactgtggtgttagcctaacactcctgtgcctttgtattcctgtttctctgcaaaacatgtcaaattcatcattacaaaattccataccattatctgttcttaggttttttatttttctgttagtaagattttcaacaagtgttttctagtcaaatctttgaaaagcatcattttattcttaagtagaaacacccatactttcctagaaaaatcatcagcaattgacataaaataagtgtttacctccatgagtaggtgtttttccagggccccataaatctgagtgtatataatctagtatacctttagatttatgtgtacctattttgaacttcaatctgtgatgttttccaagtatgcagtgctcacagaattctgctttccttactctatctttgccaagcaattgttgctcactgacaatctgcagtcccttctctgctatgtgcccaagtctattgtgccatagtattgctttagcattttatggactttgcaatatgttgttttgttcaactgtgttgttgcttttagctataggttctcctaccatatagtacagtccatccttcatgactcctttgatgattgtcattgaccccttgtaaatcttcatttgttcatccttgatctagctttctattttcaaatcatcaagcacacttagtgaacttagatttttggaaaagttaggtacataccttaccccagttagtgatctagtgaccccatcatgtattttgaatgcaactgttcctgctcctttgatttcacacttttggtcatttcttagtatcactttgccttttgtagaatccctgaaatcagtcaaaatagatttgttgctagtcatatgaaaagtacaaccagagtctaatatccaatcatctttaaaagatgatccaacaacataaacttctccatctttataacagtcactcaaatttacattttgatgatctgttctattgcttaaggtttttggattctcagcttggtagtcaattttctttgcccattgaacttgttctttccattcttgttcaagaaatatcaatctttcttgaaaagtccaggcttcccacagttgaaacacccttctgtgtcttgtggcccttttggataagatctccctttgttgttgtgtcctttacttggtcctatgctatgactatgactttgactccttccttttccatgccatgactttctttatgtaggtctacctctgcttaggtttagtttcccattagagccaccatttctctctattttcatctccaagtcttttgactttaaagcagatataacctcatcaagagtgatagaggttctcccatactttattgctatcttcacttctctataggtttctggcagtgaatttagtatgatgatggcttgattttcatcactaagtgcttcattctcccctgaggttgcaagttcaatatgcattctcaagaactcatcaagattctgatctaaggttttcgattgattcattttgaaactaaaaatcctttccttaagatagatcttattagtcaaagatttttgttaaaattgttcctccaactttttccatatctttgatggtgtctcttctttgtctgctgatcaaattattgcatctgatagattgaatattaggattccagtagcagtttctagatattcttcttgttgaatctttgtagttccttatggccatccaatagtctcatctagcacccttagcaacttttgttgagcaaggagtgatttgattttcctcctctagatcctgtaatcactagtaccatcaaatttatcaatatcaacttttatgttactcatattagtaaaatagaaatcaagcagagttttagaattctcagtctgattattgttttgtgatgtttttacagccccttctagatctgaatctgatccagaattgttctccttcttctcaggatcaatttcagattctgagctttgattttcctccaggtttgagtgtgttcttgattctttataatctatctttcaagatttcttgcctaactccttcctgataatttcttcttggttttgttgatcttcttagccagaccaggctctgataccactttaggaatttcactgtttaaaccctacaccaacaaaacaccaattatcagtatcttaggtcaatcttgacctttcctttgtctaaatgattttagaccaaaaatgacatcacaagtacaatacgaccacaatgctagtgtcgtttaacccaagagaaaaaagacttttgaagaaaaatctagaaatcctaattcatcaaacacaatacacaaaatcacttaagcataaaaactcaaaaccctaacttgctcgatcctatgttagaatcctaggatctttacccacacacacatattagaaaaatgaaaaaaaaaaaaaaacaaggtgagtaaaaggagagaaaacaccagaaattatttcagagttcaccccaaattagagctacatctctgtcaagctcatctcagagatttgacttgatatccactatcaacaatggcgatttacagcttatggagcttcttgtcacaagattttgatcaggtaagactcgattgcttcacttttacagttttgtttttcttctcttttcaactacttgatctgactttgtttttctctttgtgcatgtacttc

SEQ ID NO: 35207 - DNA, 1279 bp, Cannabis sativa
tttttttttttttaaattaaactgtatatgtaatttttgtaatttctcaatcgtgacattttaaaactgtaaaaattacactgtaaaaatacggtacactcctagcattatcgaacattataataaaaatttaaataccaatttataaagttttaacagtacaaaaaaaaacttattaaaattttaatatcataacatataaataatattcattaaattattatattaaattccctccaaaaaaaattataattatttttaaaaaataatgtaatctatacatatatttgtaatggatggtgtattttattgaagttgctgctgtcaagaagtttgggcagctagatcctcttattgctgaagcaatatccttaaaagaggctctaagttgggtgaaaagaagttcggcagcggcggctgcttttgaaggtgtcagggcatcttcaatgttcaaacttaaatatagtgttaaaataacactaaaaaaatataattttagcactaattttttttttatccaaaacactaaaatttacactaaaaaatattttttattattatattattttattaaactatctccacattataatatttatataaatacaaaaatttaatcataaatatattattttaatattaagaactaaaaaacaaaaaaattagtgtagcataaatagtgtgacactatagactcccacatatataggataatatttagagctccattagaataattttgtatctgaactccactatttttgaggttttagtgtcccattagagaagtccttaatcctactgctgtggtagtagaaactgattatctaatgttagttcaagctatttaaagtaacaactagattttgtctcctcctggtcttattatttcagatcgtattattaatcttctgcagtctatttttttgtttcttatttcagttaaatttgttaaacgatttaggaaccaagcggctaatggattaacttgttcttctagttcattatctgatcgtatttccaacggggctgtcctaaataatttgaaagctatcttaatagttgatttgctttaatgaaatttgtaatttttagttaaaaaaaaaaaagataaaaacagaaaatataatttcaactaatgaaataatcctctccaatactcaaacaaaactaatgtacaattaattgtaaaaatcctaccatagaatatcacactatgaaaatcgtcatcgcagaagaatttccagtcaaacaagctaattgtctagccaaagatata

SEQ ID NO: 35208 - DNA, 2077 bp, Cannabis sativa
tggtatcaatcactactgccagataacctatacacccatcttctaataagtctctagctctcaatactgatatgattggaatttgagaaccttgaactcttcccaccaatacaaatggtttctcacccacctgttgaaaacttaccatcttcctcatgcagtcaatactagctgcatacttggctaagaagtccatccccaaaatgatatcaaagtctgctaaagataactcgataagatcagtacttaactccctatcatctagtgtgatcggtacaaccctaatccacctcttggagataactaactccccactaggtaaaagggttccaaaacctaattcataactaactacccagtttatcaattactcttgatgccatgtaagagtgtgtagccccagagtcaaacaatacagtaaaataagagttatttatgaaaagctaacctgtaacaactgatggactagccacaacatctgcatgtgtaatggaaaatacccaagatggagtggatatgaactccttctctgggtctccccttatcaagtgagggcagtccctcttaaagtgtcccatcttaccacactggaaccaggaattcctgttacattctcccaagtgatgtttcttacaacgaggacattctgggtacgcaaaatccaccctgacgaccaccactctgaccacgttgagtcttcctttttgaatcgaaaattgaatcactactactcctacccaaactagaaggaggcaaagcagtgactccataaaaaccctgagtccctcggggctcatgcaaaaactgtaccgcaccttcagctcgaagagccttttgtaccatcagtgcatatggggtagcatcatcggttgtaattgtcaaatcatgatgaatcttcgcattaagcccacccaggtactttttctttttagtgtaatttgtaggtactatacctgaggataatctggccaatcgttcaaacttggtcgtatactccgtcactgacattgattcttcttgaaccaattgtgtaaactccttccgttttgcactacgaacaacttcattataatacttggagttaaacaaatcttggaattcatcccagctgataacaacaacatcctgtgtgagcgatactaactcccaccatatcagagcatcttcctggaactgaaatgtggcacaggccactctgtcgctacgagtgactcccataaaatttagtattcgattcatagtggttagccatttctcagctttcataacatcagggcctcctagaaagagtagaggtccctgtttccgaaatctctcatataatggtactaacccgttgccagctacaggatattccgttggcaacattggtactagagcaataccaaccaaaggaagaggagcaacatgagggccttggtgcctcagcctaacaatctcctcatcctgttgttgtattctagcctgcaacttagcaaacctatgctcccaatcttgtggagcttgtggtggattaacattacccaaaccatgagcctatccacgacctctaccttggcctcgcaaaggagggggttcttagtggccttgaccgccactagttccaaccacattaccccgacttcatacatttctctgggtatccatatgatactagcctatgaacccataagttagtttaatcatgtagtggtcaacataataaacttaagaccgcatacaagagatcttaaacacggacataattaatcaatatatcactaacatgtttccatcatgcttttctaattataaaaacctactaaaatatgtaaagacttactgaaccgtgagtcgagcttatatctgatgatgattgtacatatcttgacggtctagtagacaacatggcggctctgataccaaaattgtaacaccctactagtttaggcgtgctacagtgcttttaaaaattactgtgcaacctttgctaattagagggtttatcaaaagtgataaaatttaaactttaataaataaacatatactgtattacatttataaaatttgggatcccgtatctacatttttcaacttt

SEQ ID NO: 35209 - DNA, 1741 bp, Cannabis sativa
ttatttgttaaatttaaaggcatgtttaagtagagtgttcatgaattgatttagttcagatttttaattttttcaagctaaacaagtattacaattttaaaaaatttaaaactaaatattaatattttattcaatgttataataatttaaaatatacaatattatttaaactaaaataaatatattttcaaaaacatttactaacaaactacaaaaatatataaagatatatgtataataattaaaataatattataaaataaataaaaaaattaaacgacctttgtcggggcgggagtattagatcccatatatcctcacatcgtttaatatttaaggatagaaaattattcatgtttaatagcgaccacttagtaccgacaaacaagtagatcctcttattattatcggtatatccttgacttctcccaataattttaaaatctgatttagtgaccgcaattaggtgaggaattcccaccctatgtacgggtattccgtgccccatacctcaaattaaatttccattccaaatgtaatcacgcacatcatataaattaggttaattaggatttttcccccgaactttatgacatgtatcaaattatgctccctgaacttttttggccgttaaaaattcttcctaaactattgagattgttagatttaaggactttgtctaattttagtaaaaaaattctaacatagattaaagttcaagagacatgatttagtacatattaaagtttgagaagcatgatttggtagaaatcaaagtctggggagcatggtttagtacataaacaattactgaaacagtaaaattgaatgaaattatataaaagttcttaaatctaacaatctcaataatttaaggagaatttttaacagccaaaaaagtccaagagatatgatttggtacatattaaagttcagagaaaaaaaatgctaattagcctataaattatatatgaaacttaaaattttataataatgagataagttttttatttatttatttattttttttgaaagaaagtgccacatgttttattattattattattaataatctctatcaaattaaattgtgatggagaactaatgaggatgactaccccctactccttgtgacagttggtggggaattaatgatgacttttttttgtatgtctttgtttctcttaacaaaagaaaaatatatattaataggaaacatgagacggacatactaaataaaatgagacccataagttgggacagtgggagaggactgacttagacactttagggggccaaattccaccccatagaaggactaacagaaacccaaaccatccatatcaaaaaaaacattgttataagtgtcctaaaccctaaaagatgtattattaatgtaattaaatattgagactcctgtaaatatataactaatataactaaaataatactctttactatttctcttatatctgttcaacacggtaacctttctattatttattacttcaaatttgtagtagtggaagacaaacaccacttatttattgagttgatatgtgtataaataaatattatggtccaacagtatttataggggaaatttgaaaagtcaatgactgttcagtttgagcagtggttgacagagaaatttattgaggttatttttttgctcaaatggtttggtttattggttaagttattattaaagaggtatctgatctacttaattaattaatta

SEQ ID NO: 35210 - DNA, 1582 bp, Cannabis sativa
taagtaactgggcttttctttttcaaatctaagtaaggtaactcttattatgagatttaattattggtcagcgtatttcctaaatttcggacataatttgttgagaggggactttaataacaacttaaatatggtagcatagcatatataatatgaatatgtgaattagagatttgaaaaaatatacataaattttccttttctgtataaaacttaatcacttgtacagttgtattaaatataaaaagggaaagtagaaaaccataaaataattaaaaaaaaaagatgagtaaatattccatgaataatttgggaaaaaaacaaaatttggactttggaattgggcttatagaaagttgacatgtccctacccagcttagactaaatattgggcttttatatgggcttttgattggatctgatcagaatatcagatctgttaatgtaagaaagacatacttaacaaactttatctctaataacaataaaataggaattaaaaataaaaaaataaaaaaacagcttacgcgccaatgatccgcgtaccaactcacgtcaacaagagtcgtcttccgtaattagcgcgtggaaataaaaaatctacaatacctaatattattactaacttcttctacgtacccggaaacgcacatggcttgttctgctcttctatattttaattaaaattttattaattaatttttaaatagtgttttaaaaaataattattagattttccgacattaatacaaatcaaattaaacgagtatatatatttaaataaaaataaaaataaaaataaaaaatagacaaggaaagagataacgaagaaagccccgctaaatttgcttataaggtcattactttactatattaagtgcaaaagccgccgagccgagccgaggtgagctgagttgagccggtgattaacttcttcttcttcttcttcttgtgctccggccacacctctttccataaccctcgaaaacactctctctctctattttcactactcgaaccagagagagatttcagattcatcctctcatgtaatctaaatctagaagatttctcattcatatatatatttgtttgtacgtatagaattgtgtgatacagttctatacaaaaaaaagttttgcttttgtctatgtctcgaccttcgaaccacgagtttcaacaatggtggaacaagcaaagagagacgaacccagaagtactccttctcaagaaacctgacgagacagctaatggtttccttagcctcgagatccggactccaaccgccgaatctacggtcgagaaggagcgaacacggagcgctcgtcagctctcatgggtatgcctcttgaaattccagcaaatcgctggttcgctcgcttgggttacgaatggcgtcgttttgcttctccgtactgccaaccgacgaatcgcgtcccccaattccccagctgactcgtctacttcgcgtctctatagagcaatcaaggtgtttctggctttagttttgcttcttctagggtttgagcttcttgcttacttccagggatggcattttagcccgccttctgtcggctcggct

SEQ ID NO: 35211 - DNA, 2856 bp, Cannabis sativa
  modified_base (246)..(248): a, c, t, g, unknown or other
gatttatttgttcttgaagctaatttactagaaaatgataaatctttatggattgttaattctggagccactaatcatattttttcttctatgcagatacttgattcgttaagggagctagctgatggagaggtgactatgtgggttgggaacggagcacaagtgtctgccaagaatattgacaacatttgtttgaaatcaaataataaatttttgttattgaacaatatttattttattcctgannntaccaggaatattatttctttatctcttttacacgaataactatttaacattagttttattaataatgagattattatttctaaatttggtatgcctttttattgtgtaaaacaaagaaacagaatttatgtgctcgagcctagtgaacaattaatttaaaataataaattgtttagagtagttttgtctcactccaataagaggcaaaaggtttcaaatgatgatgaaacgtatctatggcatctacgtttaggccatattccccaagatagaataaaccagctaacaaagaatggtcctttaaaagaacttaaaattgaaactctttcgatatgtgaatcttgtctagatggcaagatcgctaaaagacatttttctacaaaaggcaatagagccaaagaacaagttgaacttattcacactaatgtgtgtggacctattaatatttaagctcgaggtggttatgaatactttgtcacttttattgacgattattctagatacgatcatacttacctattatccaagaagcctaaaacttttagaaagttcaaaaacttcaaagccatggctaaaaaacaattagataaatcattaaaaatgcttcgatgagatggtggagagtatttggattttgaattcaaagactacttgctggaagaagggatcttatcccaacttataacacctgaaacacctcagtagaacggtgttgcatagagaaaaaaattagatcttgttagacatggtcagattgatgttgagttactcatcactgccactgaacttctgaggatacgcactttaagaggctacttaaattttgaatctagtgtgccctcaaagtgcatgaacaagactctaatagaattatagaatggaacaaaacccaatttgaagcattttcgtatttggggtttccctactcgggttcttaaatcgaagactgagaaacttgctcccaagtctgaagtgtgtatatttgtgggttattcagagaaaactcgaggtggatacttctatagtcatgaggacaataaagtatttgtattaataaatgttatattcctagaacatgacaatataaaagatcacaaaccacgtagtcaagtggttatcgagaaaattataaatgagcacatttctgaactatcaacttcagcaccattagttgaacgagtgacagcaattaccatagttcctaaaagggaaaccctggtacatcatctcgtagtggaaaggttgtgaaacagcctgtccgctataaacgtgaagcacatgttcttgtatctgacacaaacaatgacgatcaattgacttataaagaagaaatataaaagaccctaacttagacaagtggaacaataccatggatcaagaaatagatttcatatgcaccaacaaagtctggaaatatgaaactccacctaaagacgttacactcatatagggtgtaagtggatttttaagaagaagaaaaatgttgaaagaaaagtagagacatttaaagctaggtttgtagccaaaggctacacacagcaagaaggcgtcgactataaggagttaaggtcaattttaatccgaattcaattctgtaaaattctaacttacatattttctaagttttaattagtttaatttatttccccatataatatgaggacaaaatcatagctcctaatataccctagatttccccttactagatatgtacaccttcaatatttttcatgtagattacatacggtatcatagtatttatattctccttttttaaaaaaaaaaaaaatattcatattcttattaattcaaatattatgaaaactttctatattttttgataaaatcatacaccaattcatccaattatcaaaattttattattagattaaataattatatattaaagtcatttaaaaaataaatcaacaacgtggttttatttattaatattaaattatttatttcaatattctattttcaataattaaagtcacttgctatgttgtcgacaatggtactagataatgttcaacaagatacacttatattggtcaagcacattatcattatttttcacaagattttattagctgatttttcaaaatttgtatattaattaattaatcaatctaacttaattattaatgctaagccctagctgtatataaatttgcaattgtcaataaggtatgagattgcttttacactcaaatggttcttagccaagatggagttgaaaatttaccaccattcaaaataaacatgcacacccatgtcataatatatataaataaatatataaacatgcacatatatgtgacatgtgggggtgtataaaagaaactatgaatgtgtaattaattgtttatattttatttttaaaatatgaaattagacatgatgcctaatataaacatgttgtcacataaaaataatttaaatataattttttaaatatcaaaaataaaatacaaaaaagttctccatagaagaagcaaaagcaatgcttctaactatgaactttcctattaatatatacaggacttttttactttggagatttaaaaaaaaaaaataccttatttataggaatttaaaaataaa

SEQ ID NO: 35212 - DNA, 1173 bp, Cannabis sativa
ccgccgctactagtattagcggcggagcaattgcggcggactgcccgccgctaatacttttcaaaaaatataaaaattaattcggccattattagcggcggaccccattgtcccccgctaatacccctgttattagcagcggagagtgcccgccgctaatagttccgccgctaaagggtgtatatgttgtagtgttatttattataagtacatattattatattattatatataaatatatttctttaaatgaatcatttgaataaattaaaatagaattttctagcaaaaaattattgaaaaaaatatataaagcctctatttgatagaatatagctcgttatataattttaaaattgtttccactatcgtattttgcttgtagtcatacattcaaagtcattatttgaaagaatctataagaaatctcacatgtagttaccactacattcaagttctatttaatagaaattgttgctttgagtttttcttaaaattcgtggccacgataacatatgacacgtggaccaaaaagacacctcacccgagaattagctgagtcatatgtaggcgaacaagtgtagttcgacgagtgagcccccagagatgtgcaaaggcatgtccttcctcttcaggagctagagatatgatatagcatctccaaagggaggaggacatattcgaacaatcacctcacatttaatgcagcatgggaaaaacgtctaggaacgcctataagaggacatgttagacgacgtaagcctcgtttacgacgattacacgatattcaaaggagctagtggcagctccattatgaagaatcacatcaatcatggaaggataaagattaatcttacctaatccctatgatacctacgacataggttatgcatcccctattttgtacctcttgggaacttatgctcatacattacgggcactcaaagacaagttatcccttttgaactattcctaccactctctataaatacccccgaggaaaataggaaaagggggatggatcgaacagaaagaaaaaaaaaactcaccaagaatattctgtgtataaaaactctcattaataacaaagactcgtggactacagctcattaatgcccgaaccatgtaaaaatcacttgcattaattatccctaaagctctcatcattatctc

SEQ ID NO: 35213 - DNA, 3889 bp, Cannabis sativa
  modified_base (3833)..(3864): a, c, t, g, unknown or other
aagagctctaatagtgagtccagctaagggcattgagagtttacccaaggcaaggacgcagacatatatcctcgctttggggatcctgtaaacagttttagactagtggaggaattagaagaagtagagatccatctatctatgccggtcaagaaactaaaaattaatcgaggtttagcgccagaaataaaatctggattgatcaagtttctaagagcaaacctcgatatgcttggtcgcatgaagacaaggtgaagatcaatccatcagtgatttctcacgccctaaatatatccaaacttccatccaatacaacaaaaatagaggctattggataaagagcaagcatcaagcacgagcattgaaggatgaaattgaaaagttgtgtgcaaataacttcatcattgaagcattctaccatatttgggtttccaatcccgtattgttacccaaaccacacaacaagtggggagtgtacattaatttcattaacctcaacaaggcttgtccaaaggattatctcctacttccaaggatcaaccagcttgtggacaccacagctggtcacgagatcctaagcttaatggacgcatattcaggttacaatcagattaagatgtatctacctgaccaggaacacacaagtttcctaacaggtgtaggcctatattgctacaaggtgatgcccttcaagctaataaaatacaacagcaacctaccaccgtctcgtcattaaaatgttcaaggacctaatcagccataacatggagttctttgtagatgacatattagtcaagtccaaaaaggttgggggcacatagaagacctaaacaagtgctttaaagtcctttgagaatacaagatgaagctcaaccccctcaagtgctcgtttggagataacttaggcaagtttcttggcttcatagtaaattcccagagaatcaaagcaaaccttgagaagatccaagcccttttggacatgaaatactccacgaatattaagaaggtatagagtttaactggccagatagcagcactaagaagatttgtatcaaagtccactaacaagtgtgtccctttcttcaatatcctcaggggaaacaagaatttagaatggacaaatgagtgtgaagttgcctttcaagaattaaaaaagaaactatctcaacctttcatcctatcaaaacctttagataatgaagagttgtgaatatacctagcagttacggacttcgttgtaagtgcagtcctcaattgagaagaagatggagttcagcatccagtatactatgttagcaagagacttatcgatgcagaaattcgataccttacaagcgaaaaagccaacatgttgcatgctactagcttcaaggaaattaaggtcttactttcaagctcatcccattagagtatacaccaaccagccactgcgacaatagtgagttgcttaaatgggaaattgaattgggagaatatgagataacctaccagccaagggtagcagtaaaaggccaagctttcaccgattttttggctgaatgcacaaatgtaactcctgaaagctctaagcaagtataagatcataaacaaaagacaaagaagaactgagagcaagagcaagaaaaattgacatggaagtagcacatagatggttcctacacggatcaactatctggcgcagttattttccttattacacctaggggcagcaactgcatggtgccataaagtttggtttcagatattcaaacaattaagtcgaatatgaagccattatttccgaattgaaattggcacacaaagttcgagtagagtacctaggcatttttagtaactctcaactcgtagttaatcatgtcctaggtgaatacacgacccgaaaagaaaagatgatggcctgcctaagtaagatacaagacttactaagtcatctcaaaaggtgcaccatcaaacagatcctcaaagaagaaaatgccacagcagatgcccttgctcggctagccagtagcacagcagcgaacaagaccaatatggtccctattcaatacctacaagacccaagtatcgctattccagaaaaattagatatgttggatgatagcccaacttggatgacaccaatagcagcgtacatctagtcaggagtcctgctagaaaacaggaacgaagcaagaaaaataatgaggaaagtttcctggtatctaatcttagacaaaattatgtacaattgtagttttttaatgccactcttaaggtgtgttaccaaagaaaaagcttcacggctactggtcaaagttcatgaaggtttttgcggcaatcacattagggggcagagtctgttaaagaaaatactcagacatgggtatttttggcctacaataatcgaggattcaatggactttgtcaaaaaatgtaagaagtgcaaaaggttctctaagatcccaagagctccaccaaacgagctcatataaatgcagtcttcatggtcgtttgctatatggagaatagatcttatcgggcaactccccaagggaaaagaaagagtacaacatgccgtagtccatgtcgactattttataaaatggactaaggccaaactactggccactataacttcaaagaatgtcctagattttgttgttaaaaacatcatctgtcgatacggcctcccacagaatattgtatcagacaatggtaaacaattcgacagcgatatgttcactggcttctataatcgacacgatattagtacatgcttctctatagttgttcatccacaagaaaataggcaattgcagaatctataaataaaaccttcaaagacacactaaaaaagtgtcttgaagaggtaaagggaaactggcctgaacaacttccagaagtactttggtcatacaagaccaccgagaggatgaccacctagaaaataccatttgctttaacttaaggctatgaagcaatgctgcccgtaaaattagaaccaccatctcgtaggaggatattcaacgaccaagaagagaaccacacttgcctaacataatcccttgacaaaatcgaagaaagaagagatcgggccaacttaaagttagaagcctaccaacaaaaggtggtcaaatactttaataagcacgtcaaggatagaaaattctttttgggggacatggtacttcgaagagtattacaacacaaaataaaacaaatcaaaataatataatataggatgatgcttatctgcagtcacaaaaaatatcttacaggtatttttttttagtatgtattaccttattgttatataaactctatatttagttaattattttatattcctttcatatatttttctttgttgaaatattgttttatgtattgatacttataagtatcttccattgacttactagcttcataagttttttctactcatattttggtaaaccttatttatttaatattttttataatttacatccgattcaatgtaattgtaatatgatattcaactttttgtaattgaatggaccagtttagcttaagtagattggtttaaatattacccacctctaatgtaattgttaaaattaccatttgttaattttataaatatttctgcaacaacatatatatttcaatgacattgttttaattatgtatatatttaaaaaaaaatcctcttatctaaaattagaaattttccaattttaaaaccatacagtatatttaccgtaatatatatatattctatataaaatgtggttatgtaacggaatttttgatttaataataatttttggatttttaccttaactttaacagaatattctttattaattttnnnnnnnnnnnnnnnnnnnnnnnnnnnnnnnnttatatagatattttatataaagaa

SEQ ID NO: 35214 - DNA, 1927 bp, Cannabis sativa
ccagcctctaaccaaaccaaacactacctagtagtatagaaaagttagtttacctttagttttgtttattttttgggttgcaaacaaaatatgtgtacttttattttcttgctttattttgtacaaagaaaaaaaagatatatataaaaattgagtcaactgggttttttttggctgaaaagattacatggtattgatcctttccccactttaggttgtgcaaactataggagttttatattttaatctatcttaattaattgcatcatcagtaaaatttcgagagttcctataaaaaaagatagtaccacttacagttagccttcatgcatataattccttttaaaagaaattatggtaaattttgaactcttatataatctaaataaaaaataagatggcaataaaaacaatatcactatacctgtggatatattgagtcaactattatatattcatatatgttgctataggtttatatatagctaggtttatatatagctaggtggatcacaaagaacatcatgtgatgtatgaaattatatatccattttcccttctaagtatttgcatatgattagatcaataatggaaaataaagatctaaaagctaattaataagtgtgatcagaaacaatccaaaaaaaaactcataaatttattaatgtatatatttatcaacttttcatgtgttggccagttgtctaccaatggcttgtgatgtgggaatattttttagcactcattattaattttaaaaaataaaatcaaaatgtataaaagtggagagaagaatcacataactttaggattaaaatatacatcccatcctaaaaattgtaatgggattctcctccttcctagctataataacatattagaaaaccctaaaataataatagtcacataaataaattttatagtgcttctacaatatactgatgtatatatatgatcttttacttgcttcggtattaaaaaataattatagtttattttttaatatttgtgtacattataattatttaagatatgctacaaaattttgaacaattcaaaataatttataatataaaaagccgcattcaaactaaatatttcacacgcgtataaaataaaatagttacacgtgcaacatacaatttgaatcctacttttggcatattaaatttttttcaaatttgttaatatcgtacaaaatgtcttaaataactataacgtacatgaccataagaaaaaatttgactaaaaaattatttcggctggatataccaaaacaaataaaagacatcaatattcaatataccctctagtccaacaatacatttgaccaatcaaattatattttagttataatagagttacattagaagaaaaaaaaaaccaaaataccaaaaaatattaatgtaacaataataacaataaataattattaatattatataataatagaattatttttgagtaatataattttatgaatgtataacaatttggaataaaattagtaattttacgcaaataaatttacaaaatatgtgtatatattttattgtaattattctaataatatagaaatatactttgttaatatgagatttaaaaaatgcataattaattacaatttagagattttttttttttttttataattagcccaaattttaaaacttaattttttttataacaaattaaaaattattcttaaataaagattctacggtatctcttttaaaaaatttattgtaaaattttcctaaatcatattaggcatgaaaaatatagtcaaagtagagtttctttcaacttttttaaattaattatttaatttccataaagcaccaaatattttctaacacaatagtggaatcaaggaaacaatatgcatataacttagatatgaatatatatatcatcacttttttta

SEQ ID NO: 35215 - DNA, 2039 bp, Cannabis sativa
  modified_base (1988)..(1994): a, c, t, g, unknown or other
atcaaattattagataatatccaataatgtttttgacggttggttgtaattggatcgatcggttgtaattgtattggatgcactcctaattttttcaaatgtgaaagaataaagaaaattgaggaagatgagaaaagaacattcaattaaaacaattgacaagcatgatatgaacgagctatccacctgagcacaggcaatagaacagtaactaacaggtcttattgactatgaaagaggtgtattagtgaatggaaatatggaaatcaaaagcaggaaagctgttggtccttttggaccatgctgagaaatatctcaattcttgcataacctctctcctttactcccctatatagacactatcctatttccccattcaataactaccctcaatgcacaatccttttattcactataccctcccatactctcctaaacatagggtctaacagatattgaaatatatttgcaaaatacattatctcgtatagagtcctctattaagactatttctttatactaagggaaacaaaatctattttataataaccattgggtatacaagggactatctatactggatttaagcagagtgcggaacaattttcagtagttcttttccaattctgtttattgcaattaatttctactgtaatgttattgttttcatgtttcatgtttgtttttttcactttgagactaacatgatcatgatcctgccttttgttctattgattgcttacaaagttccattttttttaaaaaaaaaataaatgtattgtaagtattttatggtaccactttctagccactgtggtctgtatatgcaacttgtgtacggactttcatgaatgtttaatgtgatgaatgttttcttgtgctctaactaatccatacatgatcacattttcttctcttgcatttcatgtagaattcaggtactaatatagatcggtcgaaaggtcaacaggcggcgctcttgatgcaagaaaacaaaaaatggcttgcaaagtgagtaatatatggctgttttctttctacctgaccctgattagctcaattttgttatatattattaactaaaatctttttaggttaaagtaataaaatgtttcttttcttcttcagatgctcggagtatgagaaagaggagaaagaacttcttgtcaaggtacttacaaatttttaggaaatttattgcatgtttagtgagctttgtcaatctatagtataatgtgtgaattactttttttcaaaaagatttggtttgatccttaggcatagagtttaattaggcactggaattggaaaagagttttgacatgaaatgcaattgaaaaaaccactttttaaatttttcatagatacagattcttattgctgtgcaggtgacacaactcagaagccaaatagaagagtttggcaatgagtacactcggttattggcagaattacaagcaatggaagcagttaagccagaaaagtccatttcatttaattctttcatttgttaaaaccaatgatgtatatccatagatggatgagccaagcaatttctagcaagatcttaggtacgtatgaagcagaaatggtagcccccaatagctggtcctttttcttttcttctgtatattggctaatgtgaatatcataaatgaggcttgtaacagatgagtgtctaggttagctgctttcacataatacacaagtagagaagtgtgatgtacttcaactttgaaaaagaaaaaattaaaaaagaagataaaaggtcaaatgtctaaactgaccacttaaatttattatgttagaaaaaaaccataattacaaaatgtataaaatagtttaaagaaaaacacaaatcataatagttttagagcaagcaattaagtagtttatattacaaaggattgaagaaaaaaaaatattgtatattattttctatctctttgcaacttaggatcagaaatatatataattatatatatatnnnnnnnaggtgattgttacgtgccaagccacgtagtgttagttttatttaa

SEQ ID NO: 35216 - DNA, 2167 bp, Cannabis sativa
attgccatgttaacttttagtagttagatttttggttcaaaacctaagtccccgattgtgatttagcgtgtcacttatccatgttatgaatgatgtgatttaggagcctataatttgccgaccagttgttccactcaggttgggcggtacacctgaattcggaaacaatgtatgatgagtataatgtaatgcatatgttattacatgtttagcatacatgttgtttatgcttgttaaagtacattgatagcagtaataacatacatagagttgtattaattactgataaatgtatgttggctaaaatactaatcgatgctgtcacatcaatatggctagagtatgactggcatattgagtataggctgacattatggtcgatagtattatcatatgaattttctagactcagtaccgtgtgggatacggggatagggttatggttgggtgtatgggcgcttgattataactcgggatattattatgttttatgttatgcttttcttactgagtttgtccactcacactgctattcccatgtgtaggttagggtaaggctaaggctgagcagccatgggagagagtaggtgaagattgtacgtgtcggggcgattaggcttggagcgtacgatctttggatcatcagggcttattttgtatagtcgctaggcgacaaacttttgtatatgtacagtgaaacttttgtaaatgcttttgtaaacgagatctgagaattttttatgtaggttactttatgtttttaactaaataagtaaaattttaattaatcacgatttttcgataacctcattgattagcaacgagctccacggtacgttaaaaatcacgctaacatgcctaaattagttagggtgttacactaacaaactagctcactcaactaaactaactaacactccaactaacctctaactctaaatagcttgataacaacagttaacttttttgacaatttatgcatggaaatttcaccttatttttatgaaaattattatttttgccccttaaacttttgacattatctgatcttgcactttaaaatatatgaattattaaaaatttttcctaaaataaaacagttacataattatgcttttttttttgtttgagtgacatttgcatgttacatggccaagtacagttgcatgcaatatggccgagtgacattttcatgttacatggctaagtgagatttgcatgttacatggctgagggacatttgcatgtaacatggatgagtgacattaccatgcaacatggtcgagtgacatttgcatgttacatggccgagtgacatttgcatacaacatggccgagtgacatttgccttttacttggtcgagtgacatttgcacgttacatggccgagtgatatttatatgcaacatggtcgagtgacatttgcatgtttcaaggtcgagtgacattagtcactcttcttaggaagagtgacatttagtcactcttgggcctggtgatttccatcatattgtctctcatgcattggttagttaatctcgggcattacaagtgtcaatttctaggattaacaaaattcaataaataattaaattaaattaaaattctatgaagaaatatatcaagcttatttgtgtttacaaactcatatcctaaaaaaataaagaaatataattagaaattcatttaaaaaaaaatagaaattaaattccaaaaaattagtatatttacttaaacaaatctaaattttggagaaaaaaaatagacacaaaactgttattgtaaaatttaatttttcaaaaattgaatttatagaatattttaatttatatttaaataattttttaatgaaaaataattaattttttaaatcgcttaattttttttttaagaaaatatatttttttttttaattttgttaatcattcaaaataatttcttttaaatctaaattaacctttcaagatttactaagaaaaaaatgtgaatctttctcttttttattcggatggggtaagatgaatagttattaaagtttaggaggtaaagttattaaattataaaaacacattaacatttaaatagaataatagaagataacttaaccaaaagactaaattttagtaaatgtaaaagttgaattaaaatttttaacaagtcatatatt

SEQ ID NO: 35217 - DNA, 896 bp, Cannabis sativa
aaactaaacctaacaatgaataacctaggattaagctaaagaagtcatccattttctttctctttctttccttatgtcgagccctagaagaagctaaaaaccagggaaaagctcatctcacttcatcaaattcttgatcaaacctttaaccctaggagctagccaagttgaggtatgatcttacaaaccattttctttgattttcttaagttctagtttaggttttggtaagggttttaaggattttagggctagagtaaaaactgaggttagaatcggttcttagggtcgaattgaagcttgtttaagtttaatttggttagagataggggctgttttgtttgatttgagttagaagcagtaaattgagcttaacatttatttgagaatgcaattttgagtaaattgataagttgaggtgaattggtgatttggatatgttttatttgttatattgaacgattctggaagagtatagcaattttggtggaggttggattggatttcaaggtgaaaaactaggtttcccatggctgcccaaaaaacaggtcgactggttttccaagtaactggcaaaccggtcaaccaattttgccagcagggggaaatctcgggctttctcctcaagtctaattttggttcggggtatcttttggagtgtaattcagtgtatttttgggatatttaagttagtttgatccaggtggaaatatgattgttcagttatgagaattagggtttatccccagaaatttgattaaagatttttaatgagttttggttgtcgtgacataggaccgggatcgcctagcttgttttccactcaggtcagcccgcacacttaagttctggactgaggtaagaaaaaggggtatgcatcacttagggttaagtga

SEQ ID NO: 35218 - DNA, 1769 bp, Cannabis sativa
atcaaaatttagtttttctctaaaatagaaaaatgaagaataaatttatccaaaatatgacatacaacagatatttttattttacatgaattttacagtgatgaataatattgttttacattttaatttttttttatatatatgtgtgtgtaatatattaatattatatatctaaaatgaataaaatatattagaagatagaatatagtgaaagaaataaagaagttgatagatgatataatataaaaatttgttgtaaaataaataaagtaagattttaataatgtaattaaaagaataaaaaaaattatagcatgccatatgttatgtgattatttttaaatacacaattaaaattaggctaattaggatttttgtcccttaaattttgatatgtactaaatcatgctcctgaacttttaagatcgtgaaaaatttcccccgaattattaaaattgttggatttaaagaattttgtcaaatttcattcaattttactatttcaaagattgtttatgtactaaatcacgctctcaaactttgatatctaccaaatcatgcctctcgaattttaacatgtactaaattatgccctctgaactttcattcatattagacttttttactaaaattgaaaaaaaaaatccttaaatccaacaatctcaatagttcaagggcattttaacgaccttaaaagttcaagagtacgatttagtatatgtcaaacttcaggggacaaaaatcctaattaactttaaaattaatatgatttatattattctatatatatatttattgtgtgtgtgtaaaagttgcgtataattttttgtatatcttttgcatttttgtcaaatgatgttacttgctaaatgatatgaatatagtcttaacattagacagtaacaagtggtgtcttgttctaaaacgtgtggaaactttaattgacttttcaaagtgatatcactgattacctctatgcctcaattgatatttcaataatatcttttctgttattactacatgttagcaaacaagcgatatgttttggcatcaataactatttgcctaagagaagctatagcaccaattcctaccaacactgatgaagccactactataactgagtttacccaaaataccatgccacgctttgagggcttaaatgttacattgtagaaaatcattggcaatataaaatccaaaggaatgcacccaaacgcaccgaacaaagccattaaatctccgaagaaaggtaacatggccgcaaaaagtgttgccacaataacagatagtgaccggaatatcagccttggaattatgtttcgggtggagaattgctccatttttgggtctgcaaacttgttttcaaacacttcatttgttggctgcaagtatacctatccataaaagtgatttgtagtgatttagtttggggttttaaacaaaaaaagaggacaaggagtaatgttatgttaccagagtcacagccaaaacttgtgtaatagtaaagacattggtgatgacaagaaaccaagtaggaagcaaaggcttattatcaactcccatgaaattggataaaactgttccttcagcttggtttccaaaagcccaatatccagatactcctacactgaaatatgttactgctatcacactgtagcatacacatagccccttgaacatttttccttgtactggggctgctattgttgcctacaatgcaaattaagtagtcactcacacatgtcagtatttcttattttcttaaa

SEQ ID NO: 35219 - DNA, 3426 bp, Cannabis sativa
agctccaaaacaaacctcgtaaattgtacatggatgtgtgagcattgtgtatgtgtgcgagatttgggggctcgcttgtgagcccatgagggaggctcgcatgcgagccgtggggtgtgtgtttgcgtaggttgggggctcgcatgtggggagctcgcatgcaagccattgtgttgtgtgtgtaacgtgcgtgcgtttgtgtgtgtagatgggcgctctcgtgggagcccatgtgggggctcgcatgcgggccgtagtatgcttgcatgagtgtgtgagttgtatgtgcattgggggatcgtatgcgagccgtgcatgcatgtgtgtgtattgagtatgtgcattgggggctcacgtgcgagcccgtgtgggaggcttgcatgtgagtcgtggcatgcatgtgggtgtttgtattgtgtcgggtgagttgcgtggtgtatgtgtgttgtagatgtaaggtgaaatttaaatgcgcgctgaagagaatatcgttagaggaggaatcaaaggacaaggtttacaaccacgcctcctaaactctaagatttagtggagggaatgcacctgcaaggtctgaggacccgaccaagggtacactacaaccatcacctttgcgaccagggaccacctctgcgaccgggaaccacctgacaccggacaaaggtacgaggcgcaagatgacctcctgcacctgcaacttaataaagcgacagtttgtctatttggaaccaccatgtaactcaagcaattagagtctataaataccccattcttaaatgtgagagggggttggaagatcagacttgtaacattacattgagagcaatagaaagtttatcattttctcttcattttaagatagtaatttgaatttatatttcatttttctcttcatcttagatctgagcttgatgtatagtttagttttccagccaacatcaccatcaatagtatgtaattacataggagaagaatgtctcttaaataagaaataggcaatacaaacttagctcaaactgttacaaccgaaatagttataaacttaactaacatcctgcttacaacaactacagtagccgataaaccagagaaatacatttgcaaagtacaggttattctaagccaactataaattcgaattaatggagctagctaattaggcattgtgtttcctctatacaaggttactctatcttcgagtatagaaggtggtgatatcagttaactattatttattaaccccataaatatctacctatacttgttatttctatacaggacaacgaaataaataaagttatccttgcatctctgttgaatatataaagaaaattaaagactcaaaaacctcgagcacgtcatgtagataacagagaaatgatcatgatattaataattctcgtctctattgagtaagctacacggaatttaaatatatgttttctatatatgcattttaattaagaaaaaaaaagaaaaagaaaaagaaaaagccggcgaaagacaaattctatgttgtataacaaaatgacccttgtatatttacgcgcgtgactactcgaaaggtcgtcaaattataaccagtactacattatacacatacaatattacatataattaaaaatgtacagataattaaagagtagcagtagatagatagaacttagaggcacccatgtatatactatatcagaactatatatatgtataattaattaagcaatttattagtcatgttgttatttcaaattaatgatgaataagtatagaaaattgctaaaaagtaccataggttagtgtttaatatttttttaatgtactgatattagtgtaatatttaagtatcgagtcttatataatttaaaaaataaatttttaaaatatcgctaaccaatagtactagacactatttatatgcaatacggtaaatactattttagagttttgcaaaagttactaattagaccttgtattttttaaatgataaaatagatcctatattttccaaaatggtaaaaataggactctcaattttcaacaattttattttttaatataactaactttaagataaattctaatatgaacagatatagaagatataactaattttgtcataacatttttagatcagattattattaagttttattttgacaaaaaatcagtttatgattttatttgtactattttaataagtatatgacttttactcaaagaaagtataattatatatggaatattaattatgtagacggcatgaaaaaatggacgtagtcacgagtaaataatgcatcaaggtacccactcttggacggtggataatatataggtggtctaataaactttggcatgagagaaaagaaaaaaaaaaaaaaagagaaaatagtattaagaacaatcaaatgtgacaagcgaaaagtcactttctatctcttattattaattactacatctctttctttacgtgtcaaacaaatccaaacccttttaacaactctttctctttctccctctcatcactcttctctcacagacggttttgttgactccttttctttagccttgactataccactcagtgcacgtaactataactatagaataaaatgctcttcttcttctctaaattactcgtttttgttttttctccaactttatctctttttttgttctgttctcttccggcttatatgtatgtatgtttgaaatttaaagtcctaacattgtataaaacattgacaaaaaacaaaaaatgatatataatatgtaaccaaacaaaacaactttcatatatataattttggtatgtttatgattatttaattaattaattaattacttgtccattcgttatatttataatagatatgacaacaggttaagcttttttaaaaaaaattaaaaccatataaataaatatattcgtttttctcgtaggataaacattaataatacacattgaataatctagataaatattaaataaacttccctttcttcattttttcctatttcttcttctgcaacacttggttacattattatcaagaaagaatgaaaacaaaaaaaacagttgtgtttaatccaactgtgtcctgccacaaatgtggagaaataactgaaaaagaaaaactatatattttcacatattttttttttgttctttataccaaagaaaagaaaaattctctctcaaaaaataatgaagcaaaataaagaagaaaaaataaataaaaatcggcaagctcccgttaaggtatatatataatagtatagatactagctgagctcaaacaagctagctgctgttgctattggtaacattgacattatttccgttattattggtattgttgttattgttgttactcacgttattggaatgagtcccactaatgatcgaggtgatagcggcggctaaag

SEQ ID NO: 35220 - DNA, 1439 bp, Cannabis sativa
aatattatcttacatgtattacacaatatatccactacataaaaatgtattttatgtggcaatatacttaagtgaataaattataaccttatgtttattttagttctcttatgataattttctcagataaaaaattaaggtacacgtaaatataagaaaatatcagttgaataattttagttgtacaaccaaaaatctgtgtaactaaatcccatatttactttacgatccttgaatttgtgttgcggcatgcctttagtcaaggatatgcgatcacctaatttagtagtgtgtgcttaatgaccacttatcacgcctttcatggctaaatacttaatattgatatgctagcttcgaattcttatccataaatactgtagctaaatttattacaaaattttcttaatggcctgaaaaaataattctaaactctaagcttagtatgagactctataatacagcatacgagatgtatcctcaaaataataattgattctgacttttataatagaaataacaattaagattcttcacgagacaatttattggtaattttaaggacgtaatcaaatgttgattatagccaatgaagtatgatgaaatctaataggctaactatatttctagaatatcagttcatctcaataaaatatgtatgactacaatatttagtatcttaaagatacctcattatttttaatgaaaaataaagtggtattaacttcagttatattctgatactacttaacaatcttgaaacaaatacaatgtaaagtcttatttagactcttaagcctacattaggcttctaaaaataaaagcacatgaatgttcttaatttattctcattccagatcatctcacaaatgctgatttgagttgaattaattacaattaagataaaagtaacatgaaataaataatacataattttattttatgagagatgttgtggctactctctaattaatataaaattatatatgttatttatattctttatctgaaaataataatttgagatatgaattattttaccttacaaaaaacttttatcattatttacaagtaatattttatctatgtataaaacaaatattactcacaccgaccttctgatatataattaatttcatgcatttttcaaaactaaacaaagttcgtgttattctcttttattattctagtttgaataattagaaacattttatactcaattcttattggaagatctttagcggattgtcattgataggtgtgatatgtcacatgttaattcaagatgcaaatctagttttcttcatattgtttttatgctttatggtgggcgacatggatcgtttagttaaagatgttgttagggtttttgttttgtttttattataaaatgcttggttagtcttgaaaaaccgtgtttttgcaaatgtcagttgtatata

SEQ ID NO: 35221 - DNA, 1514 bp, Cannabis sativa
tgtaacagatacagttaagaaaaagcagttaaaagcaacagtgttaactaaatcaactaactgtatttacatccccccctcaaactaaatggtgtattcacactttttagtttggattttaagtataaaattgatcagtaggtagtggttttgttgagacatctgcagcttgatctaatgaagggacataccgaacagagacttgcttatcaaaaatctagtcccttacaaaatgaagatctatttcaatgtacttggacctggcatgaaatactggatttgtagcaagtgccgaggtactttgattgtcaacccagatgacagggatttgaacaatcgaaacttgaagttcctacaacaatgaacgaacccacttgagttcagcagctgcattagcaagggctctgaattcgcttaaagtgctggagcgagctactacgtgttgtttctttgcagaccagctgattaagttgtcaccaagaaaaaccaaatatcctccagttggtctgtgatcgtctatgctgctggcccagtctacatccgaatatgcatgaagtgtcacagcagatgaaggtcgcagccataacccctcttttatcataccttttaaatatctcagtagcttcttgcaggcttcccagtgaactcttgttggagcatgtaggaattgactaagtttattgactatatatgctacattaggtcttgtacgggataggtattgcagtgccccaagcctaccaaggtatagagtaatgccatgaaatggctccccttcggttagagacaatttgacacttgaacttgtaggattaggacaggactttgcaccctccatatgctatttgacaagtaaatcagtgatgtattttgtttaagaaatatacatcccggtgttgtctttatatatttccactcctagaaagtaatggacatgaccaaggtccttcaaggaaaaattgttgttgaaatatgagattagtttggagattaatgttgagttggggcctgttatcaatatgtcgtccacatatactagaagaatagcaagagtgtttcctttgccatatatgaagggagaagagtcagctttagaattatgaaatccccaagatgtgagagtgtgtctcaacttttcattccaagcccgtggggcttgttttcaaggcgtatatagccttctgtaacctacagacatgagttggatcagtaggatctacaaacccatgaggttgagacatgtaaactgtttcatttataggcccatttaggaaggcattgctcacatctaatagagatacatcccagttgttagatacagccaaagacaacactgtccttactgtagtgggtttcactactagactgaaagtctcttcgaagtcaatacccgcttcttgtaaataccccttagctaccaaccttgacttgtacataattagagacccatctttgttaagtttaaccctatggatctatttgcaaccaatgatatgcatggaaggatcataagg

SEQ ID NO: 35222 - DNA, 1385 bp, Cannabis sativa
acaccaactcaaaaatatatttactaataaaaaactaaacatatacttattttctcttagatgaacaactaaataacaacgaataaacaactcaataacaattcactttaaactgaaaaattaatttggcataaatacattgcatcaacttaaaaaataaataaaaataacacacaaatataaaaatatgtatatagtatattaattttcttttgattaaacaacttaataataacaaacaaataattgtataagaacttcatttctaaatgcaaattacatagacatgaaaaaaaaaaaaactgtaagaaaaaaaataatactaataatctataacataaatataaaagcaactacaaaatacttgtataccaattgtacccacaaaaaaataaacatgtattgtttttctcttggctaacaatttaataacaacgaataaacatgaaaataatttcactttaatataaaaattaattaagcatcaacatattgcgtcaaattaaaaaataaataaaaacaacacatacataaataatctcaggaaaatgaattacaattgtaaacgaattatacattaactcaaaaatagatgtataaaaaaaataaacatatacccatttaacacaatttaatttaatattttaaattggtaatattttatattcacttaaattgctaaaaattagcaataagttagttaagagttgctttaagtgctcaaagatgcatacttatatatatatatgtaaaaattcaaaataaattatttttattaaaaattttaagaaaattaatgtaatatatttttattcaaaatattttgtaaaaaaaataatttcgcaatacatttgaaaatataaaataaaaaaagatgaaaatgctatttttataaataaattaaaaaattaagcaaaaatttaaaataacaacataaaataaacttagaagcaactaaataaatacttaatgacaaaaaattatgacacgagatattagagagatgcatttaaacatttgtaatattatattagcaatagtatattgatcattattaccaactgtaattatatatatactttttgatatttatataaatatatattatagaaaaagaatattagattattattatttttttttttaaagaatattagattatttaattatgtgtatagtgaaaaataggttaatatttattaattttaaaaaattattaataagataaaaagattaaaaaaaaaatgaaagtaaatattattagattactaataaatacttacaaagataaaaagataacaatagatgatagtttcaattcaataaagataaaaatacggaagaccaagccttcgtcttctccgtctctcaacaagcatgttggc

SEQ ID NO: 35223 - DNA, 2742 bp, Cannabis sativa
acgtctgaattcatgtctttcaagcaacaagatttgattgatttatgtttagagactaaaattgagtcaaataatgttacgtatattcatttttttttgtccttcccctcattctttgaacttatttttctgatgagtttgctcaatgattatgtcaagaccactaaaacttactcttcttttcgcaggaccgatctcttgactttcatgcattgtgtgctctgtatgctgttactggtactcatttttgttctgagaacataattgaaaatgaatctttgctatttttattcatctatttatttgttttccttgtttagatgttgcacttgttacttctcttagagatggaatgaatcttgtgagctatgagtttgttgcttgtcaagcagccaagaaaggagttctcattctgagtgaggtaattcacctttatattttcttcttaaattcatcattaaatttatgcattttcttcatagttttttcgggcttgcatcttcttgtttattccattttaaattttagtttgcaggtgcagcacaatcgctcggtgctggcgccattttagtaaatccatggaatatcacagaagttgcttcttccattgcttatgctttgaatatgccagctgatgaaagagaaaagagacaccaacataacttcatgcatgtaacaactcatacatctcaagaatgggctgcaacctttgttaggtatgctcatatatagctaccatgcattctaggattgaatttttttacttctgttcaaacaagtaaaagtatttatctgttcataccaactatcttttcttgctttgtctttattcttataatagtaatttgtaagctatatgtagtgcctatatatatgtaattttctagagattaatggatataggtaatagaactttggttcattttgaagttgggtactgactcaaagagtacaatttatcctagcatagtcttaacttttttcctttcagtgaactcaatgatactattgtggaagctcaactgaggactaggcaagttccacctctacttcctatgaaagaagcggttggccggtactcagaatccaataacagattgcttatactggtatgcaaatttctcttgctagactatatataggcttgaattgtatatcatatatctttttttttcatgtctatagtttcattcttaatgtttcataataaacaaattaagtaggtgaagtgaaacttctaaggtgacactgcgaatttgtataatttacctttttctttagatgggatttaactaatatactgtcctcactatgttatttattcgacaaagaaatgtctttttgtatttcttgggttcaattttctcttaatcccatttctctaaagttgttaatctcatcatttttggattcaactatgattatctacatgtcactactaaacattctttctacaggggtttaatgccactttaacagaaccaattggggctcttgggagaagaggtggtcaaatcaaagaaatggagcctaaactgcatccagacctgaaagaaccactaaagaaactatctgaggaccccaaaacaactgtagtagttctaagtggaagtgacagaaatatcctagatgatgtagttctcttctctactttttttcggtctgcattacttgtcttgcaagttatgctcttcactagcttcttcttatacagaattttagtgactacaacatgtggctagcagcagaaaatgggatgttcttgcgtcttacagcaggggaatggatgactacaatgcctgagaatttaactatggaatgggttgagagtgtcaaggttggttagtttgtttgtttatacaccaattcatgattaaattcttgtttctaattccattatttcagcatgttttcgagtactttactgaaagaacacctcgatcacatttcgagcttcgtgagacatcacttgtctggaactacaagtatgcaggtaaccaacagcaccacatattcatgagtatatcgttctcttctctcactgttgaaaatatcatttgaaatattattttgaattactagatgtcgagtttggaaggcttcaagcaagggacatgcttcaacatctctggacaggtccaatctcaaatgcatctgttgatgttgtccaaggtagccgatctgtcgaggttcgagctgtcggtgttaccaaggtactttgcattttaattacttaaaattctgaagtagaatagaaaggaatatcattagtggaataactattccatttcaaaagaaaagggaagatgaaaaaacatacatatgatcatttgagttaactctttatttgttttctatgttgcagggtgcagcaattgatcgaatcttaggagaaatagttcacaacaaaggcatgaaagcaccaattgattatgtcttatgcattggacactttctcccaaaggtaaaaaaacttaaccttttattaagccatctttgctcattgtaaagtaaaaacacaactaaaacttggcaacattggtgtgtttcaggacgaagatgtgtacacatttttcgaaccagaactaccatccgaaaccccacctccaccaagagccatactaaccaattcaatcacaccatcattgccaaagttctcagccagcagcaaaggtagctcaaaatcgtctcgcctcaacaaacaacgctccatgtctatgatagagaagaaacaaactacta

SEQ ID NO: 35224 - DNA, 1136 bp, Cannabis sativa
ttttttttttttttgttaattaaagtaaaataagtgagtcccgatattaaattatactgatagagatattacattttgagcattgctatgttacaccaaaatacctaacagttctatgacatgacgtcttataattagttagcggttctctataatcttattaaattaaaataagtgagactcgagactagattacactaatagttatattatatcttatcctttagcattttttttacaaacattgctattaggtactaatagtgtccaacaccttttataagtgacacctcacgattggttaacgatattttttaaagttgttttttttaagttatacgagacttgatacttaattacactaatagcaatataacaccgaagagagtgctagacaccaataatattatttaacaattctcttttttttttattacaatttataaaggtgctatgtaccaccagtaccatttagcatttcttataaacaaatatataattaatattaatttagaaaagaaaagtcagcagctgcataggtggtaagtgatgtaaaaataagagatgaatagaataggtggtgggtggagcacaaacattggtccaaaaatcccaaattaaaaccccaactttccttaactttagcaaaaaaaaaaaaaatcaatcaattacatctctcttttctccaattttgtttcagtttttctttctttccattcattctttcttgtacaattacaatacatatcatcattctatacatctgttttttctttgtttggagtgttgctctctctgacttgttcttcacttggtttgttttatcatctgtttctggggttattctgttcacacatctggtctggtaatattactattcttataatattctattcaaagtttcaacctttcattaatttaatcttatgattttctgtttaagttctgagatttgggatattatgtaaaaagttcaaatttttatgttcttaagaatctgatgaatacaaaggggccacaaaatgtgaggctttttcacataaacagatgaaaaaaagaagctttttttatttgatttaattaatgattattagtattttgtttgtgttattttgattcaaaaggcattaaaatca

SEQ ID NO: 35225 - DNA, 4620 bp, Cannabis sativa
cataattttgtagcatgaaatcctaagcaacatgatgttgcctaatttgttagactacgctcgcattagtaaaggggctttgtcgtatccacatggaggtaaattataactagagattagtatgaatagaatattgtagaaattggaatgaataaaaaataataaaatgatgagtgagatatggatgatcaaataaagagcttggcaaggtagaaatatagttaggcaaattctattctaataaataacaaaataaacttatgtttcaatttacaaaacctaatccaagaaaaatcacaaaaaaatcaaaaacttactgaataatggagtttaatatcttttggtgtattgggttttccaatcagcatcgatggtgtcgaaatgtgggtggttctaggttcaagtctcgatttcgaggcttcagacggtggttctgggtttttggggcaattattgtgagtatcaggttgtgggtttcgattcaagaaaaaagagaaagagggtgagagacggagaggctgagaacatcgttatggaagtatagtggttggtggtggtggagcgttggagacaatgagggggttatagtgagaaggagcggtagagactttgagattgagagttagagtgagagtttggcataaaataatcagccgacaaagttatcgatgtgtagtgatatgtttttgacataattttgcaatttcgatgtgggtttggcagttctctgtgttgctgtggcgacatgtggtgacacgtttgtcgacatgttgtgacatatacctaagggattttttctaacagattatgtgtatgttttggcgattatgattgatatgtggtgactttgttggcgatattttttgatttattttatgacattttgcgacacgtttttaagtgttttaatagtttctctgttttctgtcttaaattttgcagatggctctcaaacttaagttgtcagtttttgagcatttcacaagtcgtcttacctatcggggcttagataagtttaaatatattaatgacaagtttgaagcgataaagttgattgagagggtcaaggccagtcctttcggaccattttgggaagttggagaattgactttctcaggtgcattggtccacaacctactcctgcagaagacgaaagttgaaaatgagaaggaagatgagatatggttttatgttggtaaaacgaacatgagattcggacgtcttgagtttggattgatttttggcttacttatgggtattggccctacagaggaagagatagaagctaagtctagtgaccgttagtaaggacatattttgaagggaagaatggtgtgcagttgaatacactattctccaattggagagatgtgatgtagcagatgatgtgtacaagcttggtcacttttattgagggtgaattagctttaaaagaaggcagtgtccaagttttgttggagatgttgaagtttgttgagaaccttgaatttttcttcaagtatccgtagggtgagcgtgcttttcagaagttgatgtggtctatgagtaaggacatgacgcgttacaagcagaacattgataagaagaagggtaagaaggtttctcatgggacaaagtataccgtacatggctatgtgtattggtttttttatttttttaggggtaaaattggaaaaaaaaaattaaatgtagcatatattgcatgatgcaaaaaggagtagtatagtttaagtgcctaaacccaatttaaggatggattgtcaaatttctcaatattaataacctaacttacataagaaaagcatgactgaatttatataaaagatactattaaatttggaaaaaaaaattagaagataaataaaaatttaataaatgaaatatatagataaaagaatcaatatatcaatattaaaaataaaaagtacaatagctacactctaacctcaccaatattattactttaattcacttatttttatcaccaaaataaataaactaaaataataataagagagaatcaaagaaataacaaagtgtgatttctgtactctataatatgatactttttctctcttaaatgatcttatttatagaaccaaaatgctcccacaaactgatatttttcgcgtcacatttagcggggaaaatggcatgaaaagttgaagaaaaaagagaattatagagggagttgtgtcaggttcatggccacgtctgcgccagtgtgttggagaagagataacatgggacaggtgtcgattgcttgagcttctagacttatgtgggaacaagattaatgatagtgaggcttacttaagtgtgttcatccaatccaatattcaacactattttgttcatagtgcatccgatccgcactaagtgcagatttcatattttggatccaatccaatctgcacaatagctcaaatccaattcaatcaaatctgtaaaagtgtggattaaatcagttattttggattagttacttttcaagtttaaattatttaatatttattaaaagaatattttttttcaaagaaacaaaaaattgtatgtagaaaaaaatatttaatttggtgtaaattgtatatgtagacaaaaataaaatgtatatacatttgatttattaagtttcgaaatatatttttattatatgcattaggtttttaaataatatttttttttacattaaaatagtaattgtatatataattttttaaaattttatataaatatgtgtgaattggattgggtcgattatttttacatgtcaattaacatctaatttacagaagtgtagattttgaattctccaatccacataagtgtggatatccgcactttacggattggattagattggattgaatccgtacgaataagattaaattagttattttatgaatacccctaaatctgcttgctatcttatgtttcacaagcacccaattaatttgggcttaattgatttgtactcaacaaccaaataggtctaccaaatgagtttaatggagttgaagcaattatatttgggccgtgactattgtgaacaaaatagagatttgaattaacttcattcccatcaaatacatatatattgcattgcatggtcacattttatgggatgactttcaccaaaattggcttgagaaataattgagtgtatcttgaagcttacttttaactttctaccactttcttgctccaaacctaatatttaacacaaaactaaaataaattcaacatttctaatttaaataattaaaattatgaaaacaattaatttatattaattatatatgcataaataaagaattaaaatgtataaatttaaaccttaatcataatattatcgataaactattgataaaatatccatatactatagacaaattctataattttataacctaaaatcttaagcaacattatcgataaaccattaataaaatgatatactatggacaagctccatagaaagtgtgaaatgagatcctaaacaaatatgtgggtacatctttgttcccatatatatactgcatgtggaccaaatatcactgttggttgatcttctttgaactttaattatttggctatctaatattgattccattggggtcctcttaaagtactgaacattcattaattttgagaaaccaacaaaaaatacaattatttactaataaaaatagagataacgtgttagaaaaaaaaaaaaaaaaagaagaaattaaattaaatagatatctttaaaagtttatttttgcaaaatggacttgttttaattattattatttttgctacaaaattgatattttaaacaatattgatgaagtgttctaaaactagataagtgtatcattggaaaagtattttgcagagaatgaaaaaacgaaaagaaaaacatttaacttaaaaaaaattgtcattttgcaaaagggcaaacagtattatctttctagagttgtctcattttgaaaaaatttgcaaactaatctttaaattgttatttttttccatttttataaacatattttactaagatttttttttttttaaattttaataataaaataataatattataaaaatactttcagttgaccaaataaataaatatacagcgcaaataaataaaaaattacacaaataccacttacacatacattcaacccagaatccatgttttctggaattaaaaacttagtccgagacaaccttcggacaactacgcagcaacccaatgcaaccgaacataatctaaccaaaaagagaactactattaatttcggccacttcgcttgagaagacgataaaaaataatcaaaatagtaactgtttcaaattcataattaaaagtgcagaaaaattactacgaaactaaaattcaataagaaattcagtttacttcacataaaactaatatactaacttcaatttttagatttataaaatacaaatctcaaaaagttaaactagaattctcaaacaatctaattcaactataatttataaaaaatggcctcaatactataataatatatatatatactagtaaaaaattacgtgcgaagcacgtatactaaattttatgttagatattttttattttatttaaaa

SEQ ID NO: 35226 - DNA, 1842 bp, Cannabis sativa
taagaagaatttaaattgtgaccgtaccacaaaaaatttcaaactacaatttatttagtggggcgcgtatagacagtttgaacgatttgatgaacactcctatataatatatatcaaggaaagaaatgatatatgtaaaggagacaagttagacctaatttgtatgagcacactttgacaacgttttgaaagatagcattaaacaatgggccacagtatggtccaatcattcatgccgaaagcaaaagcccagcccacaacgagcccaacattttccctataaagttgaaaaaccctaatttccccatcctttgccgcatagggtttggttgcaggagggttcgaaaatcttgaggagaggagaagatgactacccgattcaagaagaaccgtaagaagagaggccacgtcagtgccgggcatggacgagtgggtaagcacaggaagcatcccggaggaagaggtaacgccggaggtatgcaccaccacaggatcttgttcgacaagtaccatcctgggtactttggaaaggtcggaatgaggtacttccacaagctcaggaacaagttctattgccccattgtcaacatcgacaagctctggtccatggttcctcaagagatcaaggacaagtccaccaaggacaacgttcctttgatcgatgtatcgcagtttgggtatttcaaggtcttgggtaaaggtaccctcccagaggataagcccttcgttgttaaggccaagctcatttctaagatcgcagagaagaagatcaagcaggctggtggcgctgtcgttttgacggcttaggttgtcgttttgattgccctttcccttcgtcttctttaatgtttttaattttgctattttgagctttagtattttcacattgaattagtttaaaatttgaacctttttgtcacatttggacccgttattgataacatatttaatgggaaatgttatagatttgatacttttatgggtttgttttttcttattgatattattttagaatctttttgaattaattatttcttaattaagtggtagaggaaggctgatgaaaagctttatctataaacatactgattgaacgtgaatctttagttgtaagaatatggtagggttttatgcttgtaacttgtaagaaatgtcttctttgtgcctatataattttggttttggttccatgtccagaagatttggaatgttcccaacttctttttcaagaaaataaaaatagaaatgtaggtattcatattcatttaggtcaaataatttaattttacgaacgagtgtagatgaggttctggtttgcgtgaaagaagctatttgttttcgtttatattagtgaagtttgtgaatgaatgccttgtttaaaaattcagtttgctgcatctgtaattttaaagcaactgtacaaaattcaagcaagtattcattgcaggattgatgctagaaagtactgataaacctaatattgataaccctaattttaatgctagaggttcctcgtagcggtgttcatctgtactgcatgtatttgatattttgaattcatttttaaattgtatgttaaaaaaatatttaattttatctaaattatatgtagacaaaaaatatgcaggtacaattctgaaatatattaattattaattttatgtattagatttttaaattattaatttttttacattaaaatagtaattgcatattgaattaaattggttataagtgtagattttaatcggtataagtgtaaagatttgaactttagattgatttggcaccatgtacattttgataagaacgcatttaaactgctaaacaaaataaaatcca

SEQ ID NO: 35227 - DNA, 1967 bp, Cannabis sativa
acggacaaataaaaagtgtgaccttgaggactattgccgctatttttggaccttggggactaatctgtatcaacgtgaactttttggagacttttgccgcaaaaatatctacactttcaatatatagtcaatatgtataaaacttcttgttgttaaacaaagtaagtaaaaattcacaaaatattaaaatgcgcatccagggaatcgaaccctggtcagtaccgtgggagggtactatgataccactacaccagatgcgcttggtgtcaagtatttcattatttattaattgatcataaataaggttaattagaatttttaccgcaaattatcttcaaattattaaaattgttaaatttaaagatttctgtccaattcttttcaattttaccaacattgtttatgtcttaaattgtgccttcaaactttgatatctaccaaatcatatctctgaaccttgacatatattaaatcgtgtctcctaaactttcatccacgttagacttctatttgtaaaattgaacaaaatttcttaaagttaacaatcttaatagttcaaaaaaaaaataaaaaaattaaccacttaaaaagtttaaacaacataatttaactaaagtaaaaatttggaacaaaaatcctcattacccattaaataatatcaactcttgcaatactataattgactttacataattacttggtttacactcgattgtccaacccatttgatataatgaggtttgtatcattactaaaaaacaccaacttatataatcaaagtatgcatgattaatgattctgattattatgggaggtactatgatggtaccactatgtgcttgaccagccaaaatgtcaatattttaattcataaaataaaaccatttttctttcttttcttaatgaaaatgtctttgcataaagaaaaaaatatatatgtttaatatcataatgcaaattttaaatttttatcaactttttgagaaaattaagaaattctattataaattttagaatttttatttttcctaataattaaagacattgaaaattgctgatactagtatcgaaatataatgccactattaatacaatttaatattaaatctcacataattcattatttttgataaagttttgagaaaaaaaaatattacatatattataaataagaacaatttatggcataaatatttaaatttaactttcagttacaaataaatacttaaatttaatttttaacggtaataatacctaaccgtcattattcacgtgtcattttcttaatacttaacatcaacatacctacagaaatttcagaattataacttaagtattattaccgtcaaaaattaaacttagtatttatttacaactagaagttaaacttaagtatttatactgtaaattactctataaataaatcttaactactctaatgtaatctcttgtgtctaataagaatactcagagacacattatatataaatgacaaattgtaaatttcattcctctatatattttgtcaaaacaaaaggacacatataagtgaaccaaaacacaaattgggtttacataatcaaaactatgattaagaacatcactctctcagcctgttatcttttttattttgattacttgaaaagaagatctacttacttagatacatatatagtgttgttgttttaggacaatgaaagaaagaatggtcaccggcatcccaattcagctcttccttcttcactgatgctttcatttctacaaatcttctgaagatcaatgtaacctataatggtgtcctcaaatactacatctttcaactttgcatcatcaaatgttgaccctgatagtactgtgttcttgaatgaagctccttcaagatcagcttttccgaaattaacccgatccaacaccgcattcgtaaaatcaacacctgcaacaacattttcattcaactcactaacacc

SEQ ID NO: 35228 - DNA, 1350 bp, Cannabis sativa
agggtttgtgttgagaaccgaaaagtagggatgggggctttggtctccaatcgtttggggcatgtcctattctcgagtgcgactccttgcacgggtttgttggaaccccacgttgccgaagccaaagctttgctctatatgggctttcttgctgcgtgcaggggtatacggtgattactgctttctctaattgtcagcgggtagttcttgccgtcaatagcagggccccttgtttcaatgaatttggtattattcttaatgatattaatcatattaagaatactttcagtagcatatctatgtcgcattgtagtcgatcaaagaaacatgttgctcattctttagcaaaacgagtgttagattcagatgaggctcgggtgtggtgactggacttgccctcttattttgctatttaaatttgtctatcttttgtattttgaatttttaacttgatgccttttaatgaaatctctctgttctaaaaaatattgtaatttattttaaataccactataccttctacttgtagtaagaattctattggtttaagtttttgaatattttaaataatttaggaacccatattagtttaaatatttatttatacatatatcaattatttatcatgtgtgaacaagttttttaaattttattttcgataatgtatatcattcaaaaactaataaaatagctactctagctataatttataaactcaagtttaatatgagcgaaaaatagaatgagattatgagataagttttaagggcaatgttgttaatgataagagaaacatgttttactaaaatatttttacttttctacttaaaaaaataatttaaataataattatagaacacaattaagatttttgtcacatctcacatatttatagtgttggaaaactattggtatttcttaattgaaaactttcttaggatacatttgttcaattaagagtaataaaatagaaaagaattacgttggatttttttatagatgcatttctacttatttggtcgaaaggtcatatctatatatgatgtaaaagaaagaaaagataagggttaacaaaaataataaaatttgtataacttagaacactcacaagagcttctttaaaatagaaaagtttattttttaaaaaataaaccgtactaaaaatacgatacagtagatgttttaaattctttcattttaaaatctctttaaaatatattatttatgctctatatttatagaatactattcattgttctaaacatatgttattaattatttaaattattttaattattttaattttaatttttttttatttttaaagaatttttttatttaattttaaaa

SEQ ID NO: 35229 - DNA, 1332 bp, Cannabis sativa
actgctgacgcattagctcgacttgcgagtagtaataaaagtgatagagcaaatctagttcctattcagtttctcaaagaacctagcttcaccggcacagaagagatcgatatgattgatacatccccaaactggatgacgccaattgcaacctacctcaacacttgggaactcctagataatcgaaatgaagctcggaagatgagaaggaaggctgcatggtacatcatagtagagggaattatgtacagatgaggattctccatgccattgcttagatgtgtcacccaagaaaaagctgcacaaattttgtctaaggtacttgatggattttgtggaaaccacgtcgccggggagagtttatctaagaaaattataaggcaaggttatttctggccaacaatgatattagattcaaaggcctacgttaaaaaatgttataaatgccagagattttcaaagatacctcgtgcaccgctaaatgagctaacccaaatgcaaagtccttggcccttcgccaattggggaattgacttgatcggacaattacccaagggcaaaggtagagtgcagtatgcagtggtttcggttgattacttcactaagtggacagaagtcgagccactagcaaccattatgtccaaaaaaattcaaaactttattgtgaagaacataatctatcagttcggattgccgtacaaaatagtctcggacaatggcaaatagtttgacaccagtcctttactgatttctatttgaaccatggtatcatcaaaagtttctgcgcagtggcgcatccccaataaaatggtcaagttgaagcagtcaacaagacatttaaggatacactaaagaaaagacttgaggacgcttaaggaaactggctagaggagcttcctgaagttctatggtcgtaccgaacaaccgagaaaacgacaaccggaaagactccatttgccgtggcatatggatatgaagcaatgctgcccgtagaactcgaaccaccatcccgcagaagattgacgtatagccaagaagccaatcacttacaccttgccgaatcacttgatgaaattgaagagaagcgaaccacagcaaacttaaagctgatggcccatcagcaaaaattagctcggtatttcaacaaacaagtgaaggctcagaaattctttatgggagatatggtcctaagaagagtatttctaaacaccaaagacagtacggcaggtgatatggtcgaagttctcgaatcaggagcatacaaattaggtaagtatgatgaaaaaatgcaactctttctagtaccaaggtattagaatggggaacatttaa

SEQ ID NO: 35230 - DNA, 3118 bp, Cannabis sativa
ctcttttcaccaaccattttattgcttaatcttctgtcagtaactcatcagcgcctaacctcgttcacttactgatcggagaggaggataaacaattacttcactcaaaggtacggcctttcatctatctttacagatatatattctttgatcagtgttaatgcaattaaatcaaactgtgttttgttcagaaaaatagtttacaaggaagaagataagttagtggttttgaaatatgctaatatactgatttgaatccaaattgagttctcttgttgaaacatagaaagaaaagattgaaactttatatggttgtttgatttttctaagccattctctctattctacattggcattctagctctttttatagggatgatttttttccccttctttctaaggattcttttaaacgttaatagtagaaatatgttgtaatgtagaattggattttgttctggtctagatggttccgagattttgttcttaatcttcttccatttgaagcgaaagaaacttccatatttgtttgattttggttcgatgggattgcatacacctccagaatagaaatttctgcttcttttatgcgaattacatattcacacggtatttattacttgtttgatgaagtttttggtgacattgagaaacttccctccaaataaaatctaatttatggtgtttctaagcaatttgaattggaattattctcatagtgacaaataagttacctttgcatcaaatgtgaagcaattttgtgtgggctaaatggtttaaagttttgtgctttgattaattgtattatgtgggctttcgtttttttactcatttgtattgaattcagccttgaatttcataaaaccgagctttcttatgtcttgtgttaatggctttgcagaggacttgtacaacttagtattatatacaaacaattgaatatgacttccgctattttcaggagcattcaaatgctccctttctgctaccatacaacaacagcattgttcagaagaaaaaataggatcttgttttgcacaatgaaaagcacacaggcccaatcagccacacaagagaagcctcctgctcaaattaaagtttcatctcatcctaatgctagagccattgataaaatctccaaagactatgaagcagttatagggatagaaactcatgtccagctctccactctcaccaaagccttttgcagttgtccatacaactatggttctccaccaaacaccagtatttgcccagtttgcatgggcctgcctggtgctttgcctgttctgaactcaaaggttattgagtgtgcattgaaagtggggcttgcccttaattgtaagttgtctttaaactccaagtttgacaggaaacagtacttctatccagacctgccaaaagggtaccaaatatctcagtttgatataccaattgcaactggaggatacattgatttggatcttccattggagtatggtggtgggcataggaagtttggcattacaagagttcacatggaagaagatgcagggaagttgcttcattcagaaagtggaagctactctcaggttattactatccccttttgcactacatatttctatatttcttactgaagactgaactgtttacacaagaaaatagttagttattacacaagaaaataatatttttaagtagttaatatttaaaattaaatttttttagtaattatagtgtagttacactcaattcgcatggggccctgagaattggagagtgtaattggaaccctcaattacctccatctacacaattacagtgtaagtacatggtcacacaaacatgtcaaactgtgtaattatctccaattacaccaaaatccaattcctctatgtctttccaaacgcacccaagtttatctagttgtagaagacagctttttcccaagtctatttttattttgtttagtatttatttataaacctaggaagcagtttggcaataggcactcttctagagaagaggaataaaaatttcccttcattgtggaactttggttttataattaaaagtagtttagagcattcaaatgagtgaagctcattttttctgctttgtcagaagttgatcatttgtatgaacatttatattgtgagctagtaaatctacatgaaaccaaaccagtttagccaaaagtttgcactgaagcactcttgttctatcatatgccatatttgtctactttttctcaatattgttgctacctgcaggttgatttgaacagagctggggttccattgcttgagattgtttccgaacctgatatgagaactggtattgaggctgcagaatatgctgcagagttacagcgtttggttcgatatcttggtgttagtaatggcaatatgcaagaaggttcacttcgttgtgacgtgaatgtttcaattagaccaattgggcaattagagttcgggaccaaggtaacatttctttcttgagaattagagaacttggaacctactgaaaacatagaagacaataagttgataggtgaaatgtaagtgagtgatccatcactataagtttattccccaataacatatttaacttgtgtatttccaaaaatgcaaataatgaactaggggccaaaacagttttacatggaatttttgtaacttgctgaaaaaaccactgctaatgatccccagtgatatttagataataagataatttttgctataaaataggtacaatactacattgttgaattgttgtatctgctatcagaccagtttttccatgtttgaaagaagcaacattttggttccttacttttctaggcagtaggaataaaaactagattacataatgctaaattatgccaactcaagaatcacttaagaagcaggaaataacgcctatcggacaaacattgtcctacatggattaaatgtaaaaacatggactactccactaatcatcaaatggttttgagatggaaccccatgattcctgtgaacgcctgttttttattttcttgttatcttattatgagttgcggtaatcattttttttcatgagaatatatataacatagactgcttatgtgagctctgaggtttatgtggaattt

SEQ ID NO: 35231 - DNA, 1265 bp, Cannabis sativa
ggacgtcggaccctgtaaggggagaaattgtgacagtcagtagtcccgtgattcgtaaggggaaatactgggtaagctgtgcaatcccacactggctagggaaggtcaagtgtaatgattctgagactctgcagctatgaactacataattgaagagggctcaaatggattgattggtacttcatatatcaacaaggtgcatattattttctggtaaccgatcacgaaagaacttcacagttaagcgtgcttaacttggggtaatgtcaggatgggtgacctcttgagaaattttctcaagaagcatggcagtgaggacaaaacatgcttaaaacactcatgctgatctgtagggtcactcgtcattccatgaagcagctagagtgacgtacttgtgtataagagctaccatttcgtgagtgtaagagcctaatgaaagcttgaagcggggacgttacaagtaggattagtattataaatatataaatattaatattatttattttagattaatttaactatatataaatattaatattacttattttaagataattgagtgtataccaatttcaatctaatttaaatatatattaatataatatttataacattattatttttttattgttatttttatattagaagtatcctcaatatacaataattaataaatattatttttttaatggtaataaatattatttaatataccatattaatatatttattttaataaattaatgaatggtttcctttaatttataaaattttaaaaatatacttaacaaaaataaaaattaaaaatcgtatattgagaaaataaaaattaattttatcaaatcgtattctctctcttcagatagggttttctctcttccctttctcttaagcttcgactagggttcctcatgctcccatggacgttgccagccagatctgagcgggtggcacccaagagccttgcttctggctactctcgttcgaaggcggaggtctccatttgtgggtttcagcgacgggtgaattggtcagcgtcgggcttagctccctagggccaaattcgagatgcctagatttctaggcgagtggccaccgtcctttgtggttggccacttcggttgaggcatcgctcgcctttgcgttgcgatgtggcgttggtggtgggcttctcttgattttctctccttcgtttttggggatggctttttgaagaggccctttttaggtgtgaccttgggccttggtgttggaaattattttac

SEQ ID NO: 35232 - DNA, 1918 bp, Cannabis sativa
  modified_base (1745)..(1746): a, c, t, g, unknown or other
tatatatatatttatatttatttagtgatgtaatctaaatatatcatttattatatgtgtgtcataaacaaagtaaattagaaacgtaatttgctattaaaatatacagaaaaatagtaatattgtgtcaaatataaaaaatggtagaattaacaaagatattgcaatgtatttttaaaataacataaatgaaaagataataatttttgctttaataaactggacttataattaatgatgtaattgctttccaaaaactatttaaattattttttcttcttaaataagaagtaatactttaagtactgttcataaaagtttttacaatttgttttgtggtttagtttgaatgttttctccacgaagataaatgtagctggatgacaactgtaaaatgggttgcaaaacattatctgtttttataaactgaaaaagagggatttatataaaaatgttagtgatataattttttatatgaaatatttacataaaatgatgaattttaataaattatatagatgtgaaatttatactttaaattgtaatgatgagaattgtgttgaccaaaagtcaattactcacttattttgatgataaacaaatatttgattattatttgttactaatcttttattgatcattttgcaagcaaattcacaaagtatcaatatttgttcggtaaagtcaaacataatcaaagaagtggattcaacaattcataagagcaaaagtttcatcaatagatcaagaattcaagaccctatctaaaagaggacttcaaaagctcaaaactcaaagtcaaagtcaactctcgagaaaagtcaacttttgatcaaaacatgcaaatcaagataggaagctcatctacatcaagactacacacaattaaatgatataagtttactttagtcttgttaaagtgatttgcatagtacactaaggtttataagtttaaattttggccccactaacttgtgcgacaagttttctcaccaaatagttcaaaaaaaaaaatcattgactttttagatcacatatcatttaactaagagaacaaaattagaatttctgaaatcggataatcgagtaaagagttatgcacgttttagaaccgaataatacatgatttgcccctgccctattttcgacctcccatttccaaacggcaggctattttttccagaaacggtagttcatttagaaaatggcatgctatttttcccaggattctttttaaaaaatcgtgctaacggttataaacagttatatttctccccaacactatataaactcaatttttactcaaaaataaaggttggttgagcttctattcatcttattatatcatttctaagtgttctaagctaaagaattattatcttctcttaaacacaccaaccacacatacttgagccaaatttgttcttatcttctgtagtgtacttgcaattctctctaggatttcacattgtacttcatcttaatagaaaaaaatttctttgtatttcaaaataaaatatctattgtattgaggttgtcactagtataaaaataactttgttgtaggtgagtttgacaccgattttgtaaacaacctaagaagagtgatattgtcatttggaggttttttagcatattttggtgggaaatagtggaagccggcgcctcagttttataaggaggaactttacaaatttggacgatcttagaagcaggtttggacttggagctcaacataaaagttnnttgtcactacaacaatctgatagtgagattggcacttcaacaattcggtaaggtttatagtccttggaagaaaactattgtgagaggtttggaaaaaagcttggtgaaaaattccccgattgtaagggttagtcaagcccgttaattaggctcgatagttgaactcaaagct

SEQ ID NO: 35233 - DNA, 1016 bp, Cannabis sativa
caggccttgacctgccagatcctgcaggccttgacttgttagatattgcaggccttgggcagccataccttccttataggtctatgggcggctaggattaacctggaaggactctatgtacaacccaaaatgtgggcagcaaatcattggctgcaaattgggtcctaaaagccaaacaaaatggctgaataatatctaaattgaaggtcactttagtcttttataattatccaacaacctatgcaaatatctagggatttaaactgtaatctagggtttaggcctcctatataaaggccttaaccctagcctacaaacctaagtcactaagcctcaaaatcactctaagtaagaaacctttgcctctctttctctttctctctctctactacaggcccccaagggctttctcctcttttcatctctcacacgcctctaagttaatcacactctcatattagagatctgcctactgattccacctatattgatctaagtagtattatctctaagtatcaatataaccaaagggggagtaggtcattacccactatctaagggggccaaacctcaataaaaaatttgtttgtttttacttttctatttgatttgtgcaaacacatggcaagcatcaaatccatataaccccgctgtcggttgatcactttttgaggtcaacagtgtcgttactaattcaggcaacttgcaacatcatgttatacattgccaaatgcgcttatggattaattcttccctcatataactcaatgtggggcattttaaagttttccagaagtagggtctctacgatcctccttacacaaggttccggatcttcatcttctgaatcggagagagctccactttatttcttgaccaacttggtcagagcagctatctgctcctccaatcactttgtgtcactctcggggagatcacgccccctcatcttatcactcaagtggtttttaaggtcacctccacgtggccttactttctcacttttttacttctca

SEQ ID NO: 35234 - DNA, 1870 bp, Cannabis sativa
aatcactgaaatagtaaaattgaatgaaattagacaaaagttcttaaatctaactatctcaatagtttatggggaatttttaacgatcaaaatagtttagggaacataatttggtacatgtcaaagagaataaaaatcttaattagcctacagttttttgattgtatagttggagtcaatttattgtttgtgtatcattctggtagagaatagctcataattttgttggagttttttgttcttttctaaaatgggttttcagatgtgttgagaatacttatacaagatgatattatttttcatgtaaattattatttaacataaataacaattttatataacaaaatctaagaattattatttttctgttcttaattttattttaaaaattctatttttttacactatatcaaaaatatatttatatttattattacttttattcctctctaactcaatattttttatttctctttagtcttataaaaaacaacttcaatcatatatatataatataaaaataatttttttttaattatataacaaaattaaacataagaacttaaattttcctaataatacatatttatgagtaatatccattaaaaatttaaagtgaaattgaatttcatataaactgatcagttgttatttggggattaattttcaaatggtaaatactattttagatcctgtgttttgtaaaagttacatactgtatcatctgttttgttaaatgacaaatgacacttgtattttttaatatggtacaaataggactttgagcttaatttttgacaatttttttaattaagttgaagacaatttctaacacgaacagatacaaaaaatttaatcagttctgtcaaaatagtaaatacctctaggttacattgttattaaattttattttgacaaaaaaattatttcagtattctatttgtattattttaaaaaatataagatctactttatcatttaataaattagagagttaaatctataatttttataaaataaaaagtctaaataatatttaccaattttcaaacaataaaataataaatattttttttacgtgataaagtaataagtattaattggtccattaaaacttaatttctaaacaaatattgttattttgattaaatggacataaacaaatatatactttccagaacaggaaaaataaaggaaaagcatatatttaatgtttcgaacttgaacaatatataaacacacaaattgtatatagatatacaaacaaattatagtaattgaatttatttaatgttttaacattttctagaatgatatgtatagaatatagttgagatcttaaaagtaagattaaatttcacataatctttctagtttttacgctattaaaaatgcttttacgatttgtttttggtgcaaattctatctttctcgatatatgctttttctaaacaacaatcaaagtagcatgtgaagataatgcgaattgtgaaattattaagtactattcactgtaaatttaattacttttgcttttagggaagatctaatgaaaaaaaaaaaactgatataataattgatgtaaaaaaaaaggaccagagtactatatatgatcggaatacatatgtacgctcaaattccgttcaaaaaaaaaaaacatatgtacactcaaattcagacacacaaaaaagttataattagcacccttctaaatacttcattaatcaagcaaaaaagccataacataagtatatgctaatattttatatatattttaaactccacaatattcattctatataaaaatatgtttatataattataatattttttttgttaacagaacatattttattaattttttaatatt

SEQ ID NO: 35235 - DNA, 2311 bp, Cannabis sativa
tgtacctcatggtatgtaccagaccagacttgtgttatggtgttaacatggtgagcagatacatgggaaaaccaaggactgaacactggaaggcaatgaagtggataatgaggtatttataaggaacaatcaatatggaataggccaagacaaatcaagagtaatgagatttgcagattcaaattatgtgagagatgtaggctcgagaagatctcaatctagttttgtttttcaattaaatggttgcataatgagttggaaaaaaagcctataatccattgcagctctatctactacaatggctgaatatatagcctgtactgaagaagttgttgactcagaaatctagactagacttctaagccacacctgctagctagattggcgagaataaaatacttgttaattaattataagacaaacacaaaaagtttatagttgttcactccctgtatcgctaaagtaatgaagctacatctactttgagtttttatttttcacaagatggtattacagaaaaaggataagtctcaaaagctccaatttttagagagagtaactagagagagaagctctaacattgtggttagctttctaaatataaaaaatgagctaagggagataaccttttataggtgaaggaggcccacaaaaataggagaaatataaaagttagatatttttgaccatatatgatgatctaacagtgaaaattagcttcccatggtgatagtcatttttcagagctcagcaagacctacagtgggtaactcggagcttattttcataaatctcttaggggtaaaatttgcagccaatagctttagaattgcaattgaagtgttggacatgactatatagagcattgaaatatcattgaaatgcaagttgaattatgtcaatcagatcaatattgagtgacttatggctgttttggtgaaggcagttcatgaccccgtgcccaggttgacatctcaacgcctaggttgacatatgacgtcaacctggacactgggtaagtgttaaaacgtccaaggtgtgaactcttttaagaacttgggctgattttttatgatttttttagagaactcttttgagcatcttctccatttttagcaaagattaagatttaattgttatcaaggatcaaacaatacttctaaagggccataactgggacccaatgcccaggttgacacctggcactgggcccagcgcccatgttgacatattgtcaacctgggctgtatctaatcaagttcataaaaaagtgtttcgagaatttttcccgtcataaaaaataatagagattcaagcaaacttggggagaaaatcacaaatctgagcccctggaaatagggcccagcgcacaagtggacttggtgttgggctagtgcctaggttgacaataaacctggtacgctggttttgatcactcaaaagccaaatctgattcgacaaataaatccagaatggttaaaaatgtggtaggagacctcgtcctgaagttcaagaatcttggaagtataaaacgagaactctggagcttggaaataagtacacaatgcctaggttgacaaatggcttggtgcgctaggttctgcttattcgattttgattcagtttcaatcattcatctattttttcataataaataagatacatgaagttaaagaagtcaaattcacaactttgcatttctcatttccagcaagggaaactcactcggaaatgaagagttttgagtctctcatttttgcagaatagtaacatctttgagaattggtgaccagctttaccagaacacaaaaatagactaagtgatatttcaacctgggcggtaggatgttaaccttggcgtggggtcatgaactgccttcacaagaatggtcataactcactcaatattgatctaattgacgtaatttaacttgaatttcaaagatattttaattctctatatagtcatgtctcacacttcaattgcaattatgaagctattggccccaaattttacaaaaataagctccgagttacccacagtaggtcccgctgggctctgaaaaattggtatcaccatcggaagctaattttcactttagatcatcatagacagtcaaaaatatctaatttttatatttctccttttattgttggcctccttaacctataaaaggagagctcccttagctcattttttatattcagaaagctacccacaatgttagagcttctctctctagtttctgtctctagaaattggagcttctgagacttagcctttatctgtaataatgtgaaatacctacaa

SEQ ID NO: 35236 - DNA, 4283 bp, Cannabis sativa
  modified_base (4163)..(4180): a, c, t, g, unknown or other
tactaccagtaaaagtaccaggtcagatgaccatatcaagtacgaaatgaaagaacattttctcttaagtgaatggccttctgagtggaccacgccctaaggttcggataaaatcatcaagtactcaggttggatgaccaactttgaaagtacgattttttttattttctgcaagttgttttgtttatgctaagctaaagatcagatcagatcaacataatagctttgatgtatgttactacggtaacagacatatttctaaccaataaatgaataaagatgtttatttaaattcaaattgagtcgagttcattagcatgttataaatttaccatccagtgcgtacaaaagtttaggtcgtacccaaaacctcgaacaaaaaaaaataatacttgtgcaaaataagtgaccaagagtcataagtctgctcggtcacttggggcacctatacctgcacaaagcatttggtaaataacaaaaacaaaatgaacacaattgcacaatgattaaaaacaagggaggaaattcattaagaataacaaaagcattcaaacccgagattaaaggttacccggttagccagttgttcaaaaaatgaaaaatatattccaagtttaaagaccgcttggccggtcaccttgtctcaaaagaaggcctgttggccgaacagacataaaaaaaggatattagaaagaaatcaattagacggcaggagtcccgggctctttgtacgggtcgactggatttgaaggggctgaaggatcatcattctgggcgaaaggagcctcaacattctgatcggtaggagaggtggaagtggtcgcctcgggatccccgtaggcttcctcagcagcgcagtagtcgagaaacatgtctttggaagcgcccatataatcaaagttcgctttgggattggccttccaaaagtcataaaagatctcgagaccagctgtctctaaggcatttatcttctccccgagcctcaccacctcggatttttgtttctccacctcggccccaagttcctcctccttagctttcttctcatcctccaacctgtggagaagagtccagagaccctctctttcatcctgaagactagtaacgtcccgagacaaagaagcaaaatcagcttcgagctgctcaattgacggcgtctcgtgcaattccttggtcagctcggcaactttggtctcagccgctagaagtttcttattgacttctccgagttccgtccgcacagtctcaagttgagttcgcgcatctgcagcttcctttcttgccaagtccacatccctttgcagtgtgttggaagtggcaagattcttgaccgcaaccgacttagctcaggaaaaggcatacaccattttcaaaccagtttgtgcagagaaaaggcattaaaatccaaactagacaaagaaggataaaagaaaaacgttagaaaagacatacctatgaaagctctttcaggacttctcccatgaccagctccaaagacaagtcattgtccgccccagccagctgttcgttcacctcagggaccgaccggctcacatagtgattgagcatgtctctgcctcttttggtctccatgttcaatgttaaaagtggggcaggagccttaacttgtttagacccgcttctaatcagctcgggtccacctttcccctgcccagatccatccgaactgcctcctcgggaacttttggactttatgattttcaaggcaggagggtccacaacagtttattctttagaaaggtcaatgactactgcaggtggtcccttctctttgggtagagtctcaccgcctttggacttcttggttagaggggacaagcccgagcttccccccactctcttcttcagtgcctcaatcatgttttgggacatttctgcatgaaataaaaacaatacagtcagaaaaaagtataaaataaatgaaggcatgagaatcaaagaaaataaatgcaagatgaagtactctgcacgctggcaggaacatttgcccgaacaagtacagatggggcatcatcatccgaagagtcttcctgctcctccaggacggccttcccctttccctctataggggtcgatggccgagcagcccggccagccttggacttcttcttcctccccttcacaggttggggtataaagtctgctggataaagcttgtacttcacaaagttgtcctccgaggtcaacaaagtgatattccgagcaggatctgacagttggacaatcttttgagccctgtccctaagtgccaatgtgaagggtggacgacagtatattgggatctattgaaaccgagtataggtggtgtccatgccttccataaaatagtactcgtcaacaaaacccccaatcttgcttacatccttgtccacagtacttgtcagccacttgaactctggctgagagaagtagaagtaccccgaccggctctgcttaggggtagacttcaagtcaaaaaaccaattgacctcgtgtggggacggcacatcccattcttgaatggcgtagaggacgaacagggccgacaaatacttaatgcccttgggagtgaactgggttggacaaaggcaaaaataatcagcaaccctcttgaagtacgagtgcaaaggcaccatcgccccttgcttagtgtgagcacccgaccaagcacaaagccctttttgtgggtttgttgcccggtgattcgaagaggggatgtaacactccagtccgcccaggttcccagccttatccaaggtcttcatacgtgcctcacttattttggatggagggctcacccatctggcacctaaggcactttgcctcctgtggggaactgcctcagtaagctcctcggtgacatagtcttcccccccaacaaagacttcaccctccgcagacactggctccccggcctcattataccctccaaaatttagaggctcagccactccttccttcttcgctttggaagggctatcaggacagacgtcgtcctgctcttctatctcctggacctcaatgtccccctcataatcctccttctcaacggcgagcgaatcttgctcggcacttggcaacgtggcaagctgagccacgtgaggatcggatgcgttgactttctgcatagtctgctatgtgcgggccatcatccttctcctcgacggatattgatgtgtgtgtcgtgcaaccgtaacggaagcggtcgtacccttctcctgcgatctgctcggagtaatagtggtgttgtgctacgggttctggagtaggagaatgatcactagtcacctcccaatcttcaaagctcgagttagaaattccgtcactcgaagaggacagactggcgcaaagacgaggttgatcctcgtacagaagttgaagcaaatcctggtcaattcggtgtttgcctccccaaaactcaccagggttcatctacaaaagacaacacacgagatgagtgtttggccgggatatcgaacaataaacaggaaaatatgccgaccaggagtactcaacaaattaaaaggacgaaaaatgtacaaaaattaagtcaaaactcaaaagtttgaaattcttgggttaaaggttaaaatttcacgaagcttcaaatgagcaaggtgaaaaatgaacaatgcgagattaaaggtagaatgtcgtaaaccgcgaagttgttcgaaatattacagagaaagctacaaagtttcgagcctagattttctatgaatcttctacaacaagttaagaatgatggcattttctacaatggaaacccagattttaaaaatacaaagttaaaagaggagaagattgaaaacttactcactgtttgaagcctaaatgtagtttagatgaagctgctcggatgcttctagtagaaatctcacgacatacttggagaaaatttcttttttgctttgagtttgtttagtagagaaaatggttaaagtaaaattctaaaggagttccagccttatttataggcaatttagggaaaagggataatcatttcgaaatatccccagacgcttcgattcccccaaaagcaaatattgggaaattaaacacaatcaagtgtaaccgttaaaatgtgcaaaggcaaccgtgtttcgaggcattaattagccgaaaaccaaagccccgtgggagtttgttgggttttgtgnnnnnnnnnnnnnnnnnntcaatataatcagatttactagttgataaagatcaaaaatcacattctatgctgcatggttcacatgatttatttcatgattatgtttaatgtgtaaattcta

SEQ ID NO: 35237 - DNA, 2169 bp, Cannabis sativa
ttccttccaacaagacatatattgtgtggccacatgttgctgatacccttccagttggccgtccaagccaaggtaactttggcatcccaattgctgttctcgccgtcactgttgcacgacatacacatcagtatccgtccaagaagaggatgatggcccgcacaaagtagacaatgcagaaggtcagtgcatctgatcctcacgtggcccagctcgtcatgctgccaaatgccgaacaaggtccgcccgctatggaggagggagatcatgagggggacattgaggtccaagagatagattaaggagcaggcaggatgacggacgtccgtccgtcctggcagcccttccgaggccaaagaggaaggagtggctgaacctttaaacttcggagggtataataaggtcggggagttagagtgttcgtagagagggggtgacgtgtctcttggtcgaaggggaggactacgtcaccaaggagcttactgaagccgttccgcagaagaggaaaagtgccttaggggccagatgggtgagccctccgtctagtataagtgaggcacatatgaatatcttggataaggctaggtatttgggcggactgcagtaaaaagggatgtgtgcttggtcgggtgctcacactaaacaaggggcaatggtgccttttcacccgtacttcaagagggttgaggaatattttcgcctttctcggactcagttcactgccaagggcattaagtacttgtctgcgctgttcgtcctctacgctattcgaggatggggtgtgccgtcgccacacgaggtcaactggtttttagacttgaagtctacccctaagcagtgcaggtcggggtacttctatttctcttagccagacttcaaatggctgacgggcactatggagaaggatgttagcaagatcgggggttttattgacaagtactactttgtggaaggaatgaataccacttatactaaattctaatagatcccaatatactgccgtccaccgctcactttggcactcagggacaaggctcatgagattgtccaactgctagatgctactcggaatatcactttgttgacctcagaggacaactttgtggagtacaagctctattcggcagactttataccccagcccatgaaggggaagaagaagaagtccagggcttactggggtgagagagctgggcaagagaaggagctcattcaacttacgcgtgaggctaagttgaaggttgatgctggagccaagtattctgctcaggaatattttgagcaaggaaggaggctcaagaatattctgagcaagagaggccgctcaagaggaagaaaaccctcccgactgggcagaggcccatcgaatactatccagattagagagcctcatctacatgctcagccatcgacccctatagagggaaagggaaaggccgtcctggaggagcgagaagactcttttgatgatgatgccccatttgtacttgtttgggcaaatgctcctggcagcgtgcagagtacttcctcttgcatttattttctttgattatcatgccttcatttattttgtgctttcttctgactgcattatttttattccgtgaagaaatgtctcagaagatgatcaaggcactgaaaaaagagagtgtggggaagctcgggcttgtcccctccagccaagaagtctaaaggtggtgagactctgtccaaagagaaggccccagctgaagtggtcattgaactttccgaagaacaagctattgtggaccctcctacctcgaaaatcatgaagtccaaaaattccctaggagggagtttggatggatctgagcaggcaaaaggtggacccgagctgattagaagcaggtctaaaatgattaaggctcccaccccacctttaatattcaacatggagaaaaaaagaggaaagacatgctcaatcaatatgtgagcagtcagtccctgaggtgaacgagcagctgtctggggtggacaatgatttgtctttggagctggtcatgggaggagtcttgaaagaactttgacgggtaagtcttttctgactttctttcatccttctttgtgtagttcagattttaatgcctttttttctacacagacttgtttgaagatggtgtgttcctattcccgagctaagtcggctgc

SEQ ID NO: 35238 - DNA, 1205 bp, Cannabis sativa
  modified_base (1017)..(1025): a, c, t, g, unknown or other
ggtggaaagggtgatgatcaatgatggatcatccttgaacatcttatttaagcaaaccctaatacggatgggtttgtcactcaaagacttagagccatgcaagcaattaatggatggcttcagcggagtgggtatagctccatgtggtaagaccaaactaccatagtcgacactatcccaaggtcgacgaccatcatagccacattcatagtggtggacgtgaagtctccgtacaacgtattgttggttttatggtactaaatcagatacgcaatggaaaagtttcttattattttattataattgtacgatttcccaatagatatccatatgtgtgtacattaaatcaaaatataaaatactagtttagaaaatatatacctcttgaattctatcagggtatcctcaaaacttctcgtatgtcgtatcccttaatctagttgatgaggatgatgcaattaaactcagattaatatcttccaaatcgatcccccatacacaagaaatagtgtgggctattaggataaagtgtataggtttgttcttgttgagttctcaacacatgagcaagaataattgagagaaaaattctttctttctttttctctctatattttgaaaatatatatgtcaaaaggagagttctgatttctcaaattaggcttctatttatagtagttaaaaaaccctttaattaaagggctttcttcaattttaacaaaaaaaaaagtaacaatattataaaaatacttccagctggccaaataaacaaatatacaacccagataaaaaaaattatacaaataccacttacacacaccttcaacccaggatccatgcttcctaggcaactatcgcgcaaccatcgtgcaactacgtagcaacccaacgcagccaaaacaaaaattcattcagaatgagaaccaccattaattccggcgacttcacctgagaaaacgaccagaatcaatcaaaacatgggctacttcgaattcataaaaaaaagtgtagaaaaannnnnnnnnaactaaaattcaactagaaatccagtttagtttacataaaactaatgtcctaacttcaatttttagatccatgaaaggcagatctaaaaaagtttatctgaagttcccaaacaatccaactcaagtataatctaaaaaaaatttacatcaatactatagtaaaatatttatcctggtgta

SEQ ID NO: 35239 - DNA, 1305 bp, Cannabis sativa
tgttgcttccacacttctttcaagagtaagtgtcatacttaggatgagctttccacatcctaaagtatttgaaaggcttctttccactcaccaatttacgatagagtgataaaatacccggagtatgatcaaaaagaccttcattgagaaagacggcttcagcaaattcatatttgttaatccatgcttgattggccaacatccgatctatctttgaaaaaattatgtcatccccatgctgcttatttgtccacgtgaaaaaattcccacttgatttgacatcttccaactggcagtagttaacacattgaaggaattctgtatcaggataagtcttggccctaagtcctatcctttcttctttagccaaaatgtcattgaagtcccccattaacacccaatttccacctgttctcaagtcacataaacctttccataaagttttccttgtagctcggttattagaagcatagaccacggttacaaaactgtcaaacccttcaacagttgtcatctttaaatgcattaattgactagtgcatttaagaatgtcaactgtaaatctccaagggttccatgctataactatcttaccacctgcatgccacgctatattagtagagaagcaccaattttcaaacacattcgagtataaggttccaagttttggagccttaactcttgttttgagaagcccaacaaaatcaactttttggatgttgataaagtgctttatcaattgttgtttatgttgattgttggctcctcgaacgttccagcaaagtaacttatccattagacaaagagggttctcccccctctcctgtcttgactatctcagtaggcagattctcttttgcattttctgttatttcttcttcttcaagtgcctgaaaagagttcttcataatcgtaccagtagtctcaactgatcccttctctcgatgagcagtacctttcctgctatagactttggtaaagccctcttcatctacctgtggctgctttctattgtctatttaataatccattgttgctgtcctactgccttcttcttacactccgctgcagcatgacctacaccagaaaaatgtgtgcaagattggcttccattcatatttgactactaccgaggtaatggagccaaattcattttcaaattctaaaaatgctggcaggttttgatccatctgaacttcaattaacactctagggaagtttagtctctccctttctttagtcacattatccaccatgattggcttccccatccgaccaactatcttaaaaagtgatctttggccc

SEQ ID NO: 35240 - DNA, 1841 bp, Cannabis sativa
ttagaataataagtaattttgcactctgaatttttgacaatatttgatctgcccctaaaatataaagtttactaaaaattccctctgaacttttacattcataaaaatttagttcttttgttatgtttcgtcatattatttcgtttaaatgttggcgtgtttttataaagtaacaattttgttccttaaattttgacaactatcaaattgtatcatctccaaataaaaataagaaagattcaacattttttggtagatattaaaaaaatcattttaaatgattcaaaaaattaaaaaaataaataaattttaaaattaattaagcgatttaaaaaagtatattcgaaatttaatttttgtaaaaactaaattttatagaaacaagtttgaatctattttttttcccaaaatctaattttgtttaagtaaatataaattttttagtttaatttctatttttcttaaaataattttatatttttattgaatttataataactttctttatttcttctaagatatgagtttgtaaatataaataaatttaattttctctatacaatatcttactttttttagattatttattagatttttaataatattggtttgatttcttaaaatatgtatttttttaatgcaagatatgtgtttataaataaactaaagtttaaaaatatttttttaataataatttagattttttaagtttaaatatatttttttaactaatttttatcaaattttttaataattttttttagaattaatagaaaattatattttttgaaattaacttttttaataaaatgaggtaaaatttattatcgatcaaactttaggaggtaaaaatattaatttttaataataaaagaaacaaaacgtaataaaagtatgtaattgttatattttagtggatatgtttaagttaggtatattttattattggctaattaggatttttatctcctgataaaaaaaatctaacaagaaagttctggagaacatgattagtacataaataattactgagatagtaaaattgaatgaaattagacaaaagttcttgaatctaacaatttcaatagttcaatttttaacaaatagaaaaattcaggaaaggggacaaaaatcctagttagtttttattattttatggagtatgatgtcaaaaaaattgaggaaacaaaaatgataattatgtttttttattctaaaaaatagaaaaatcttttggcgtagtctattattatcatttatataccaaattggccactgagtttttaaatagcgagggagaacaaggaaaaagggtgtgaagaagatgtcgggcatgggagacggctacgtgggcaccgcccaagacgccgtcaggatccgtaggctcgagaagcagagagaagcggagcgccagaaaatccaagagctcaagaccaagtcccaatcggaacagggccaacccggtctcctccaattcggctctagtacctctgaggttcctactactcttttgtttttaaagtttagggcttttaatcttccacttctctttttcaataagtcattttttttttgttaacacttctgactcatgtggttttcagattcttgagaccgcgtttaagaaggaaactgttggtttggttacgagggagcaatatgttgagaaggtaattgtttatcattaagcttttctttttattactattatttttgttaagtcattaatggatcaagggtttccgttgatatgcattgcagagagtaaacattcggaacaaaattgaggaggaagagaaggagaaacttcagaaactacaacaggagtgagttttcaagtg

SEQ ID NO: 35241 - DNA, 3611 bp, Cannabis sativa
tcaattttgctacaattatttttttcttgctactttttcttatagtacaactataggtatgtactagtcatgtctactggatcagagacatctatcctcctcaagtctcaaccattatccatgaaagtttgaacgaagaccataggatcactctagtttgggccctcaattggcacacgtatacgtggtccattgaattgcatccaattttgtacgttttgaattctttatgactcgtgggcttctcattaagcccagttacatgaataatcatcttaatcaatttgggccacatgaatggcccttgaataatgtattttttttagatataataataataataataataactttttttaatgaacctaaaaaagaatttactaggtcaaatatttacacatatttaaagaataatttattattattattttttacgtatttaaaaaaaatattctatatttttaattcactgcaaatatcaaaaaatatttttctattaatattttttaaataataaaatagagaaagtatacaatatgtgatttcgttagctactgtaataataaaaaaaaaaatctaactttgctcaaaaaaaaaaatacaaataaaaatatacataattaaataaaaattataactatactaaatatatttggacaggctacattacctagtagcttatatacatacttactcgctgacaatatgttttggcagtggtttcattctcttgatcttgctataaatgtgagtggtgctaaggtattctagaaaagttgccacacctatagagagctcaaaatagagtgaaaaatgttagctcaagcaagtgggttcttctccttaagatcctcaaacacaaaaacaaaacataggtctccttaatggtcaaacaagtgtgaaaatctgcttgttttgactggtttaacattattaaagatttaattcttttgattttattagttttggagaggaaattatcaattttatgagttgtaaaatatggttttttttttttccttctttcaaagacgttattttatgggaaaaacaaggatggttattagggtaagtaaccagttacctttgtttttttttatatataatttttttttttttttaattttcatttttcaaatttgtaccttcaaaagtcaaaactcaaaaccataaaaatgaaaattacccttttttgtaataaataacttctttaaaaacaagtcatatttttgtaaatttttatcttaaaaacaataaaaataaaaatgactcttttgaataagtattgtttcgagttcactctagttaattttgagtttatattggtgatttttcatcattgtatatatgaccttgaaagaatctattctaatatgtaaattttacatttaaaaagctaggagagagagagagagagggtaataatagataggagataagaaaaggatggaaggttttgagagagttgggagtattaatggtgaagtcaggaccattgaatatgtctgagtaagtaattaatggcatgccttaatcactactattgtctcttcttccttcttcacccttaccctccattaatgcctaccccattgttttgttcaccctttcttatcctctgcaaaccactcctacacatctcatttaatgctctctctctctctctcctcacttaattacacatgtcaaagtttgaaacttcatacacacaaagtccattcccttttaccaaactcttaatccaactactttcccactatcttaaacttaaaaggcttagcttttagacctttaatgcaagtttatagaatagtaaaacaaaaacacaaaggttagtaaaaacaaaaaaccaaaccatgaagaaattttcttattatggagttgttttttagattatataatctcataattgtaactttttgaaatcagaaccaagcatactaaactgtggtttattgaacttagaagtagtagctgtagtagtagtagtaactgatgatgatgatgagacctcttctgctcttggtttagtagtagctgagtgtgttactggtgctgctgcacagactggtatcactgaccttatttgaactgctggggctattttgtgtggatgagattgatcactgaacatggttcttgatagatgacttgacttaatacctgatgatgatggtgatgttgttgtagtataagcattgagatttgatgacagaggataatgacatggtttaacaataacacttggttttttaccaagccattgttcctcatctttcttatggtggtcttccaatgaagtttgaatcaaatgtggtgatgatctgcttcttacttgaactgggattggcctaattgatggaggtaagatcttagaaactgttcttggtgggggtggaggaagaagagaagtaaaggtgttatatttgagtattgaatcttcttgactcaactccattatcatctccattagcttcaatctttcatcttgggaagaaatatttgagcttgatggtaatgatgatgaagagccaatattgttgtctctatgatgacctctaaagattttcttaggtggtgggtttggatctctcctcctaacttgttttccatcatctttgggtctaaaacttgagagaacttcagtcacatttgcttgttcttcatgattatcttgtttggttgtcaaagaacccaactttggcactgttttgaattgattatgtcaaaattaaaaacacccacatgaaaaaataaagaaaaaaacaacaaaaaaagatgaaaactttactttggttcaaagcagaccaggctgcaatagcagcattcttctcagcttgcttcttggttttagcagattcacctgtgaaattcataccagcaagctcaacagtacaagtaaaagttggtacatggccaggacctgatctgacagttgtgtacacagggagcctcaacccagctctatgagcagtttcttgaagaagattcttgtaaataccagtctcatcctttaaagtaataaaaacccaaaacaaaaaatgagacctttacacatttagacagagacaaatacacaaacatatagagaactaactaacttacaagaactcttgcagtaagagaccttgaaggtcccctagtggacaagacattaagggctacttcagcagcagcatgttcagcttgtcttaaagtgggacaatagtttgggctttcaaagatctcaccattgaaattaacagaagctttgaatcttggtgcatgatcaaggccttgtctgatgcaagcataggaaggtagattgaaacagcttctctgtgctagctcctgcagttgattcttatacatattctatatatctgtcttcttgttctttttaagcataaagataatcttaactaaatacaaatacaaaaaaaaaaaactaatatcaaatctttatagacacagaataagatgcataaacagtatagaaaaaaaaaaccaacctgcttcactagatttcacactcctacattggccatgagagaaaaaaaaaaaccataaaaaaggagtatgtatgtatgtatgtatgggtgaaggttattattactgtaagcagtgaaata

SEQ ID NO: 35242 - DNA, 4232 bp, Cannabis sativa
  modified_base (3932)..(3936): a, c, t, g, unknown or other
ttttgtcaaatggattttttctttaaacaaagcttatttatatctctcctgtattccatatataatacaaagttcataatctgtgttaaaatatgtaacaagacaagagatttacatcaaatgataatgagttagattttcgtttcttggtattgcaattttccgttcaaataacatttggccggcactagacaaacgagttgggggagtgttatcttgttcgctgtctagataaggaatcctctcgagaactcgagaacccgagttgtggagaaaatgtgcatcactagatgcaactcttttcactctcttggcactgagagccacaaatctatgttttctatgatcttttgccttactttgtgaactgcatcaggagagctgcacttctgggcatcacctgaaaggaagaaagagattcggtttattaaaaataaaaggatgtttttgaatgttatttcgaatactaaattgggttttgaatttttatgataaacaaaagaaagggtccatatctagcacagaataccttcagggcttaaaggagattggggacaacctcgcaaatcagttccatggccgcagttatggcaagtaataatgtaggaaggcactgaaaaaaggtcgtaatgactcaaatcaactcaagactgtcaatgaagttttaagtacaagaagagagactcactatctgaagatgaagtctgttttgaagcatgacgccatggatcctgtgagccgtttgtaaatactattttggtccctgcaaatgattctcgcttcataagctcatgtgggttgtataagtaagtacatatgcggggttcttattcataatgttgtttcagccatcagatgctaaaaattcaatatgagcttactatttaaaacgggcaaaattggtataattgtcaggaaaatgtgtcgaaaagatgcatgactgttgcttgttgtgacatagaaaattagagttgtgtaacttctaaaaatggaaaaatgaaatttatggacctctaatatttgtgcctccataatatatatttgttgcatcaacatcaggatagacaccctctccaaagacattcttgcagaggtccaaatggtatctgtcacacaagacccaaatcaaagctaagattatgtaatttaaattgcattgatcataaaaagaagcagtggaagaacctgatgaatatatactgaaaaaagtctccagaacagaaataacgcatactttgtatcaacttttgaggaccggatgctgtcatttttaggtgccacttgaaaatatgccacttcagtgcaaacttggaaccaccacagtcgcgcagaagtgtcttcggtaatagtggtatttttcaagtactcctgatcgtatattttgacatcactcgagtaatactgcttgacatacttggcatatgcatcctacacagaagggcattctattcttattgccattatataaacttacaacattttgcataaaattgcactgcttgtatcttcaactcttgacatttttaacatcattatcttttccttttggtaaaaaattacatcccccctagtcctctattattaacacataatacttctagtgattcattctaaaaccgagagctatggctacttgtctgtcacatacattaataagctcaatgaacttctgaatgtcctaaagaacctgcctagttacataaattatatagatatgaatttcactgtctaaaggttgtttatactataaacacagtcaaagatcacataaaatcttttcgcaaatcatttttcctaaacctccaagtaaagaaaaattgctagaagctttgtggtaaatcatagcaaacaaaaacaataactcaaataaataaccagaaaaatataagcataccaccaaatcctctccattcttctttgcttgaacaagaggggagcataattgatctggattaccatactgaaactgcagaaccaaatgtcaaattgtcggtaactgtgaagtttgtaaataagaaacatacaagagtagacacctaccgctgtaacagcacaatctgccagaaaatataagaaatcaccatcaatctcaagctgcaagaaaacaaaagaggaaaaagaaaatactcagtttgcatctggcttaaatattagccatacattgtaaagataatccaaagatattagaagaatccaacctcggctgcaccaaacaaagccttcaccgattttccttgtgtagcaagtctttgatcgacaagctgagttatctcttgtaaggcagatttacattctggttcagctgacacaccaatctgcattgcaagggagtgtgaagataacatttttatttcccatttcctctaaacttaatctaaagttataggcaaacgaacacatttacaaaatgaaaaaacatatcatataatgaatgagaaagggaactgtgttccaattctccatttaataatactgacttgtttgtcaaactcagtgaagttgtaaacagcaagaacaacagcagaacttgcaagacttccacaagttaaatgagggaatttgagacgaaaccatgcacttagagcaccagaatatgaaaccccaactacaaaccatggattttcaacattggttctattcagcttctgattcagagactcctacaacatcaaacatcccaagacaaagttaagtgattttcttacagattgaaaagtgtggttattatactaattttagcaagttcattgattacaaagcagacttagaattcttcttctacctgataatactggcgaaaaacagccaaatcgaaaagggcctgtttggaagacaaatatctcaaattctcagtggcaagtgattcaaaaggagaactttttccatagtaacgatgctccagtgttaccactgctgctccaaacttctttgacaaaacctaatcaatgtgaaaacccccttttactcacgtaatgactacaaatcatttaaattaaaaagacttatttcacgtgtaactaatcgtaactccaaattattttagtccttaaaaatttctcatgagattgtttcgtataattttactaacggaaatataatgtggccattgttcatgtaccaaattgaatccccaaattttgaaatgtatcaaatcattccctcaaacttccgtccatgcgatgcccattaataaaattaaacataattagatggaagtccacccaacaacctcaataattcggaaaatttttaacaaccaagacacaatttagtacataatttggtacatgtctaaatttattggggagagcaattctagttagcctagaaaaattggggtgtattcatcgaataatttagagtaaatttaaagaaagaaaaaaaaaacatacgctgagataatcattagatattccattgcaggagctttcgccacaaattctaaggaagataggtccatctgggattcgaaaattatcaaggtattcatagtaacgttgcttaaattgacgatgatcctgcaacaaattacacacaatgaattcgacacacaagtagaattcaacccaaaataagaaatttttaagagagaaagaagagattggtttacgtaaggagagaaatgatcgagggtttgagtgaaccaaagctccttagtagtcaagtaattgcttgcatttaatgtagcagaactgggtcgaagtaacatttggtagccatggccatagctgaagaaggaggaaaagaccgaaatcaccaaaaacgacaacaaaaataatgtcgtttgaaagtttcgctccataatcgtaacagtcttttctttcttccaagtttcttctggttcaactaaaataccagaaaaaaccaaaacgctctttctttcataacaaaattaaattagcacgtttgttaacacttttttaatcagtttnnnnnttttaaaattgaaaaagtgaaaatattttttaaaaacatattccataaaactgtttttattttttaattttttaattgaaaatcaaaattttaaaaacataaaaaaaattacttttaatatttttttaaatagttttttttcttaatcaatattttagactccgactacacccaaacccaaatctcctcccacggctttggcgctgaacccgacctctgacccgaacccaaattcgaccccggatctagactcgacttaaataaaatcaaaaaataaaaatgaaaataaactttac

SEQ ID NO: 35243 - DNA, 1854 bp, Cannabis sativa
  modified_base (261)..(267): a, c, t, g, unknown or other
acaagttacattgaaacttaggatcgaaaccagtataattctcgtgtgttgttgttagaaggtctctaaattcatttgtgtttatctttctggtttaatatgtgtatactaattttggttcttaatttttttgttttgatttaatatttgtttgtttaagtattatcttgaagctggaattatagaagttaatccttatgtatcagtgctaaatttcctacagggacatttggtaacaattttgtttttttttttaatttnnnnnnnataaaaataaaagtaaaatttgtgtttttaaaattttgttttttaaaaataaaaatgtattttacaaccatttttattttttaattttaataacagaaaataaaagtgtgttctataactttcatttttatttttattttttgattttatttaagtcaagtccaggttcgggtctggggccaggccgtgatccaagtccgggactagggttggggccaaagtccgtgtcccaaggtccaggttagggtcggagttcaaaatattaattaaaaaaaatgtttaaaatttttttgaaagtgatttattttcaaaattttaaaattagaaagtgaaaacagttttataaaacatgtttttggaaaatattttcacttttttatttaaaaaaaaaaaaagtgtcatcaaaggcactctaaacatactaagcaaaaaagccactaaggctagcttagtggtgaaggagggatgggaaaaaaggggaggtcatgggttcgaacccagcacctttaagctattaagctattaattgattgtaaaaataacattacgctacactcaaaaaaaaaaaatatactaagcaaaacataaaattgatctaaattacacatataaatatatatatgaataatttctcaatagataatatccattaatgggtactaaaaattgatgaggtggcaatttggtgacttgctaaagcaggtgaccaataagatttttattaaaaaaaatatatttatttttttaattataaagaatgatgattcttagaaattactttattttacttaaattattatattatccttacattgaatattaaaatgtattatgcaatattaaaaatctatctcggtggaaaggtttgttctcacacttatcgtaaaattagggatataaatttcattgtatccatctattatggtctaacatgattcaattcctattaccaaattctatgcaatagaaggtttactcatgtaataaatctcaattacatgtaaattttctactctcgtgataaattaaacatgtaaaaggcattaaacacagaaaccctataagttatccaaaccatataggtactctcgtcctatattaaaatttgtttctatttcactatagcataattgatactcactcagatttcgcatcaaaatcataaacatttaattggtgattatgcatttaaaagtaattaagtacaaataaaatagaatacatagaaattgagagaaaattaaatcccattaaaatcataaatcaatgtcaaacaatatccatctaacccctaataaattgtttagctactcatgtttatcgtaacaaattcacacatattaattcaggatagaagaagaaaagaatgttgaaaatcccgttgaaaaagccttcgcgattgattttgctttcgaattttcgtactcctgaattgcttgctaattaagagtttatgagttctttgagctaaaacactaataataatttgtttatataggctaacaaagttacctaaaatgtactaaaaagatttaaaatttaaactttaaaaaataagaatcgcaactctacttgaaaagttatctt

SEQ ID NO: 35244 - DNA, 1351 bp, Cannabis sativa
tttgtttttttgggttgggtagggtacctcccaaaccaaaagaaaggcctcatactaatggagtaggtagaacacttatattcacggaaactcttgtctactcttccgatgtgggacttgggttgatacccaacaatcctcccctcaaaccgaggatcacatacttgtggtctcccctccagcgaaaccaccttatttcgccactatcgccaacggaactcgctgcctgaccatcaccgttgtcaagaagactttcgacacaggtcctaacaccgatctccatcttgtaccgtcgtaatctcatcaacgggacatgccacctgactatctcaatatcagatatactttcgatacaaggcaccatatagatcttcaattgcgaaatcatcacattgagggcttctcccacacatcgcaaatacaacccactataccagcgctgttaaactgtaggctttgacttgttggggcccgttctttcaccttgttgcgacgctacctcaccttgactcctattagtatgatattatcagctttgggcctaagccatcacgattttgtttttggacaccttcccaaaaggcctcatactaatggagtaggtggaacacttatattccaggaaactcttgtctactcttccaatgtgggacttgagttgatatccgaacaattacattatgtaatggaatctttattaaattggagaagctatgtaatgagaattacatcaaaaatattaaataaaataaaagtaaaatgactcaaatattttatttttaaaataagaataaaattaaagtgaaaataattttgtgaatttataacttcctaatcaattcttatttttacattgttattctattacattacaattactattaccattacattctactaaactaaacatcaactttgtatacttttttgtactattatttacttataagaaagtaagaagaaaaacttaaaaaaaaaaattagcaaaattgaaaaaaaaaaaaaatcatcagatccagaaaagtaggtaaaaaaaaaactaaaacagattcacaatatatatatattttaaaaataaagtatatgaaaggtgagtttttgttaaagaaaaactaagaaaaatgggtcaaacaaaatttaaaaaagaaaacatatgcgaaaaaaaaatataagtaaaaagatgtaaaaaaaattaacacctaaaaccatgtttcttttttcaaaaaaaaaaaaaaaaaattgcgtaagagaaattaaaatttacaaaaataaatgagaaaagaaattaagctctcacaaattttatcataaaaatgataagtatatattaataaccaaagtattaagagac

SEQ ID NO: 35245 - DNA, 1175 bp, Cannabis sativa
  modified_base (49)..(51): a, c, t, g, unknown or other
  modified_base (535)..(542): a, c, t, g, unknown or other
  modified_base (807)..(810): a, c, t, g, unknown or other
tgccgtgctgatcagagaagagaacagcgtacaacacccagtctattannncagtaaaagactcattgaggccaatggccggtatccattgggtatctaccgaccagccactacgacaaatactgcaaaagccagatgcttttggacggttactcaagtggacgatagagttgggtcagtacgaaatcactttccaaccccgaacaacaatcaaaggctaggccttggcagactttgtggtagaatgcacatgcaaaaaagaaagcataccagaaagcaaccccgagccagcactaataccttagccaagccacaatgaggacaaaccgacctggaaactacatgtggacgggtcagctacagatcaactatctggtgcagggattgccctcgtcacacctgggggcaacacctacacgctgcagtcaagttcagattcaaagcatctaaaaatgaggccgagtacgaagctctaattgctggactaagactagcccgggagatgaaggtcgaacacattgaaatctgcagtgannnnnnnntggtggtaaatcatgtatctggagaacacgaggcacgggaagaaaagatgatagcatatctgagcaaaatacacgatctgctcgcacaattcaaaagctacggtctcagacaaattccaagtgaagaaaatacaactgcagacgagtagctcgattggcaagcagcaatgtgagtgacaaggcaaacctggttcctattcagttcctcgaaaagcctagtgttatcccaattttttcactccgacgtggcatcacgagaatggtnnnncgtggagtccacttggaacatctgctcggtaagataggccgagcaagatgccacattggcatgcccaaagcaagatattccgcgatccacgtagagcaaccaacacttagcgaattcagctttcacatcatgagtcatcagcttagtccctataactcagggatcaatttatgtggataaggcatacacacgatcccactatcagtgtattcagcctcaatccaacgatccttacattcagcattgatcccacgatctttctatttatacgcattgtaacgcgagaggaaacttttctcctcaagcctcctagccctataaatagtaatgcatattcacttggcaggggatcggtcgaaacgcag

SEQ ID NO: 35246 - DNA, 2155 bp, Cannabis sativa
aagtcaggtacataatttttggtataaggtatgctttctttaatctacttttataaaaatatttttatatatatatttagctaatccttaaatacttagattaatttttgaataatattgatgtaatacataggatagataatgttgagtgctaaagattgatatagtaagctacaaaaaaaaaaaaaaaggtctattggaatttgaacttgtgatcaaaaagatacactgataagtttttactaatataccaaaatactatctgtgcataaattagctattatgattttatttaaatattagaagagatataaaaaaaaaattagtatttcacatttcattgtagtagaattaacaaatacatcataaaccattgattctaatacttaacataagaattctattagtttattttaagtaaaaaagtaaaataaaatacaaaaaattatgtgataggggtgcataatatgattttattctacaaaagagcattttttagacaaaatagttggccaaaccgtcataggctgtttgggatacgtagaacgcaaaaaagtaccaaaagttttcaaaaaaaaaaaaaaatcacctcaaacggactaccaaatcaaaagttattaatgttcaaagttttcaaaaaatgcaaattttagtcattttctctgatttattccatttattcttgcccttaaattattatttcattttattggtcttgaaaaattatataaatacaagtgattgctaaattagttaagaaatgagaaagttatgtcattcaaaagctactaagtgttcttcactcactcactttttgcaacccatcacatactcaaactaaaatctgcaccatctcaaattaatacctaacgttaatatgtatttatttaacattctaatttaatttttatttatgcttactatatataatttatacttaattgaattacattaataataaaatgattatatatatacaaaaattatgctaaaacacaaaattataaagctgaaaaaaaatcataaaaaaatcctacggcgtcggttattatacaataaccgacggcatagcgcatagggatcctatgacgttggttatttcataataactgacgctataaggcccctatgatgtaggttgtttttacccttaccgtgtcgcttggaacagcgtcagtagcaaattttgccaaaatttatactaaaagcccataaaactgcctataaaacccaattttatagtaatgtctttgcaccaaatcatatactactacttaccgtaaaagcaagtttgaccaaaatatatttttatattcttaatgtttatttcaaaatttagaagcatattattaaactgatttttattttaaaattatattgatttttttttataggttattatgggttgttgtactatatataatacaataaagttgaaacattgtgggttattgttattttacacattatacatataaatattattgtataatttttttttctaacatgaacacggggaagtttgtccattattatgaaaagaatgcacaattcataattacatccaacgataataagaagaagaagaaattacatccaatgcataaagaaatctcctgaagacagctggattcgagatcaagatgagattgctaagtgttttttagacaacttcaaagaattatacaaagggcaaccaacccctctgaaccctgtcctaagtgaagttttccccaagcagcttgacgacaatgacaacctcctcctcaaaaccatcccggacgcctcagaagtaaaggcggcgatctttgaaatgggcaaggacaaggctccgggacccgatgggccgcctccaagtttgtacacgcatcactgggcaacggttaatgcggatcttgtagagatggtctccttcttcttcgtccacaaggagctgcctgcatacataaatgacacctcaattgtcttggtgccaaaaaaggaaaacccgactctaacaaaggattatcgccccatcgctctttgcaatgtggcatacaaagtaatctccaagataatagctacaaggcttcagagtgtcattcaaaagatcatctctccgaatcaagcggcttttgtcaaagggagatgcatagccgaaaacacaatgatagct

SEQ ID NO: 35247 - DNA, 1477 bp, Cannabis sativa
aatttgtgaaatttaaatttaactatatgaaaagaaatttattttcctaaggatgataaattttcattctttcacacaattaaatgtataaatggtgtgtgtcgtgagccacaacaaatttactaatatttatttctaatacctccaattattttagtataactgtaagtaagggtcgatcccacgatgactatgtttatttaattactcaaaaattggtgacaaaagttagaaaaggaggttttcatatttagaagaaaataacataaataaaaataaaaacaaattaaaattgagactacgatatcagaaactagttaaagattattcgccaccctcaacaatcattcataattcctataaatgaatgtaatctcagtttccaatcaaactattaatcccccaaataaagctaaagcaatcaattatctcaatctccctattacatgtaatcaaggcgaagcgctcaataattaactcttttacctaagcagtaaatccacgaatcatgcaatttatttaacttagataaagctttgagattcatggagatcgattaatttaggcaacaaattaatgaagaatataatccatttaacctaggtttgattctttatcacaattaaaatacctttgacaatattaaaatatgtaatttatcacaaacacttagaatcctagactataggtgaataaaaatcctaagatgagagtagattaaagtaaaacctactttagtagccagccaaacaagattaaaataataattatgatactgaacatagaagaatagaaataatctcatataatagaaactagaaactaacattcatcatagaaattaaaaattcatgtcttggattttgaaataacctttaactaaaaggaaactactccaaactagatattataacgataatcataatgaatagtaagagtttaaagagaataaaagaactatgatgaagaacagttcgaagcctcgatctacgtctcttccttgctctctctaagttttcatctcaatttggtagctctagggtcttggaattcatagcctaaaaggttctatttatagtgcttgaaaagatagatgaatcctcttagaattaggatttttttttttttaaaaaaaaaaagataagtgtggcgctatagcttaggaattaggcgcaatagcggccatgagatatttctcgaataacccacgtgctgaaattatatttttttttaggcttgtgctatgtataaaacatgcgattgacttctaatctatcataatttcttcaatacaatttagaatcagacgattcaagatgttttggaaaaactaagaactagatccaaaactttcatgttgagctccaagtccatttcggcttctaagttcatcaaaatttgtaattaaattatgccttgtaaaactgagctcgccaactttcactattttctaccaaaatatgctaacatccctcca

SEQ ID NO: 35248 - DNA, 2115 bp, Cannabis sativa
ttttcatcaggtttgagaacgtaaggggcgtgcggcttcatcaaattaccattatcatcttcataaatccacatccattctcttatttccaatttcttcaaattatgtctcacgttagttgtgtcttttgatttatcgttgtccaggattattcccaagtgactgtcacacacattcttctcaacatgcataacatcaacattttgtttcaaatagtatttatacaccaataatcaagctcatagaagatacttttttcctccgattttgatcttctgcaacctgtctgcattttacgcctccaaactggtcatatttttcaggaaatggagaaattagaagaagacatccaccgagacattttacttgtgaggaaatattttaacaagtttgtttacttgttaaaatatttagaagggacaccgcaagtttgtttacttgttaaaatatttcctcacaagtaaaatgtctcggtggatgtcttcttttaatttctccattaaacttggtgtcccttctaaattgatggttactgggcaagaatcttctgtgacctacaatagttgtcttaccaatcactcgtatcgaagaagtgtcttcgttacatgttggacaagctttgtatcattgaccactctatccaaacaaactacttcgagcaagaaaatcattaactgcccataaagggttgcacgcaacttgaacataatgtttatttttaaagtatttttttataatttatattatttaataataataaaaaaaacaaaaatctctcaaaaataaatttataatcgtaacatatttaaaaaaatttcttaaatatcttcaaactaagaaaatatatatatactaaattaatttaaaaattaaattcacattgatttattgtttaatttgattttaaaaaactaataaatatctattaaacaaaacattaataaaaataataaaattataaaaatttatttttatttattttaaccataaaaagtaaattatatatatatatataaatgtactatgcaatgtaaagaatatccgtttcaaaattttaaaattagcgatattatacaatgaaaaatatacaaattaaaattagcttatgaaacaaattcataacaaacttatatacaattatctgttttatattttgaacatgaattgatggacaaatcctaagggttgtccatctgtgctcgcagatgctggcgcacgagtggagttggctgaagcgattgcctcaggctctatatgatgatgccatcagaggtagttttcttcctattagccccctttttcttctagggagcatcaggttgtggctcggaagtaacttccttagagacactcttcttcttttcttgcttaatagggatactgagactgtagaggagatcttctaaattatccatatctataagggtaaaataaaggaagttaaaatctgcacaaaatgaataaacttgaagtggcgagatcaaaactcccacctaaattattaccaaaagtgctagatgactgctataataattactaaacttcctagaaccagtaattatgaagagaccgtagtggttaagtggagacatatcccagtctagactagcaaccctattggtgttagtcttgtattgttcggcaatcccataagacgagttattacacgttagttgaacgtgaacttgagttaccaagtatcaaatctatgggctattacataaatgcaattctagatgtagaaattatattgactatctttaaattttacaaaacttgtacgctcgacctaaggacagtaggagaccatccataaaaacaagaattattaccttgaggagccccttcgttaactttggtggcttctcgagttgttatattttcaaggtagtgaatgcgagcgatttagtcacagtcttcttcatcctcgggcactgaaactggctgccaagcaggatacttgggatccttgtagtccatggtgcactaatccagtaggatacctgggatccttgttgaaagccccaagttcttgcctaacctatctttttcatatttagattgattttatcttgatttaagcttgaatataaaaagaacaaaatcaaagattca

SEQ ID NO: 35249 - DNA, 1573 bp, Cannabis sativa
  modified_base (1007)..(1007): a, c, t, g, unknown or other
  modified_base (1397)..(1407): a, c, t, g, unknown or other
tgctcgaaataaattagctttaataaaatttctaagagcaaacctagacaatttagcctggtcacatgaggatatggccagtattgacccttcagtaatgtctcacgccctaaatattgacccaaactttcgccccattcaacaaaaaagaagattgttggacaaagaatgggcacaagcattgaaagaggaggtagaaagaatgcacaaaaacgagttcatcattgaagctttctacccagcttgggtggctaaccccgtactagtacccaagcctaacaaaaatggcgagtatgtattgatttcactgaccttaacaaggtgtaccccacggactgttttccacttccaagaattgatcagctcgtggatgcacgaaatcttgagcttcatggatgcttatttggggtataatcaaatcagaatgcatccaccaaaccaagaacatacaagtttttgaacatatatgggtatgtactgttacaaggttatgtttttcggtctgaagaatgctggagctacctactagaagctagtaaataaaatgtttaaagaccagatcggacaaaatatggaggtatatgtggatgatatgccagtcaaatctaggaaagctaggggcacatagaggatctggatgaatgcttcaaaatcctctaaaaatacaacatgaaactcaatcccttaaactactcctttggagtcagctcaggtaagtttcttggttttattgttaatgctcggggtataaaagccaatccagaaaaaatacaagccctcctgaatatgaaatcgccaacaacaactaaggaaatccaaagcttaactggtcggatagtcgcactctgtagattcatctcgaagtcaacaaacatgtgtgttcctttcttcaacatcctttgaggtaacaaaaaaattgaatggacggaggaatgtgagaatgctttccaggaattaaaaagacaacttacaaaatctcccgtactctcaaaacccctagacggagnagaattaggaatatacttggctgtcacagaatatgttgtaagcgttgtgctgataagagaagagaacaacgtccagcatccagtctattatatcagcaaaaggcttgttgaagctgagggacggtatcctctgatagagaagctcacttactgcctaatcttagcaacggggaagttaaggccttatttccaggctcatcctgtttgggtatacaccgaccaaccattacgccaagtattacaaaaacccgacgcctctggacggttactaaaatgggcaatagagttgggtcagtataaaataatcttccaaccccaaacagcagtcaagggacaggccttagcaaactttgtagttaatgcacaggcaaagaagaaagtaacataagnnnnnnnnnnnaggctttttcaacggggttttcagcattcttttcttctctattttcttttttttatataattaatatgtgtgaatttgctacaatgaacatgagtagctaaatagttcattagggtttagatggatattgtttgacattgattattggttttaatatgatttaatt

SEQ ID NO: 35250 - DNA, 1763 bp, Cannabis sativa
acctatctgctcacactgtggagtgcctggacacactatagcaaaatgttatagaattcatggctatcgacctggccatcgtctatatggtaggtcctaaggaaacgcccaatcagtctggcaatcagcaaggaaaatcgaatgcaaatttcacagcagcaaatgacaacaaagagaatatcagtggagaaatggaccttgctgctcaatgttagaagcttatgaatctgctgactcagaagttgcaagaaacaagcaacctgcacaaactgatcaacctgttgtttcaaacatttcaagtaaatttgtctctattcttaatctcagctggatcttagatattggtgcaacacatcttgtgtgttctaatccatctctatttcattcggttaaatctaatagcaggattagatctgttggtttgccaaatggttctagcaccagagtatcatttgttggaaatgtcaaattattcaatatcatgcttactgatgtgttatgtgttcctgattttcatcacaatctcatatctgtttgtgctttgtccaactcatctaactactcttttctatttcttcctcaaaaatgcattattcaggatatcaccaagagtcaagtgattgggatgggtgaaagagttggaaatctttattacatttctgagcataaagatcctactgtttgttctgtttcatattctagaatcaatgatgacaatctatggcattatagacttggtcatgcttcttgtgtaaagaaacatcctttgaataaaaatttacaattttaatattcctactgtcatgatttccattgttctatatgtcctcttgccaagcaaagaaaattgcctttcattagcaaccataatctgtctaaacactgttttgacctcattcacattgatatttggggaccatacaatattcccactgttgaaggtcttaggtattttataaccatagttgatgattgttctagatttacttggattcatcttattaagaacaaatctgatgcccaatttgttatatctgccttcatacagctgattaaaacccaatacaatgtgcaagtcaagggtattaggtctgataatgccaaagagttacaatttccagccttattctcctcattaggcattatacactatcacccttgtgttcaaagacctcaacagaattctgttgtggaaagaaagcatcagcacttattgaatgttgctagagctattcttttccaatcttagatccctctagcttattggggagattgtataatcacagctgcctatcttataaatagaactctcacttataatctcaaacacaaatcccattttgagattctaaattctaaagctcttatttatgaacattttaaaacttttgggtgtttagcctatgcctcaactttaggagctgggagatctaagttctccccaagggctattgcctgtgttttcttgggatatccacctggaatgaaggcaaacaaattgcttgaccttaccacaaataaaattttttgctctagagatgtcatatttcatgagcacatttttcccttctcaaataacagcagtttgtcatcagatttctctaatttttttgctgctgatgcttctcgaaagcatattgatgcctcaaattcccatccccgtgttccatcagcttgtgctcctaattctcaccatcaaaatgctcatgacacaccagaaaatgatacaccaacaccagattttcacacatccgaaactgatc

SEQ ID NO: 35251 - DNA, 1877 bp, Cannabis sativa
  modified_base (173)..(190): a, c, t, g, unknown or other
tagctatttaagatatcctacaaatttttgataaattcagaataatttacaatataaaaaataatgttcgaacagactatattatacgcgtataaaataaaatagtcacgtgtgcaatacattgtttgaacgtagttttcagcatgttaaacttttccgaatttcttaaaatnnnnnnnnnnnnnnnnnntaactataatttacatgaccataagaaaaaatttgactaaaaaattatttcaaatactaaaatagatagagatatatcagtacatcccttttagggaggtgaattataaaattttccattaatatatataaacatatatttgtcaccttgtagttgtatgaaagaaaatactaattaattttgcctaaacaactttgattaattatatatggagtttagttaaagtggaaaggtaattatatatatttattaaaagaaaaaacttttatgtatactttaagtatcggttttaaaatgatactaaaattcatttgtctcagtttataatagacacttaaaatttgactttttgtgactgtggaataggtgtcagttctatgaactgacactaaaggtataagtgtcaatttaaaactgacattaaaaatacagtttgtagtagtggtgataagatttaatagaatttatatatcaaacatatgtatgaaacaaacatgtgaaccaagcattatattaaataagtaataaaataattatgttcctttattgataaataaaattcaagataacattaaaataggattttagttagggctcaaaacacaacatgatatacataccaggcacaccaaaacattaattgaggtaactatgtaagggatagagacactaagagatctagatcatcagcttatttttcttaacaggaggtaacttcactagctggagagttcaattatagccaatagtagccttatccacaatttgagtatacggccactacagaggcaatcaaggaagctctatggttaaatgggcttatgaaacagttaaatctagctaagaaatatcctattatctactcagacaaccaaagtagtgtctacttatgtaaaaattctggttttcacgacatgattaaatacatagagataaaataccatttcatcatggataaaattactcaaggggaaattgagattgacaaagtgcctacagaaatgattcttgtaaacatgagagctaaggtagtatccctaaataagtttaagctttgcttaagcttattagagattgacataggttggcaaaacccctagtgggttctagccaagactgtcagaaaacctaaactaaagcctaccagaccatatggggattcatgtagaaattgttggaataaatctccatatccactgtccagatcaacgtaacattttattacaaatttacaacaaaaaagagactattacaacaagtggccttcgaacgtaactaactctatctctgaaccaaagttagtgaaaaattcagttaactgttgcaactaatatcaactcattctctgagctacctacttctataaatacatagaaaattaaatagaaaaagacatatcgaagaggagaaggaagaggcttacaacgttgagtcctggagccctagggttagggctcagaggtccatttccaggaggaaacatacacaaagagaaaatcaaatagttagagagagaaagagagataaacattaattgagagagaaatacatgtaataaacaaaggattaccaatcgctacttgtgatttggaatccatcattgtactgtgctgatctttgaagatctgataatggaaacgagccattcttctgaggcgagctcaaaagaagaagtacccaacaatat

SEQ ID NO: 35252 - DNA, 1302 bp, Cannabis sativa
ttattgttattttatgtctccaattataaattaaaataaataaaataataaataacaaatttaaaaggaaaaaattgtatgtaaaaagaaatatttaattttatttgaattatatttaagaaaataccatatataagaatagaatatacaatatttgatctattaagttctaaaatatatttgtataatatgtattaaattttaaaattactatttttttacattaaaatagtaattttatatataattttttaaaaatttatttaaatatgtgtggattggattggatcggttacttttacatgccaattatcattcaatctgcacaagtacaaattttaaattttttaatccaatacaatctgcattttacaaattggttattttataaacatctctaaaaaaaatttactgggttagagataataaaacaaaaataattacttcattcaaatttattctaaaataatacctaataccaattacatatcactaagtataagtaagggaatgagtactttgtattttcatgaaaaaaaaatatttgataccctgtgtttttaataatacttaattgatacttcatatttttaaattatacatatttagaactctaaagtcaaaaaaaaaaaaaaaaaattgaataaaagcgacattagattaataactaaaaattagacatcatggtcattacataaaatgttaccctaaagtaaaatttaatcaatatagtttttttaaattaaccaaacaaatctcacttatatgtaatcaaataattaaatttgaatttaaaatttaaaagaatttagacagtttgattgtactgattaaatttatttaaaaaattgaatatagaatactaaatatgcatgattttaaaatatagggtaccaaattagtattattgacaacacagagtacttaatttgtatttagataaaataaagattaccaaatgtatttttatttttgtgatgtgcattttaaaattttataaattaaaagaaacaacttattaattttttaattttttttaaaacgatatttaaagttttaaaatttttaattttaaaaaataaatataaaatttataaatattaaaattaaacatactctcaatattaaaaataaaaaataaaaaattataatattacaaataatatattaatatttatatatacttaaactaatttaaaattaatataaattcaattaatatataataaataatattaatatttacaactaacactattaaatttaaccaaatattcttaaaatattctatatcaaaattca

SEQ ID NO: 35253 - DNA, 1964 bp, Cannabis sativa
  modified_base (43)..(44): a, c, t, g, unknown or other
  modified_base (1234)..(1234): a, c, t, g, unknown or other
  modified_base (1816)..(1820): a, c, t, g, unknown or other
cacttgtccatttgcctgaggcttggatactgacgagaagctnntgataattttattcctctcgcagaatttagtgaacaagttctccatcaaattgggttccattgtcggatactatgttcatgggaattccaaacctacttataatgttcttgatgacaaagtcaaggactttcttgtagattattgatatgaggggctcgacctccatccatttagtgaagaagtccactgctaccaccgcatacttagctcctccttgccaagtgggtaatgccccaattaggtcgatcccccatatagcaaatgggtaaggcgaggtcatcattctaagttctattggtggtacgcgaggtatatgtggaaacatctaacacttatcacatttcttgacaaactcatgtgtgtccttattaattgtcggccagtaataaccttgtcgaatgatctttttagacagactttgccagcccacatgatccccatataagccttcatggatttctctaatgatttcatttgcttctgcgagaggaacacaccaaagtaggggcattaaataccctcttctatatagtttgccttcgatcaatgtgtagcgaggcactgtatacaatagttttcgcacctcgtttttgtcatttggaagtttcccgtcgagtaaatagttgataatgtgcgtcatccatgttagagagctatctattatctcgacgtcttcagattcacatatacttggctcgcttagcatttctactggaaccagatttagttcatccaggtcattctgcgaggccagctttgctaaggcatcggcgttggagtttcgttctcttagaatttgttcgattttaaagtaatagaatctctccaagttcttccgaactttctctaaatactttgccattttcaagcctttggcctagtattccccaaggacctagttcacgatcagctgcgaatcactatgacaaatgagattttgactttcaaggcctctcctatctttaaaccggcaatcaaggcttcatattcagcctagttatttgatgcgtcaaattggaatctcaaagcttagtggaacttaaagccttctggcgatattaatatcacccctacacccgaaccctgttcgttggatgcgccatccacatataacttccaggtttccacgtctcactgatcaagtgggatttctactggagttataccttctatcaagaagtcagctaangcttgacccttgatggatgttcgaggttggtatgttatatcgaactgccccagttcaatcgaccattttatcaatcttccagaagaatctggttttgataaaacttgtctcaagggctaatcggttaacatttttatggggtcagcctggaagtatggctgtagattacgagacgcatggactaggcataacgcgagtttttttagagggggatacctagattctgcccctagtaacctttcacttacgtagtaaataggttgctggtgcttaatccctcctcgcactataattgcactaattacatcttctgagatggctagataaagaaataacgtctctccagttattggtttcgccaaaactggaggcgtttcaagatgcctttttatgcactgaaaggcctcttcgcactctttcgtccactcgaactttttgttgcctcgcaatatgttgaagaatggcacacattacaaattgacttcgaaatgaatctattaagtgtcgccattcttcctatcagggcctgtacttccttaggctttgttggggatggtatgtctattaatgccttgatttttnnnnnatttgcctcaataccccttgcgttcactatgaatgccaaaaactttcctgaggagacttcaaaggaacatttttttgggtttagcttcatgttatacttttttaatattttaaagcattctgcgaggtctgaggtatgatcctt

SEQ ID NO: 35254 - DNA, 3088 bp, Cannabis sativa
caaataggaaagcaattaagtgtgcatacatcctgcatgtggtatatatatatatactaacatatatgtatggaaagagatgagctaaagaaagctaaaatcaatgttgtacggttatatttatttatttttttattttatttaagctactccttttttttttataggaagctatatatcaaataattcaattatgtctcctttcttttctcatatatttgtaatataagtgggtagcaatatatatacattccatcaaactttttcaatcaaatttgatcgactactgtattaacttgagtaagattcccaatccaaatgtgtcaaagatacgaagcattcattccacagtacaaaatattctaagcttatatacagggtcacacacaaagtctttttttcttcaaacaaaacttttaaatggaaccaaaagtatcttgaaacttggccaaactctttccttttctccttcaaattgtttatatttcttgaaactttaaaatgccattttacaagaaaagattcatgtcctatatttcaaaccaaaaaaccataatgtcctacatacctgaaccaaaatacatttattttttatatacaataaaaacacaaataagacacctcattatgagattataccaatgctgattgagttttgtttatagcatattatattacaccacaatgtaattttcgtatgaagaatgagaccaaaatttaatttttggacagcagcatgtacaataaaatagcaaacactcacactataaccatacaacacaacctacttcttttcttactcaatattctcatgaatccaaccatataatccactctcaaagatacatacatatataaatatatctaaatgtatattaagttcacattcagcagtacacggagcactgtagagaaaaaggacaatgcatcaattaatcaaaaacctaacctaattcctaatttgtcattgtaaatgcatagatatagaacaagaaatagaaccactattggattcttgtaattagctcaccattacagaaaagagttcacaattcaaaactaaactagtaatgtagcaagtgtgtcaaattaacaaagctaaactaaataagtttttctcttaccatcagggcgtcgtcgtagttcagacgagagagagcatgagggcgtcgtcgtccttcttgtgaccgttacggagagagaatatgagccgtcggggatagaaacagagagaaatgacaaaaccctcggggaagagacatcctcgtcgttgtttggggtcgtcgggggaggagaaccagacctcgtttgggccatcgtcgtcggaggaggagttgggggtacctgtaagcgatgtagtaactaatttggggtacgttgatttgggggtaagcgaaggttctgatttggggtaagcgaagggtctgatttattttagttgtatcgtgggttagagaggactttagtcttcggttattaggaaagctcaataaagcgaaaattaataaaaaaagattaaacacttttaacttcgcatattttcaaaaaccgaaaatataactcaaatttcattagcctccaatctaaaagtgatgttgcgggtcttaaaataatattaacttcggatttttaatttactaaacaaaaaaaacgaaattaaaagatatatttgtagtagtggtacctacaagatatatatgatgttgatatatttatatactatattaggtttggtggaaatatgtaatagaataatacgatgcataaataataattaaggcaactgcaacaaccatagaatatgaaaagatgaagctcgttaagcatgaggatgttagactatatatatatattatcggagaaatttagataacaccaaatagtgggagtattcaagcacatcaagaacactcactagcaattatgcaagtactcgcctaaaataacgagtactcaaagtataagttacgaaatagataaaaacaagcataattatagagaagacaagagaattatagtggttcagttagagcttggtctacttagttcactttaggcaattgtttcatcttcgttcatttgattttgatcactcctttataagaaagcaagtgtcctttaggattatataatcagtcagattagactattttcacaataaatgatagaattaaatcaagataaacgtttaaagaataaatggagaacagctttgtccattcttgactttattgcagcaacatatgtgacttgataagtcgcagcttgtccattcatattccaaatacatgagctcgtgggctctgcagtgttgtacttgcaggatggggctttggacctatttcgttaaatgtttatgtcacccttgatcgcatatagtcggaaattctatgcgttgataacttggaacatgcgaggccctaatgagtcatcgaacacattagttattcggaccaaacttatgagagaaacgatctttactcgtcgcaggagagacatacttggtcatcgcatataatcggtatatgtacaactaatattaacttctattagtcttgtttatcctttgactatgaggagcatagtatgcgactagactctatcttggtcgcatcttctcataagttcacatcatgcgaggtgaatcgatcattcgttctctggtcacattggttgtagtgtccacacttcttctttatgtagttaacaacactttctacggtcaatagtactttctgtgattaacaacactttcttcaattaatagcacatgagtggagacaaccgtacacttacgacaaatcatctttttctatgaagactggctccacatgacaattttttatgagactttactcgtatttttaggcaaaaaatttatactataacgcatgcccctagttttgtaatgataactgtttgtcaaatagcaaaagtactattcatgagggacaggcacgttgctctgtcacatggcagtgacctttgattgtcttgtcgggggtttcaaaatgatagttattcattactttatcttccccagatgccacatcatcgaacccttcagggtttatgtaggtgtgatttg

SEQ ID NO: 35255 - DNA, 1420 bp, Cannabis sativa
aggtccaaaagagcgtcatggctaaaggtcgaagaagctccaacgccgacgatctacggaaagagagatatttaccaacactactagagcagaacgacactgacaactaataattctatcgagatcttgaagagccttgtgttgaaataagtacactctcctctatattctcggttcttattttttttaaatgctcttccttttgtaatgtgttaggttttttattagatatttttgctagtttactttccaattttcctaaggcatttccctagttcatgttcgttctcataaattagcgtgtatgtatttagagttgatggtaaattagcctggattaaggattttccatatatactctattgttgttattaagagtttaattttaaaaaaaatattaatgaagaaatatatttttatataagtgcagtgagtttataaaaaataataatagaaatattatttttagatatataaaaaataataaaaaagatattttttaaatatgtgcaatgaattaaaaaaaataatagaaagatgtttttttttttttaaaaaaaaaaaaaaagatgtccaatttaaatttaaactcttaacgttttaaaaaagaataacattttttattttataactacatatttaatataagagatatatatttatacatttgattctaagtatttcaacctcatctattatttttgttttattatttttatgtcaaagaaaatcattaattatttttattttaaaagtgtctcaaatgattagtaaatttctaaaataagttttaaattaaatgtaccacttaatatttaattaaattaataataataaaacatcaacaacttttgtcctttaacatagatagataggagcctctaatttatgccaaaaacaataaagattatacaaattaagatattatcaaagctaaagaaaataatataatcaaatattctagcaaaatacagtatattcatctacaaagaaaaatatcaaatattattgttgtctttttagtacataatgaacatagtaacacacatatatatatatatagaataatacttacagctgcactataaataaccttattagctctcatccattaaagcacattcccaaactcatcttaaatataatcaaactcttaataataataataataattatgaagttaaacattgttatacttattttctcattgttcagtgtttttatttggtttgatgatgagattatagtctctgcttcaagtgcaggtactcgtgggccattccaacctccaataagggtaacaagtactcctcaaggcccaggcccaaaagtaccaaaccatgaaaacccagaaagagcagaccatagatgtgggccagattttggagatattccatgtaacccaggaaggtgttgtagt

SEQ ID NO: 35256 - DNA, 3576 bp, Cannabis sativa
taaaatctcacctgttgaggggtaagcagaaaaaaaagagccaaaaatattggcaacaccaagaccaaacaactgagagaggaaaatagagaagcactgttatattaaatgcagtcctttcatctagcatgcagtaaagatcagtagttgtatgcagttctattcatttaaaaggcatacctcttgatttgagtccaactcgtatccattctttgctgccaaggctttagcaatacccacagattcctaatgtacaaaattgagtttcatgaaacttgtaatttcatgatagtcaaagctagaaagaaaagaaacttaacttgcagtaatctacacaaattctcttaccagtattgctacccctgtaatgagaaatgcagtggggatcaaagacgtagcatatccaaattctttgggaatagaaaattttggaaggccttgtggtatacctcctacctattaagaatatgacaatcaatcagcaccgaccatactgttattgacttagatgatattggctaattccttcagaaaacaaatttatacagaatcgaaaagaaacatacaaaagtgggacaaagagcacccaaagtgggaccattataatacaagcacataacatgtgaaacttcacagtcctgtagtagtatcttggatttgaaactccccatctaatgctaaaaggccatttgacacctatgctcattgattctggcaacatactaatcatccctagagtacatactgaactcaaagctactgtgattcatattcactattgattgcaagagatttcagtagacgctagtaaatgatttagagtgtacataaataatcatacaaggatgaagaatcacaaattcttgattaacagtatcgctaaaaacgtaccagagtgacttcacatggaaagaaaagcttaatttataactaggaaaaaagaaaattcaatcttacaaaggattcagacaagaaacagaatgtccttttcttttgtttccaaaagtgatgcccaaaaaaaaaatgcatcaaataaagcagagtaaggttcttggcagccatcagctaattgacagcaaccatgccaattttatgctaaaacgcaacttttgatatttgataaaactttcatgtggcctttctctgtagcaagattaataagttcttactatcaattttctaaaagtcgagttcattgaaatttatccaccagttacatattctatataaacaaaggttgctagctaggtaatcagtgagtatcatgttttgagaatgatgactttagattctctccatttattctagagagtaaattcatgagcattgagtagggatgtctgacagagtttacagaacttaggaaaatttagacgattcattactaaagtatgtaattagaggagaacttctcatcattaaaggcacagtaattaatgtaaatatgatgcttttcaacttttaacctcaccaatgatatagaagatggattaaatactttcacaatggctgtgcccaaaacaactcccgtgagaggaccggctgctctaaggaaccttaagtacttccttgattttccctaaatgtaaattttggcaaaattacagccaaaaacaatcatggaggcataatccaatcaaaaaacacgggataagttcataccaaatgtttcatgacaagaagtattgcaagaatgattgatcccattacaaaaggaggccataaaaactgcaaatgcaagaacctccaaagattagaaaactgacatagcaagtgataacaacaatgaaacgaaacatgagcagtaaataaagtagatatgtggatgtaagatggttgacgatcacttaatgaacaataatatatcataatacaagaaacattcttctagaaatactgcaatctcatattcaaataggaataatatatcataatatactctattaagattatatcatttcagtgaatgtagcataccccatctgctccctgtataatgctcttaaccagcggcacaatcttgctacttcgttctatatcatatcccaaaaagtacttcgcttgagataaggcaattacaatagctgacgcagtagtgaatccagatatgacagagtgactgataaatcgaataagccatccaagcctgggggaaagaagaaacttcagtaaagagctcaaaaggcaacaatcaagatagtcatgcacccatgcacagttttcaaaaaaaaaaaaaaggcatgcacgtgttacttacatcttcaagatatatacatgagttatcttttatatttatgaccacattgatgcatatacaagttattaatttcagcaacttacacgaagagtaaaaagttggtcattaagactgtatctacctaataagcatgctgtagattcagaagttcattttaattttcaaaattttatttttaaagtaccaaaagacttctcaacaaataaccaataacagctaaaattgattttgtgtgtattcttatgtattcttatacttttaccctacatggttcaatctttcatcctgcagagctatgagactgcaatttcctggatcaccactgacaacaagtattagctagagttaccctatgaacaaatcactttctaggtgtctgataatgaatgcaacccacgatgttgcatatttacttacataaatgacataaattgtattacacacttagcataagataaacaagaatacctcaagagccccattgtgcattctaatatgccaaccatgagtgctaataatattgccatttctgtatataattccgtatcagaggaatcaacaattccacttaacacgttagagaccaatagagaaaccaaggccaccggaccaacagcaagctgacgtgatgacccaaatatggcatagataaataaaggcacaaaaccagaatcttccttgcaaaaccaaagtaacatattaatatcagggagaatgtaaaataataaatcttacatatccaagaggtagtgtattcaacatttatgacactaagtgacaaaaagataattgggaagatagtaaaaccagaaagaaacagatttgagaaccaaaatattttaaagtttaccacgaaaataatagttagagaaaaatacaataaatggtgatagcttcagtttatattattatataaaagtaaataaatacagaaatacgtgatagtttcacttacaaagtccataaattggatgaagcccagctaattttgcataagacattgcctgcccatatttatataaaaaaaaaacaaggggtcaattactagaaaactcacggcaattactccaaatgaaatcttgcctgaccattatttataagagtattgatgcaaacagctataaaatcgtcaatagttaagcaattgaatcaatcaaatagttaagcaaatcgaatcaatccatcattaaacagttaagctctacaatcaataaaattatcagtttaataagcagttgaaccaaatcaatgataatcaagtttcagcaagactatgtcaataatctaaatattgggtttatgactatcataattaatct

SEQ ID NO: 35257 - DNA, 949 bp, Cannabis sativa
gtaccaaatcccgatagagaaacgtcactatttgtcggaggaagaattgcggccggcagcactgacgtctgctaatcttctctgaaagggaaaaacaaaaatgactagattcaatatggatttggcttgccgtcaatggatttggactgttgcatcaggatggacacgacacagtgagaaacagattaccaaaaatagaaaggggaaactgtttaccacgtatgctcctccttatttttctttcgaagactgtttgtttagcaacaaagaaaataaaaatatcattaaaaaaaaaaaaaattagaggtggcatgcaatccaaactaacattttaactaacattttattttaataagatccaattaaattagtaagggtgttataaatttttgtaaatcgctaatccgataggtagtctaaatgaaatggaataaataaataaaaaatacaactgaataatcttaataaaaaattatgaggagtgctaccgtcaatcttctattataactttttaattaatttttatattcaaaaatatatactagaatatttttttttcaaatttattttatagctatagttataacaccatcatgtatattttttaaaaaaattcaaatagtttacagtgctggaaataggtttaaaattttttgaacatgtatagtaaattggaatatcagaaattatagtattgtaaactattcaaaaaaattcaaaaatttacaaagatgatagtgtaactataacgaatattactataaaaaaataaaaaaaaaatattatggcttgtgatttcgagcgtagatattgactaagaggttgtaatatgatattataattaacactcctcaaaaactaaactacccaatcaatatattgtgtatttttccactcgcccaatacattcatcaatcatcaatcaatatatataaaggagagatatgag

SEQ ID NO: 35258 - DNA, 1595 bp, Cannabis sativa
tatatatatatatatatatatatatatttaaataaaaaagtacagccaaaactttacatgtataccgcgctatcataccaataaatatatggacagattagtacgggagggtgtctttcacaatacaaaccatacttctaggaagttggcaaacggagtatgtttctctgctccaccgagaaagacagaatgtgatttgctctattcttcatttgtaaggtgggcatagagcatttgaagaacgacactcgtcggaactcgtagtgtccaatccttcgaacgccataagcaataaagtacttcttggcgtacccaccaacttttaacatgactgcactattagtatcacccaaccattggtgactgatctgactgaagtagaagtacccaattctattctgtttcggagcagacttcaaataaaaaaatatccgatctcatagggagtaggttgaggccaacctagctcccatataagacaaacttgatgctttttggggtgatttatgtcggacacatctcagagttgcaacaatatctcggaagtatggatgaagtggcaataccgccccatgctcaatatgacactctgacaaggccaaccaacctaggggaagccggtgtgcccggtaatctctacagggtatctcacaacggacactcctcactaagccactagcaagtatcttgctaaaagcctcgtcaaaaagggtaaaagcaggagagacccaactgtctccctatgatctcgcttccagtatcttaggctcaaaagactactccaagacatgatctaggcctcaccttgaaggttcaccaagcctgttcaacgaatcgccattggcatcgtaacgacccaagggacagttggggaggacagtacaagtcatgtacctcctcttccctaacatgtgcaacctcctcaagatcagactcagcatcaggactttcagccccctggtcaatctctggatcaacatcaacatgggactgagaagcctcctccacgatcctgactctaccctttgtagccaccctggcgggtcatatggaggcgctctacgacaagtctactttgttctggccataattacaaaacaaataagggatctacgcgcagctgtcacctcccctatccaacacccaatgccacctgcatagaagagataaggggaggtgagcaacctgaaaaagctacaaacatattctagtcaacagtacctaagggtaccttctaggtaaatcataatgtacaaggtcaattaccgaccaagtacagtttaagtacacttactaagacacatagtaagtcctaagttatacaattgactataatggactcattatcgagccttatacagagttcccaaaaggaaccacacataagactacagttgtatatgcctctaaggccgtcacgagaccctagtcgaggtcaatagagggaaagaaactggctacccccttggagccttagctttggctggccagggttccaagccttagtggccggccagaccccatgacctagtctagaggccacccaagaacccatgtttcaagcataggctgcccaacctttggagtacataccc

SEQ ID NO: 35259 - DNA, 1286 bp, Cannabis sativa
  modified_base (64)..(66): a, c, t, g, unknown or other
  modified_base (223)..(223): a, c, t, g, unknown or other
  modified_base (998)..(1002): a, c, t, g, unknown or other
atcggtagtattcttaaattaagatttataacatataaaacttgattgtactaataatgttgtnnnaccacactatcgtcgtcaagctaaagaatatgtgtcagtgaaatggtttgataataaaaattaagtcatatatgtttatattttttttaaaaaaaaaaacataaaataaataaataagtaaaagaatcaaataaggtgaatgatgtcatgtgatcantctcttaatttatcacccttcacttttatcactcttccccttttttttagtagagttttaaatgaaatctttatttttagagaggttgtggctacattggcctataagattagcccaaaaaaataaaaaaaaataaaaacaaaaacaaaaaacaaaaaatccaacgttaatatgatgacaaagaagttgtggttttagagattttatattgggcataaaacatcaacccaaaaaaaaaaaaacaaaaaggctttatttatatcatatatatcttagtagtaaagtattatatattattattatatatacattatatcctataatcttctacctctacttcatgaacagcatcattatttttattttattttttgacctttgaaagctttaagatacaggtatgtctctcttattcaatctatttgttccatatatattttttcttttattaatttctttatctctttttttctaatgtcatgcttctatttatttcattattgcaggtaaataagaggtataaggcatgaattcaaatcttttttcctctgctagtatgaggtgcttgcttttttattatttgtatcaagattttaaatttagaatgattttaagtggtgacagtgattaattgtgaacacatttatgattctacagtttaacacattgttctatgttgtataaccctttgaaagttttgggttagggctgtgcatgggttgggttggtcgggttgaggctattttttagtgggtcaacccaatgagatcggccnnnnnaattctaacccattcatatcaagttttaattataatccaacccattattgattgggttgggttgggttgggttgggttacaacccttaattttttgcaattaaaatttcctaattaaaaaaaatttagttgaatgattaaataaatataaagttcaggcaaagtcataaaaattcaaacatcaaaaataaattattacagtcatccaaattcaaaataagtagtaaaattagtgaaatctaaaataattaccaacttaaaataaaatcgatgttcttctacgta

SEQ ID NO: 35260 - DNA, 1467 bp, Cannabis sativa
accaagaattgtcgttagataggcacttttaatatataaagatatatttttgttattgtagatccatttttctagaaattatattcttattttttttaaaacaataatgttcattgtaattatagtatgtattttttttttatctatttttgaaaatttaaaataatttatagtgttaaaaatagaatttaaaataaaaaattgtaaaaatattttttctttttatatgcatgtaagattttatattctatatcataaattatttaaaattttctaaaaatatgtcacacataattatatttttaaaatgtacaatggcatataaaaaaattggatataatttctgaaaatagcaaactttttgcacttacctaaagaaactcttaatattttagtatcattttttattaaaataaataaaaaatggtaggtttatttgaaacgttgtattaggtcgtattgtattgcattgaattatgtaccatattttatataatattatcttaaattttaatttatactaaaatattatatatttaagtatctataaaaattaataccacatatagttttatataaaaatattacataaaatataattaaatataatactatacaatacaatacggtgtaccaaacgaacctgtattgtataatccaacacagtccaaaaaagaatactcattaaatgaaaggaccatttgagtcaacaaaagatttatagaagtatttattttggataagacttaggagtttgatgaaaataagtgatgaaaacagagaaaattatttcaaagggatttgttttgaaatatgccatttttaagggagtaaatagtattcatataaaaagaatcacttaaaaataaaacaatcatcaatcttcatgtggggttggttggtacatggtactttgtgacaagagtatggacatttgtaaatataaatatatgcataattgaaaaagggtattttggacattttaaaaaagattaaaaaattaagttaatttccagaaaattaaaaatacacagagacacaccattggttataccgtagattaggtattttctgcccccattaaagacggcttctggattttttttttaagtaaaaaataaataaataatagacaggaagcttcgtgtgagtcagcacatgggtccaatcatgcacctaagctcctgatatgcacacgtggcaagtacggcgagtaactttgcagaagcgaaggcacaaagctatcgctttcagaagatactgatgtgggacccattcttcctattggaccatacagtcatttcaccatggtattgctgtctgagtgttgtacacgataattacccttctaaagaaacctacaaaaggagagaaccaactatgtaagagaaaagaaaaaactatgtaagaattggaattggtcgattctgaactaccagaccagttacttcttttgattgggaccca

SEQ ID NO: 35261 - DNA, 1228 bp, Cannabis sativa
acccattactggtcccttacaccacatggaacttacactgtcaactctggttatcacaaagcacacaacttaatctgccaacttgaatcgacaccttcggacaccatggcaactcataaatggtggaagatgatgtggactcaacctcttcccccccaaaattaaacactttctttggcgagtataccatgatattctcctaagctataatttgcacaaaagaaagtctctgtcctcaccaagatgcagtcgttgcaaccaccagtatagacccaagtacatgctcttttcagatgttcaactatccagcaagtatgaaaattaacaaatttttatacatttatatctaaccatacctccctaacttgtatggacttgcttcacttggctgctagcaccttcacaactagcaacttccaattttttgcttgtttgctttagaaactatggcattgcaggaacgagcatctgcaccactgctccattctctcgcctatcaaaataatacagtggactgaagactacttggctcattactagaacatcaataacccttataaagttgcggttcagaattcctcatagcagtcatcacaccatgggctaacgataccatcctatctatcacttgaagcttaccgtggatggacactgctcaagatgaacaaaatcataaaatgggattcggtatggttcttcacaacaaccgcaatgaaatgcttctgactttggcaacaacgtggtggggtatccattcacccttgataatggaagcccatgcactccagcacacacttaattggtgtagaaatcattccatttagccaaattgtattgaatcggactgtaaaatacttgttgattatatttataacattgttaatctccatttaaacaggtttgtaacagagattgaaagcttgttgtctttcctcctaaagctactgccagctatattcctaaaggagcaaatgaagctgctcatcgtttagctaagtatgcattaagtctagatcaagaaggtttatgaaaaggatctaatttcttctctagtttatatcctgaactttgattagtggtgtttaatgaatacaggtgcttcttcaaaaaaaagaaaaaaaagaaacaatgaatgttgataaaaaaactatataaaataaaaaaagaaaaataaataaattaacaatatatatgtagttttattccttcccaaaaaaaaaaaaaaaaa

SEQ ID NO: 35262 - DNA, 1318 bp, Cannabis sativa
acataaaaataaataaatttaatagttatgtaacaattttaaaatagttagttttttaatttttatatctcagctaatataaaatttatgtacaaattacataaatagtacaaatagagtgtaaaatgtattaaaatatatactgaccatcttatatatgactatgcttatatataataactaatattgaatttaaaaatttattcttacttttgtacaataataaaatatgtattttgtaatttttaatttttaatttgtactacaattaagttgtcaaacttaaatttttgttataattatttataaaattaaaattaaacaaataaaaataataataataaaatgtaacaagaagaataaatcacctcacctagtattagtaatccataaaaatgtaaaagataataaacttaattattttttagatataccttaaaaatgaaaaatgtgaatttgtgatggtttaggtttaagcccatattctctttcactgagaacacttgattcgtacacgtgggccaacaggcccagtatgaacgaccattccaagacaaagttgtccaacggtccgatcttatcttatccctctcggtttttatctcgaacttcttaaaggaattcaatttcaatttttttcaaaaaaaataaaaaatattaatgaatttcaagtttttttttttaaaaaaaaaaatgttaaaaaatattagtggccctcaagattttctaatgtataatattgttatctaacacagtattaaattttatataatttaatataataaattttatagtaaatataattttaaattttatgttttgtaaaaattaataaatgattttctgttttgataaataataaattacactttttattttttagaataaaactaaatagtgctctaaactaatttttttgttgaaaataaaacttaataataatttgatctagatgtgttatgacaaaactgattacatttagtgtatctattcatatttttaagttacttatattaaagaaattgtttaaaattgagtgcaatgtcatatttataccattttaaaaaatacaaaatattttattattcataaatatataaacataacaaaaaaaaaattaaaaataccgtccatagaattttaaatatttttatggctttcaagattttatttttaaaaaatacaatttttttgtgttatattttattttttgttattttatattatttttatattactttcatttggttttttatatttttatagtagtgtaaaaatatgaaaaaaaaaaaaataaatgtaaaattgtaaatatttt

SEQ ID NO: 35263 - DNA, 1714 bp, Cannabis sativa
gctggaggtatttcgatccttaaattatagtgcatatatgtttgattaattccgcactttatacttaaacatatatatttcagtttatacatataaatgtctaacacgagacacatacctgcatcaaaatacacaggcccaaaaagaaaactcatttattcgccaaaataaatgtagtatgcaaagcaaccttggaatacataaggcgagacatccaccttgctattcacaagaaacttgacgaggcaaataatttgttaaacacttagcgtatttttcacattacaatagctaaggataacaacttagaaagatgtgattatctagtctgcaagcccttatggtcaaagagcagttcttaagttttctcagtacactggtactcatgccattgctggaaggcatatgtttgtccaaatcatcattaaccatctacaagttaagcgaaatgatattgtgtaaatcaacattaaccattgaaaggataagaataacaagtagttatgtagttattgattgttatccacacgtggactaaatgaaacgtgggtattaaccatgtttcattaaacagttattatttgaatttaaatgtaaataattgacaggctatattcctataaataggggcagatcccacaagaaaagaagagaagattccttttagggaaaatttgagatacgattagtaatatattgtattaaatactcagaaaatatcttgaataagatagactcgtggagtatgcagatttaactgcaaaaccacgtaaaaaaatctggtgttattattatactttttagactttatttatttcttattctttatgtgttaaatttattacaaaaaggctaattattggttaacgaaaatctgtgttaacagtttggtgctttcattgagagtctacgtgataaaactcagaaaaaatccctcttaacaaacaaaaaaaatctatggctgatcccaaccaaaacgatgaaagtcgtcctgatgagactacacatcattctgaaaaagaaccaatgggctctcagaggccacccacttttggaacaacacgttcaagaagaaatcatggtggttgttgattggatttttagtcaaccgacgaggagtcataataaatgagatttaaaccaaaatcacaataataaatgcagttaataacactggaatttgcaataaatgtaaataaggacaccagaatttaaagaggttcgaccccgaatgtcggtaataacctactccccttgagttttattgatctgagttgcaaaagtcaagaacaagctcttgattacaaagaatgagaagtgtttatttttctaaatgtttgagattgtggatccccctcccaggtcacgggtgaccccttatataggggagggggtcggtgcttctcgcttcaggagatgcgaccgacgtggaactatctcaaccgtctccttgattttcggaggcagttggagtctgatttttaggataatatctcgctattttcgtgggttgacaactgtctttgagccttttgtgggatttgaacatttgaaggagccattgatgacaaggctcccttatgggtgtaacatggtcgttaaccacctttgaggattaagcccatacttagagataatacccccgggactctcgttgaggggggtgacaaccatcctagttaggtgaccgccccaagacccaacttgagagggg

SEQ ID NO: 35264 - DNA, 1801 bp, Cannabis sativa
ccccttactttcccctacaggcaatagacagggaacattgaatgtaagtttgatgagctgggtcagttctagtatgtatactacgaggggctaaggacgacaaacggtctaaaatgctggtagcaccttggtttgtgtttttttaatagtaaagtaatctaagctcattgggatgttagcatttttttaaaaaaaaaatgcactcaactacttattttgtttttaatatgaatgatcattcgcctttttacatattaattgtaaaacccactgtgtatttctaaacagttttgaatcttttcaattaatgcatcaaaattagtattttgtaaaataaggcaaaatattcaagctttacatgtcatatatcttacattattgtagatttatataattataaaattgatcattagtaaaaaaaatagagaaaaaataccacatatatacttctttaatgcgagacaccttagtcttttagtttttattttgacttcattttgtcaacttacaactttttaagatttaattcattactattaattactgtatcgtttaattatctaatatttttttttattaagaagaatattcaaaatcaactaagcaaatacaccatcaaagctctctccaacaagctatagagccaacaacaacaacaaattaattacatcgaatcttgttgacaaataatctctcctgtctagacatttttctatttttttacaagatgtaatctagacaaaacaatgcttttcacctcagcaactatagacaaatcagatctagaacaattgtcaaaaatgcatctgttcctgttcaaccaaataccatagcacacagcagcaagaatggcaatttgaattcttcttatcagactagaattgttcaaagttagccaagctttccaatttatatacctgactggccaagtattattccccagccattcaaaggttcggtccacaactcttcgagagaaggcgcagctgaaaaagaggtggtcatgagattccaagtgatcttcacaaacaggataattccgtgactcaagagggatgtgaaacttgctcaagttgtcacgagtgagaaggtgagaattcacaatttgccaaagaataaactgatgctttggcaaactcaaagagctccatatggctttactataagggtccctgttctgaataagaagactactgtaaagagtggcagctttaaacttaccattcttaccagccctcataattacatcccttaaaaatttcaatctcagcctgcataactttttctagtaccagctagtgtcaggtttttggttgtaggaccagaaagattcatctttgaggtaaattaggttcacccatttaacccaaagaagatcttttttctccatgatagcccaaacatactttgaaatcaccgcatgattccacttagatccttctttgaaaccgatgctaccataagacttaggaagacaaaccttctctcaagaggtcatgtgcattttgctcctatcacctttacttccccaaagaaactccctgcataatttttccactttcttagtaacactttgagggaaaataaaaatgcttagtaattcttgaggtcaagtaagatattgttattattgttacattgatattttttagtattttaattttttttttctaaagtaacatcttaattagaatataatttacttattcttggatgaaagttctactttataattatataccattcagttaaaataccaaaaaaaaaaaaaaattgtgaaacatttctcgcatgcgcaaat

SEQ ID NO: 35265 - DNA, 1595 bp, Cannabis sativa
tcacaaccaaccattcgagtcagaatcttctcggacatggatgatagaagccaagaaacaagaacactgtcttgttgatcctagtcttcatattcaggactcaatcgattggcagtgcgatcggcttctgtgttgaatttcctaggagcttgagttggatccagaaagcgttgcagtcgagctccttcaatggctgcaaacacttgctgtttccatggcaaatagttatgctcatcaagtcgtactgagagagaatgagagaaaacagtcgatgtagttcttggaagaggtgtgttggttgagttggtgtttgctgtagcttgagaagaacctctagggccattaacgaacgccattgctgaaagaattcagctctgataccatgaagaaacttaaaaaacagaattgagagaaaagaaagaagaggaaagaaggagagaaagtgtttattcaattctgttacaatttacaacagatgccaatccaagtatttatacacaagcaaagcaaaacaatgtaacagaaagttagttggaaaaccaactaactaccaaaacagaatacaacttcaagtgacagctggacagtttagtataggttctctaacagttggtgtggatgttatatctcaagttgttgatttctttgagacttgctcttttcctgctgatttgaatcaaaccaacattgctctcattcctaagaaaaaacatgttaccactatgagtgatctaaggcctatctctttgtgcaatgtggcttacaaagttgtttctaaagtgctcgcgaatcgactcaagataggtttgccttgtgttatctctgaaaatcaatctgctttcatctcggggcgtcttattttcgataacattatgattgcttttgaggttatgcattacctcaaacgtaagcgtaaagggaaaacgggatttatggcactgaagctggatttaagcaaagcttatgatcgcattgaatggggtttcttgaaagctatgatgctccgtatgggtttccaccctcggtgggttgatcttatgatggaaacagtgatgcatgtggagtataaggtagtccatggtggtaggagtatggggcctattattccaagtcgcggtattagacaaggtgatccattgtcaccctacttattccttctttgtgctgaaggtttttcttctttgatcaagcagttcgaaagaaatggcgagttgaagggctataaagtagcaaatggagctccaactatctcacatatgctattcgctgatgatagctacatttactgtcgtgctactgagaaagaggctcaaaatgtccttagattgcttaatttgtttgaagctgcttcaggtcaaagggtaaactatgcaaaatcttctatcttttttagtgctaatactccgatggatttgcgagacagattgtgtaaccggttggggatggttgctgttgatgaaaatagtttctacttgggtcttccttgcactatgagtcgaaaaaagacagccattcttggctttctgaaggagaagatggagaagagaattctgagttgggagggtaagttcctttctaaagctggtcgtgaagtc

SEQ ID NO: 35266 - DNA, 1945 bp, Cannabis sativa
  modified_base (689)..(697): a, c, t, g, unknown or other
  modified_base (1880)..(1915): a, c, t, g, unknown or other
atcaattcatgcaaaaattccattccttaaaattcaagaaaactagagagggaagtgctagaagcttactttggcttggaatcaatgagaattgctagaaaacacagcaaattgatgagaaaacaaagaaccctagctggtcttatagggttcgaatgagagagcttagacagagagaatgtgcttcctttttcaattccttaattttgagtaaatgaaatgtaacccttattttattaaatatactttcagcctataaataactttaaaatctaaactaattaacttaataaactcacaacaagacaaaagactaatggggcaaaatgacaattttgcccctcccacactaaaaggcataaaaagacactaaagggtatttttgagaaattctaaaattccgactatttccgacattcccaatgtctaaactattgtcccgctactaaaagtactaagatgtgattttaatagccacacactgcattccaaagttgtcgggcacaaaatatgcaaaattatgaaatttctatatatgacataaaaatgcattctaaattcaaataaatcatcataaataattttcataataaagtcctaattatctgctaatttcgaaattaaagctaagcggtctttacaaatgagatctcagttatttaaactctatcaagccaagctcaaaggannnnnnnnnttcacttctaaatacttataaaagttatagattccatatctatgatcactgctaccactcaattgaactaccatgttccaagaagtaaatatccgcctgaaccattagttagcttccacgaataactttaagaacataaatgaatatatctttatattcattatatcattaactatcatctgaaataaaaaaaaattattagtaaaattattttttttctagggaagatactcaatttatatatgcaaccatacaaataataacatataaagttaaaattttatcaatcatttgtatatatatacatataatatttattatttaggagaaaaaacacaattagaattcaggttgaataattaaaatgtatatgttattttttataacatacctttatttgttatttaaaatgagtcactattcttttaagtagactgctcttcaatttattcttgtaaaacttctatcactaagtataatacatgttatattttttttatcttaatgataaacatatatttatacaaatagtcgaaaaaaaatattttatttgtaaaaatagtaattggtgtaacaaataaaaaatacaaaatgaagaagagaatgataaatactaaattatctattttgaaagccttttaaccttttagttttcatttattttattttatttaaaaaaaattctgaagaagtgatgtggtgtgtcttgtaaactaaattagtattattaaattataaatgccttaaaagagaatagaaaacaagtagatcttttattaaaaataataataataataaataagagtaaattgtatataatactaatagtgtactcgcataaaaggaaattgtattaaaaaaatgaaaagaaaactaacatttattgactttgtcaaaggatccctgtacaccaaaaaaattatatggcataaatttaagtgaaatgcatatctcttaccaacaaaaaaaaaaatgcataccatttatataaatcctagggggtcatggcttctatacaatataatatacctccgaccctggtgatcaggatagcggtcaaagtgagtataagaaatagtgaccttatcctgagtgttcaagatgtaaaaaggcaccatttgggctaatgtagaaccagatcttgtaattgtggggtagtgggttgtaacaccctaactatctnnnnnnnnnnnnnnnnnnnnnnnnnnnnnnnnnnnnctcgttgctaatcaacgagggttatggaaa

SEQ ID NO: 35267 - DNA, 1336 bp, Cannabis sativa
  modified_base (27)..(29): a, c, t, g, unknown or other
taattaattttacgaaattgtttattnnnagttttaataaacatattttattatttaatgattaaaatgtatggtttcgtgtaatgaaattttaaaatgtataagtttttaaaatatatttttttttgcatatttttcgtaattatgttgtttttgttgtacatttatgaaaaaaaccccttaataaaatatatttaaagcaataaataatattctataaatgtaaagtatgaatagtaaattttaaagaaactttaaaatgaagaaaccaaatatgttggcttctatgagaatttttttatttaattactattatatcttaacctaggttgcttgttgtccttggattcattaagacatgcttataaacaaatttccaaaagagactttaaaaatttctaaagaagttcatattaaaattgaacaatacccataaaaaaaaataaagttctaaacaaattctgatttatgatttgagttgagttgaagtgaagttcaaatataaattacactcatattactaataacaaagtatattaataataaaaactaacaatgaaacaacatatattctaatcatcaagatcaacaacgtaaagctcctgtaaaaaaaaaataaaaaaaataaataaataaagaaaagttttaataataaaaattaataatttatttgataaattataaaaactaaactaattaccattgttggatcaacatcaacatcttcattatttattgttgctataaaaaaataaaacaaaatcaataataattatgaaacaaatacatatacatacatataacacttaaagagaaccaatatttgatctattaggaaaatcaggatgtcataattgtagatcatgttcctaatcatcaatatattagattcttaaaatagaagttgtaacaatcattttctccgtgaaactttaacaagtgaatcaaagaaactaataacatgaacatgagttcatgattactcaagaattactcaagattttactcaagatttaggtcgatctacgattgagatctacgattgatcatctttatgatataaataggtctttgtagtaaacgacatgtttgataaagacaacttaattacatatcggtccatgtcatctataatatctattatatacaacacattcacttagatgtcatactacatcaacaatttgaatcaagattacttgcaccaactaatgggcatcagtgaatcgtacttggaaccgttgattaaagatttcataactttaatatattgctgattattttattcatggctaagtgatcttaattctccgtactatacaagtcacaacctcat

SEQ ID NO: 35268 - DNA, 1186 bp, Cannabis sativa
aaaatgaaaagaagaagctgatttcatttgcatgattagatttagcataaaaatactctactgtacttcgatgcatagtaacaatttagaaagtgacaactgaatatagtgctatactcattgacgtatgcaggttctccaacagaagacacaagatcatcgattgagaattcgtattctcaggccaatgaaactgaggctgaaaataacattaatttgataatatacccatatgagagattaaaagtggtttctagtgatccagtaccaggcatagacgtgactaaaagagaggtatttctcttttgtactcaagtaatggggagagagcctcaatatatatataaatatatattttcattttaactattaacttgtttacattcttttactctctcaataatctattctaccactgactaaaattaatttgctgcttcttgtggatttaggcatatctatcagatgaagaatttgtagccaaatttggaatgacaaaaggaaacttttacaagcttcccaaatggaaacaaaacaagctaaagatgtcccttaatctattctagaataagatatattgggatcaaaaccaaatgtatacattttaatgctgtgggaagattttttattttttatttttaatttctggttgtgagctgtggtgacatcgttttctgtaaggtggacactctttctataatggtgcattggaagtcatgaaacaagataatgaaattagatatttttccctcttttctttcaaattattgcttgcaaaggatgagataatgtgtccatatcaaacttaaatggattaaaggacactccgtttagcttttttttggtggtatctgatcaaaaagtcatataagaaaaccaattggttattatcactattctttgcgctttatgcccgccagtgccggctgagtaacaatagtagtttgaaaattatattctttgaaataaattttgtcccatttagatatttagtttattcgtattgaataaattttattagtttaagttcaaataaatcaacccaagtttataatacattaaaatgcatccacaaaattccttgcctatgttagataatgcttagctgtcactggtagttacatgtttctgttatgtttgttattctgttggttcagttgtacattctgttactcttgttttctct

SEQ ID NO: 35269 - DNA, 1558 bp, Cannabis sativa
aaaaaaggagcacatatattagtataacaagagttttcaatcatatataatcaatagtaatgtatttatatcaatatctctcttgtttaaatgatgatataaagaaaagatcaagaaatttatgtatcataaaaggctagaatgaaaaaaaaaaaaaatatcatgaatttggtggggttatatacatatcaagattattagaataaattttcaaaatacttaaatgatgagatgattatatttctttcacttgtattaaaaaaatattatattatatttgtattatattaaattagattatatattatatttttatataatattgtaaaattttaatttatactaaaatattatattttaatatgtctataaattaataccacatataattttatattaaaatattatataaaatataatttaatataatattatatgatataatatgatattatattattaatactgtgacactcttgaattttatttatctcatatttattaatattttttcaattgatgcatagagtctctaagaatatatgaaaagaaaataaaataaagggattattgcttattatttcttgggaaatcaatggaatagataaaaaaaaaatagcaactatatatgttgatcggatttcaagtaataatcacacttatattgagaaaagggtgtagattccaatcattaagttgtcaataaaagagtgattgttcttagaaaaccccccaaaaacaatatgcatttgtttaatcaagcttaattaatttctagtaatcctactaattaagcatgttgccccacacttgtatacataatgaaaaatcataactaaaataaatctgtagtggatgaacagtattaattgacaattaagtcattaacttctggatttttgtactttataatttaactaatctatatacctttcaggggagaaaaaaagtcacttttaactttcccatcaagagattagattctaaaaaagaaagagatttttcacttactttaaatttgcatgctagaacttttaattcattttccaatatatatggcaacatgtgatgaaaaagtataagtaaatggggtcttctaaagaattttacatatcttttatttaaaatttacttttgcctccattaactatcacactttcaaaaaaaaaaacattatcaaagaagagcattgcaaggattttaaggtatccaattatataattgatgaaattttataaggaatagcaattttttctattatttattagattattaattaattatttttttaaaaaaatattaggcattgttgctttacagtggctacaacaccatataaatttaacaattttaatatttctttctttcacctcactcaaccacgacctatacctgacaagcaacctccaagaccacccttattaaacttgctattgtagaaatactaaataaggtatagtaatatttagcattagcgtaatactatatcactattgatggaattcaatattatcaggctaactatttataaaaatcaattttacagtggtaactaccc

SEQ ID NO: 35270 - DNA, 2947 bp, Cannabis sativa
ctcgtaaaataatttccaacatttaagtcccaggataaagaaggagaaatgaagacccggaatctaatgatcgcggatcgtggaagtgttctgcccattaccaatttttgaaactaatcctttgtgcagcaactctttcccccagcaaatgcttcgccagacgaacgaaggtgagtgccctatcgaactatcaagaaagtatgagtgatgaaaatacctaccagacaagatttttgacaccgttgtgtttggctatttcgggatgcgccaggcttgcttagcgagtaaggcttggttgaagtggaccatcgaacgaaatcctaagccaccttccttttttgagcgacagagttttttccagctttgccagtgagttttaggacggttgttatcattaacgccccactagaaattagccataacagattcgagagaatgacaagtggccatcggaagacgaaaacacgacatcgagtaagtggggatggcctggataacagatttaagcagagtttccttgcccccttttgagaagactttattcttccaattatggaggtgaccccagaccttgtcatgcaggtaatggaacaattgcttttttgttcgcccaatgtcctgaggaagtcccagatatttttcgaaggaagaccgcaccgggatacccataaaatcagagattaaagtttgatccccgagctcaacatttggggagaaatacaatgaagatttttggaaatttaccttctgtctcgtggccctctcataggcctcaagcacgtctttgatgatattacaggaactgatggtggcttgacagaagaagaaactgtcatccgcaaataggaggtgagagatagcacgggctcttctagaaactttaaagcctaaaagagctctccttctttcttgctggtgcaagagggaggaaaatccttccgcacacagcaggaagaggtagggagaaagggggtcaccctggcgaatgcccctggaaggattgatgctgcctaagactttgccattcagattgaattggaaggatgcggtggagatacaggcataaatcagatggacaaacctggggggaattggaatttcctgaggattgcaactatgtaaggccattccactcgattaaaggctttagccatgtcaagcttgatcgccatccatccctttttcccacgcgtcttaagtttgatggagtgcgcaacttcctgggctataatgatattgtcagaaatgagtcggcccgggaggaaagcactttggttcggtgagattagagaattcaaaacaagtttcagcctattggcgatagtcttagaaatgattttatatatgatgttagagatactgatagggcgaaattcagaaatgaacttaggttgcttgactttgggaatgagagtgatgagggtgttattcagaggggccacatttgcgtttccattgaggaagctggaagccgcttcgagcacgtctctcctaacagcatgccagtttgctttgtagaaatgagagtcgaagccatccgggcaaggggctttgtccagaggaagctggaaaaacgctttctcaatttcatccaaggaaaaatcctcgcttaagagggatttgtcagtgtcagagagcgagcagctgatgccctccaaggctatattcatgtcagaatcggtggggttggaggaggtgtagagctggttgaaatgagactcaatttctcgaataattatttcctcgtcagagaccattcctccatttggcgtatggagttggtgaattttgttggtttttttcctttgggaggaaaaacgatggaagaacttcgtgtttttatccccttgagccaaccattgggtacgagcgcactgtttccagtaagcttcttccttgtagaggaaagcatcaagccaggattggagatcttttatagttgctatagtacggtcgtcccaaataagggtggaccgggccgattcaagctctttctccagcttactgatttactttttgaaattgaattttttttgtgattccaattgtttagcttttgagcgagcgcacgaggaaggattgggtagcgatgagattagggatagcttcctctgcggtcgaggggttattccaagactggtcgaagattctaccccagttagggtcctgtaaccacacattctcaaaatgaaaccgcttactatggtcccttgaccgattccccgaaattgtggatgtgactaattccaaggctctgtggtcagaccccaaaaaacacaagtgggtaagagtggcatcggggaaaagatttacccaaggactgttaatgatcccccagtccaaccgctcttgaatattttttggatgggccgcattgttgttccaggtgagtaagggccccacggggtcaatcggggaaagattaaaggagtccaataactgtctgaaatccgaagaagggcccctgtcagggttacccccttgtttatcatgggagaagaggaaagcattaaaatcccgaatgagaagccaagggtcacggggattatcccggcctatccttttcaggatttgccaagtgtgaggcttgagagagtcaacgggagagccgtaaaaacaagtaagatggaacgaaacattagtggaggcacacgacacatagcaatcaaaatgactaatagattgagaacataaattgacgtttacatcattagtccataacaaaagtaagcccccgcttctaccaaccctaggcatttctaagcccgaatcaaaatggagcttggctttcacataattaatagcattttttacaagtcgagattccataagaaataaaatagtaggactactagtagacactaaacgggagagattccggaatgcacgatcactcccaattccatgtgcattccagctcactatcttcatggcggcaggcaggcct

SEQ ID NO: 35271 - DNA, 1597 bp, Cannabis sativa
ataaaccaagaattcaattatataggcacactttatatagaatagattctatacacaataatatataaagcaataagattcaaaatatgcaataaattattctagcacatatggtaagtgacatgagttcaatccttgtaaccttcattcaatgattttatatcacttaattttttttctattttttttttttttgaagagttttatctccactttatcattcttaatagggttgttcatccaatcaatttcgcactaagtacaaattttatatttttggattcaatgtataaaaaatattattgatgtcttatcacacgtcttattttattgtatacaacaattacaatttttttaaaaaaaaaaatccataagaattgtcccataataacaagtttaattatactattttgttttttaaaaagaaaaacaaaatttactagtacttattttctaatagccccaaaaaatattttcttcaccatttgctccccactttgcattttctccctcctgtcagtcactgcgtggaagccgagtgcacgtgagacctaggtgattacaagactaatggtagagcgtatgtgattgtgagtgaagaatgttattaaaaatttgtcgaagtgctttgtatttctttatattataaatactggttgaaattgttggaaatttataggtgcatagaaaaccaatatatcaaaatacaactcaaaataaaaaaatacaaaaacaataatattgataaaataatgttacaactctagacaaaatatacacattaatatagaaaagaagatgaagagaagattataaaaacacaatataaatagactatatatatatatatatatatatgagaagaatctcaacaccaccaatactaagtgtcaagtaggggaatcataaaatttgaacaaggttttacacttttgttcaaaaacttatttttccctaccacaaacacttaaggaagaaagaaatggaaataactttctagaattattaagcttatagttactatcaaggtgctctctttgataaaactcacaaaattattttttcacaagtgaactaagaacttctatttatagtgttttaagatcacatattttgaaattcaaataacctacacccaagggtttttatcatttcttaatagggtgtaaatgggattaaatgagttatttggaggttataggagttgttaaaagccatccctatagtaaaaaacgttcaacaattaaagctgaaaaaaaagtaactagttactagttaccaatttttttaacttttgcaaacaactctctaaaccattcccactttattttatatcacttatacactttataaatgacaaaattcaatccccaacaactatatttgaattatagttttaaatttcaaaaaattaagttgtgtaaccactctttacacacttaattagtgatcatgtggaagttataaaatatgagtaactgcacctcttatgttacaatttatgtaaatattagatgtatgtaactctcaatcacattatatacattaatctcatattaatatataatatgtctcattttaatattttaatctatct

SEQ ID NO: 35272 - DNA, 2159 bp, Cannabis sativa
cgaggctttagttgccttctccggtaccgacgcgacgacatcagcaacagcttcggaagtcatgattgatttaactcagcgagtcaactcggaaacttagagttagagagatgttttttgtagaggaagagttaaggagcatgatttatatataataaaaaggtgagctgtgattggttgaaattaatgtgacacggtttagctatataccgtgagtttaaatgtgggcctttggatcttttgcttatcgacggtccataagggtatcttgtgggaaggtgcggataacggtttgaactttgaagtaatgttagaagtggggatgagcttttgggtgtgtttttaacttgatttctaatcggtataacatgagattgtgtttaaatttttttatgggggtttggatatgttttagattaggacgtaagctttctattgaatatttttttgggatatttggttgaggggattgggaggaatttgatgtcaatggtagggggatcttaactagggtttgatgtgagtttattgagtgttttgttcattttaagataatcatttatgggaaaacctcccattctcaatactttcttgagaagaaaatgaagtgaacaaataaaacaaaaagacatacataatgtgagaaaattatgactaaatttatagaatcataacaattaaactttaaatgatcaaacaattagtaattacaaaattatcaaaccaagaacaacagtcgatagtaaaatatgggcaaatagagtactaaattagaaaacaataaatgcagaaaataaatagatcaacaccaagatatatactgattcaactttgatagatcgatgtgatatatggctttactccagttcttaaacaccaccgtaatctttctttattgattgagtaagaataggtacaatacaatcgagatgagattttctgttgagttctcacaaagtatttcaattctcacactaacacccaagaatcttcttcatctataaaagattcttcttataaaacccaatttcaatctctctcttttctctacacctctctatctacctctcatctctctgagttctgaatcccttccatttttcaaatgacaaagttaaggtggtatttataggcttaggatcaagttcttaaagttggctgcaagaaatgaggttgttaagttagttagaaataactaacttaaccaactcctctttgagtggagtctcctcatcagcttaagtaatagagcctctgggaacatatatgagttcccgaactcgcggactaaggacactcgcagaagacggttccggataagatatggcccactggagttaactatctggatctaccattctaagaggggtaactagccagctggaacttctttctaggcgagggcgctatcttaaaaactggacccggagtggacatgatagtcatccgaaaactcccatctggactcaactatcattctacaagactcctctggggatggacaaattagatgtctaggagcaaggtccgagagatacctaactgtctagggatgactttccaggaatgatattggaggcattttcatttggaggaattataccacaaacttcacctaattacttcaaattaaaagaatgacgatgatgaagaaagaatgcatccattattggttggtgttcctggaatcttagtatactagcttctgagattgatcaagttcaagcaatgcttgaacttatttaaagttaagaccttagtcccaacatcaacaagattatcttcgatactgaccttctctaaatcaaccaaccattcttgtatcgtcttgaggatccagtagagtcttatatatatgtgtttactctttcatgataaattggattcatacaaaggtggatggaagacttgctatctgaatacacaatcactcttcatttgatttgttttaactcataaagtattcctcgaaatgcttccttaaaagcttctgtactcgccataaattttgcttttgtggtggaaagagcaaccacgaattgtaactaagccttccagcacatacagttctagtttgtgaagaaaacataggaagtagttgattttctcgtatctttatttgaggcatagttgttatgatatttttagcctattgttta

SEQ ID NO: 35273 - DNA, 2468 bp, Cannabis sativa
  modified_base (2273)..(2275): a, c, t, g, unknown or other
ttgagtgagttatggctgttttactgaagacagttcatgacccagtgcccaagttgacatcccagcgcccaagttgacatatggcgttatcttggacgttgggtatgtgaaaaaacatccaagggacgtactttaagatgcctaagtgatattttgacaccacttagtctttttctgtgttctggcaaagttggtcaccagttctcaaaaatgttgttttgtgaaaatgggagacttgaaactcttcattttcaagtgagtttcccatgttggaaatgataaatgtgaagttgtgaatttgacttctctaacttcctggatcttagttattgtgaaaaattagacggacagtcgaaatggaatcagaattagataagtagaacccagtgcaccgaaccatttgtcaacctgggcgttgggtaccctatttctgagctcctgggttgtcgttttgatacttccaaggttcttgaacttaaggacgaggtctcctaccccatttttgatcattctgaattcaacggttgaatcatatttggcatttgaatgatcaaaactagctcactagattgattgtcaacttgggcgctgggccctatttctaggggctcgggtttgtggttttctccccgagtttgcttgaatcttcattattttttatgacaaaaaaaaaaaaaatacctagaatacctttttgaaaacttgattggaattgtcaacctaggtattaggcccagtgccaagtgtcagcctgggcgctaggtcccacttatgacccttgagaagttttgtttggtccttgaaaatagttgaatcttaatcttttatgaaaatagagaagatattcgaaatagttctttgaaaacatcatcggaattggcccaagttgacaaaatatcaacctgggcgctgggccttacttttggcacttaggaagtgttgtttctacctcgaaagtacctatttccccatttttgatgaagacaaagaagatgcacaagttagatcgtcgatctgatacttagaagacccccaaatacacaaattgtcaacctaggcgttaggtgacggggcactgggtgcttcgggtgttcaaaaatgaacttgctctgaatatgattctgatgcctcaaatatgttcatggtatgtctagttgatgtctcaatgtaaagtttgacccatttgcactaagacagtcccaaaaattgaaatcctagttcagaatgtcaacttaggtgtcgagtgaaaccctaggtgcctaggttgtcttttggggtgcaggttcatgtaattttagctcctagggcttagatttgattactccaagtattcatggtacataatactgaaagatagtgagatagattcgagttattgaagtccaaacttccatgggcgtagggctagggtcccctcctaggtcgactgctatgacttatgtctacttaactttgtgatgtcatccttctttccacgtgtcaaaccttgatgtccacatcatccgggaaagtttttaggttaacaacatgcgattactattggagtttattttaccaagatcttatctactaatcatgtatattgattataacaatataatctccaatcatcgaataaggggagtctctttgctattgcgattcaatattgcatcacaggaaccaactctatcatgattcaaaatcgcaccatcaggacctaaaccttctgcaaaaaatgtccagatgaatcgagcccgttaaagcccttgtacaacatcgcgattaagaatcgttgttcctccagagcctattaccaccttctgcaactaacttcaatgtaccatgaatcgaagggagctcattgtgcactgccagcttcacagacgttgtcgactgcccacccatcccacggctgactatcgtgacttttaaatactcaaattattatcattactatcatcaatttccaaactaaacaatttgtacttacgtgtcgtgcttgtacctgtcgggcccatattgtgtcataaggctcgacccgtatttaccacttttcttttttgaaagagatttagagcactagttacaaattagttatgtgattatagtgagagttgtttccaattccattatttccggattcgcattttcttgtctcttctcttctcttctcgtcttctccttttcctttttcgggcgagtcttgtctttgcagcaccaaaccaaagcaaccaaccacaacccttccttcttctttctattactactactactctctctctctctctctnnntctctctctctctctctctgtgttattcattctcaattccaaacccttcacccctaaattcccacttcatctatcactaaggtatttttcttattatttttttaatcgatgcatttatatatgtatatatacgcgtttattaatcgatgtatatacacacaacacatatttgtctgcgaataaaattttgctg

SEQ ID NO: 35274 - DNA, 2617 bp, Cannabis sativa
gtggactgtgtagaattttaactgaaaaactacgttaaaagctttgtgttatattttcttcttttactttctattatttctgtgcaaaacttatcatgaaaataggcttgttatcattaacaaaaatctgcgttaatagtttggtgcttttattgagagcctacgtgaaaaacgctcagaaaaaaaccctcctaaccaaaagaaaaatctttctcaatgggtgataacggggaaaattatgatactcatccttaaaaggctactcaccatcctggaaaagacgcaatgggctcacagaggcctcctgattcacggacaacactatctacatggtccacaggttcaagaaggaccctatatgaaggtggccaaaacccagattcagggaatgaagcacccaacacaggtgttggtggtgcttaacccatcgatgatagtgcctatgatcccacgagatacgtaccggttgctaagttgaaaaatcatcatctaaggcgccgcgtggatgagacgaactgacaaaatgctgagttggagcgggaggcagccgcagccagggcggcacaggaaaacaacacacaaaaccaacctagtcctagagtgaggagaccacgaggcagacctcgcgactcatgaaccaggagccaggagacggctcaagaggaccctcagaacgctgaacattaacaacctggggaaattgaggttccccctgaaaatgaacaaccaaatgatcaaccagaaccttctcatagaaatgagaacagaacgcaacctaggactagggaacaagaaatccctcgtgagaacgagggaaatcttgggactcaacttaggacatgcatcaacttctttcttcaaccaatagggaaggggcacgtacaaaccccagaagggggcatgaaacaacccgtacccaagggagaagtccggtatgtgacgaggcgagtgccagctcaggacgcacaagaacccgtagtcgatcaacgtgaggaggggacgaaactcgtcgcagtactgattgagagagtacatgcacaagtagaatgaggtccatcagtaggacgaggtccgtgagtaactatgaccagcaacaactggatcttcgtaatcacttgaaccagaaaaaacttgaccttcgccaataacacaatcaaaggcaagaggttccgatcaaattgtgaattaatgagttggaggaaaaattcaagaggtctcaagatagataatatggaaaacagtctggatacgactcaaacgaagagcttgagccttttgcatccagacataatgaatactcaattcccccatggattaaagaaccctcacgtatcatcatactatgagactaaagatctagtctcacacttgaataatcttaatactatcatgcgagccagcaatgtaacgaataatctacgttgtattttattccctaccttgctagttgggacagcaagcagctggttcaacaaagttacccatcattcaattacctcttgggaacagttgtctaaggacttcaagaaacaattccaagcagcaacggataagcgacccaaggtgacctccctcactaacatatagcagcagcaaggtgagatgctgtaggcctacttaagtcattttagcacagctactgcgagggttagaaacttggacgatagtacttagctaactgctcttcaggcagggatcacgactgatattgctactgctggaggcaagctacgggatgacctgctggttgcccagtgaaaaacattagcgagttcagtgaaagagctcaagtgtttgttcgaaaagaggaagcaagaaaagagatgaagttgttaaagagtagctcgggaagtaaacccagcactgtctagacaagcacgtctcgactatggctgacaatccaggggcctctatttctaataggaaggataactctaaggacttagccaaggacaagaaaaagcaaaagaagcacaacaaattcgtgccaaaatacaccatttataccgagcttaatgaaactcgggaaaacatctatcagaacatgagcacagggtcgcatttcgtaaacttgagcccgtgaggcatgcgagatatatcagagatgcaaccaaattttttaagtatgacaaggacattgggcatacgatagaggaatatcgtcggctgaaagacaagatagagagtctcatcacgaaaggtcacttccggcaatatgtgaaaagacaaggcaatggacaaaaccagccaaatccgcccaataacccgagcaaccaaggattacaacctcctcctcttgaaggagaggatattctatttatcttaggagggcctcatattgttcgggaaagtaacaatgcccaaaagagatatgtaaaggaagttaagaacgagcagtctgctttagctctagaaccttccaaaaaagctaaaaactaaattttctctctaggttgatgagaccccttccttcttcttattctaattcgaaataccatagtctatcttcacaaaccaaaaattcaaccattagtgattgagtgcatgcccacacataaccaagtgagtcctcaatcataatatgtaagactgggaagaatccaaacaataagaagga

SEQ ID NO: 35275 - DNA, 4918 bp, Cannabis sativa
gatcccacctagctaaatttcatatttagcattagcaatacattttgtttgttggaacatataaaatctccatataataataattcaaaacaaaacaaaataaaataaaataaaaaacagaaaaagtatatataatgggttttggattcctttgtgattggagtcacttttccctctcaccgacgcatcgttcactttgttaagacaaaatataaatacagaaagaaagggcctttgatgagagaccttccaaaagaattccattgaattaattgaagaaatgtatacattcaaagacaaagtaacagagaagctttctcgttttcttcctcattccacaagctcacccatctcttcccctcctcctcaatctcaagatcgccaggtatcaatttttgagctttaatggattagcttaacaatgttcattccacactgtatttttgagatctgactcttttagtaatctctcaatctctcttttgtttttttaaaattgggttttgcttttttctttaattacaataataaagatgtgatttttattgttaatttgttgcattttattttaatgagaactcaatttgattctaaaagctattaaaactcatgggtttttcaaaattgagagttattgatctgttcttaagcttaaattcagagctgtatgagtccatggttttattcaatagggttgttgtggtctcttagaggagaatattttaacttgtgtatagtaacatgttcaagttttagtgcaattatgatttgggtatgaataatatgtctctattaacccctgcactatttgaaaagcagctgaattttgatctcaaaatgaatattcatgtctttcagcttaagtttcaagttttttgatgtggggtactgtattgtattgtattgtattgtaaatgtgtaggccaaacagtctcctaaagtgggaaaatcattttcttcatacatttccaacattattccttcagtaggctttaatggatcaggatcagacaagcatcaacatgaattcaagctaattccatccttacctgttagatacaataaccgaaactttaaacaccgtgatgagccattgggtagtgatgtatcatgtaatgcagcaaatgacagaaagggaattcaaaatgatcatgaaaaagacgaaatcatcgacagcattggtaaggtgtccgagggtagcagcacaagtagttccgaagcatttgaagaagcaatggatgagcacagtacccagaagccttcaccttatctcatggatgactctgtttttatttctgcagacttgtatgaattcttgttttcatcaatcccgaacattgttaaggggtgtcaatgggtgttgctttacaggtaaatctcctaagatattacatgactgctgctaaagtagctttattcttttgtattttgggcatttggctcttattcagtatttgatatatttaaaatgaagggcagtacgttgaaacatggcatatcacttcgtacacttatccgcaaaagtgctgaacttcctggtccttgtttgctggtatggatactcttgagttgagttgattcataagattatatcatcaagaaatttgagataatgtagggcagctatttgtgttctagattgtaggagataagcaaggggcaattttcggtggccttctagattgcccgttaagacctactgcaaagagaaaatatcaagtaagttgatcctactactttatggatatgaactccatgtatatgttttcaccatctcctcacaattctgaaaaaaatatgtatctctttctatgttttcagtttgagaataagtttttctttctctattgttattagggaacgaaccaaacatttgtttttacaactatatatggtgaaccgagactgttcagaccaaccggtaagcacttctattttatgtatactctatttaacatgatttccctataaaattcacaagttagcattatttcttgctcatcaaaaaggttactgctggagtatgtatttgataacaagatctgaacagctcattttaaccagaactgaattcttgtgcatctgttgttcgaattttaaaattcaaatccaactatttgtttcattcttcgtagttgtctagggtggtttgttgtttgttaagatactaatctattcaggttcctttgcgaaattaaccttattaaatttatatttagtaaagccactcattttcaaactcttaatagtgttttcgaaccacaatccaataccatttcaaattataaaaaaaatatatttttttgaaacaattttaggaatgagcatgtaggggctcaaggatattcaagatttatatgtgtatgtgtgaattcagtgaacagtttagatttctgaagatcagtatttataaatgagcattgttattgggcatcagtggtgcccaacactttctataggtggcggcttatgattgattagcgttatttcctaaaagttattttcttaagttatatgagattcgatatttaattacaccaaaaaaagtgctagattgtagtggtgccttttagaaattctctatgtaaatacttgtaaattttttaacagtctgatttgttgaaataggagccaacagatattattacatatgcctagacaacttgcttgcacttggaggtggtggtaactttgcattgtatttggatggagacctgtaagttgctttatgaaattactcattctgataaaattaaactacttaaaaaaagaacttcatttttctcatcatggttttaaacattggtttgaataggttaaatggaaccagtggaccatgtgaaacatttggaaacatgtgtttggctcataaccaagagtttgagttaaagaatgttgaggtacttcacatgtttgttacacttacaccataatatttattagtccataaaacacattggcttaaaatttggtcatataattctctaatgatttttcttaacctttgcagctatggggtttcacgcatgcgtcgcaataccttcgttgacaagactctgagatcactctgttcatctccatttttctaattttatgattaattctttattccttttctttcacccttttttaccatttagatgctggagggatttggtattactctatgggtgaatgaattgttgttatatatagttttgttgtagctaattgtatttattgttacatgttattcttatttatatccttagaaacaagttgttagtcttacttttctccttgaaaaaatgtattcaaattctcaaatcacatatcttaaggcattctactacatatatagttttgttgcagctaattttattggtgttattttagtttaaattctggcattctattcttttaaagcttgagatttaccattttctataaaacttcatgctgtaaattgctctaatattactcataaaagatggcaaaatataaaattaattgtaataatgagtaattgagtgccatttcactaatgttttcaactgatgacctgattgtatgaggctaaagtgggttgatcaataataataaacaatttcataaaaattacatgcgagtagagttctcaatcaataatcataactccattttttaccattcataaactgcagtatatttcaagagaaaaaaatcacatgataaagaacaaaatagtacaagagaaagagagatgatgtgcctaagttctaaccactggctattaagaatgtcacaactcagatgagaagaagatgaagttgccgcataatgctcaaatgtaggaattgcctccagctctcttccagttcataatttcggaactgggagcatacacggccacatccaactaatcatcagtattcaggcccaacaaaaatgaatcagcaagtagaggtacaacagtaatttttctagctagattgactttatgttggtttaagactccattgcttcggtatcccctggtaggccaaaaatccggaggtttcggtccattgatccaactgcaaggtactttgcatccgggccaaattttacacacgttgctttacctagaatgaagaattagtgtgagaaaacttaatttaaatccagttctgtaccattgatggttataatgtatgcatacatacctgtgccagacaaatcagggaaagttttgatacaattccattccgatttaacatttgcaacctggtaaactctgcagaagtacaatcctaatcgttagtcctttgtttattttcatcaaatttctttcgaggtagaagactgatatagtagtaccacctcaaaattgaattacattaagctctacttattctggggtggtgagtggtgccatctcatcagcataaaaatatagcaaaatacaaatatagttttcgaagcacaccttatatcagcacccgcaagtgcaaggtaacttccactatggtcgaattcaactgcaacaagaacatcacacatcatacaaaagttggcctagaataatctatgtgcatgtgtcacaaccagatcgtcaacatcattcattaaataaatacatgtatgccaatgtacataccagagcttgttggcgtctctgaaccataaggagcaaatgtcctgaagttcctcaatttacgtaaatcccagagcttcacaccgtcacttgctgcagtctgtccatttcagacccaacatcaaaacatggtacatctaatagacaattcaactgcattttgctttttttttttaaacaaaagcacataccgcaaggaagtaaccattttcagagaaagatatagcagttactgctccaacatgtccatcaaatctggcaacgtttgtctataaacaaataaagtacaccaagtcagatcattaagagagagagagagagaga

SEQ ID NO: 35276 - DNA, 1094 bp, Cannabis sativa
acacttggtctaataaaaccatttctgaacgtttagattggatagtagtgtcagattcttggagtgatttttatcctaaccatagtctttagcatcttggtttttatggatctgatcaccgtgttcttaagctaagtttagctcccaccaatactaattgtatcactcataggactaggcgttttcggtttgagaacaattggctggaggacccctccttttatgatgtggttaaaaatgtatggaatagttctctggttccaagttctgttcaagggcataataactctcttataggttgttatgggaattttcttaagaagcaaggaaattgcatttcctctctaagaaattggaatagggataataatctcctttttaaaaccagaatccagcatcttactcacgaaattgatatgattcaggataagttgtttttaaatgatgaggatagggctcgtttagttagattgcaatctttgcttgatgctctactctataaagaggagatttattggaaacaaagggctagggttagatggcttaatgctggagataggaatactaagttttttcataagcatgcaacatctaggcgtaaaactaatcatattaaataccttaaaacttacactggtgaggttgttaattctttggaggggattatgggtttaattactgggtttttctctgatgtttttacctcctagggaagtgatattgaggctgctgcctctatttttgattgtttaggctctgggctttctgatcagagtgtagagagtctttctcagccttttgttgctgatgaggttaagagagctgtgtttcagctttctggggacaaggcgtagggttagatggtcttaatgcctttttttatcagaaaaattggtctgttttgggtaatgattttacagctactgttttggactgcctcaataagggggttgatttttctgaaatcaactctaccttaatcgttttaatcccaaaaaaggcacgtgctaatatgcttaaggattttaggcccattagtttgtgtactactttttataaagttatctcaaaaattttggccaatcgtttaaaac

SEQ ID NO: 35277 - DNA, 937 bp, Cannabis sativa
atttggaaaattagaaaaactgaatgtgcgggttgatttgaatagttaaaaaccgcaccacccacaccgcaaacaccctagctaaaagtggtaatcatgcgtcttttgtttggcaaagtttaatattggggaagaagataatattgaaagggtatcgatggagaataggtgatggcaattctgtttgggttttggaggacccatggcttcctcgtccaatcactttccaaatatatgacgagccacctatccctgatcatctttatgtcattgatttaaagaaagctaatggtgattgggatgaggttttcattagagttgtcttcaatccaaatgatgctaatttgatgctgaaaattctcacttcagagtagtaaatagaagaaaattatatggcattatagtaagaatggcaagtattcgatttgaagtggctatagaatggaaattgatttacaggtaaaggaaactcagtcgaatattcagcaagaggagttgtggtggaagaagatttggaagctgcagataccccttgaaattttaatattttgcatggaaaatggcccattcatggatccctacaaatacagctcttgcccataggaaagtacatatcgatccacaatgtactagatgtgcaactagtacttatgaaaatgtcttccattcgttatggaagttgtcgtgcaaatagggacgttcggcaaagcagtggcttctatggtctaattcagagactcggtaggaaagatgttcttgctttccttatgcgtgtttctcgggcttggctaagggagaagtttgaattatttctggttttgtcccaggatctatggtatgtccaaaatagtgtggctaacgggtgacacaaatcacctgttgcgaaaattgttggctggtgctactgttttctagcagagtacaaaggcagtaatac

SEQ ID NO: 35278 - DNA, 1828 bp, Cannabis sativa
cacaaaactgtcatcggcgaagaataggtgagatagcttaagaccttctcttccaaacttaacaccgtgtattttatccgctctttcagcctcttgtatgagacaagagaaaccttccaagcaaaggagaaacatatagggagagaggggatcgccttgacgaaggccacgttggggttgaatgagaccactaatttctccattcacaaggaccgagaatgagactgtagttatacagttcatgactttatccacccatcgcttgtcataacccaaacaaagcatcattgcttctaagaatctccaaccgactctatcgtaagctttggacatgtctagtttaagccatctttttcccatttccaaaacgaccttttttcaacaatgtagactttcaaaccccaggatggcattatcttgtatgagccggcctctaatgaatgcgctttggttctccgagattacttccttcaaactatctttcattctattggctatacatttcgcaacaattttgtagctgacgttgcaaagacttatagggcggtagtctgtcacttggtgaggacttttggtttttggaatgaggcaaaggagggtcttgttgatcgctcggcaatccgcatgattattaagaatatccaaacaaattctggttatgtctgaccctatgaccgtccaatgatgctcatagaataaccggggcatcccatatactcccggagccttcaacgggttgatttgcttcattgcttgaagaatatcagctgctgtgaattcagtaagaaggctttcattttgtcttctactaagccgtgagggaacaaatctttggaggtgagccattaagtcgcacttggggtcttgggctgaaaagaggtcttgaaaatgctcacaaatgatctgttctatctcttctttagaactcctccaattcagattttgatcaaaaagaccattaatctgatttttcttcctacgagaagacgccttttggtgaaagaatattgtgttcctgtctccatgagcaagccaaatctcccgactacgttgtttccaaaacagttcatcttttgcaaggtatccattcagttctttctccctttcttttaggctaataaatccttggtctgtgtgatcccaagacaaagtttctacttctttttttaactctttaatccgagattggctctctcttctttgctgtttattccattgccccaacacatctccacattgatccaacttgtttcctaactcagctgctgaagtaattaaatggccctcctcctaactttccttgatgattttgtggcattcttgcttgtcaccccaagcactttcgtaatgaaatctatggccccaaacttttttctgattgttgtctgtcggaatagctttgaaagtcaccacaagaggacaatgatcagaacaccaacggcttaagtgtttaacttttgcaactacataatgattccaccattgattattagctagtacacggtcaagcctctcaaaaaccatgttattctgccttccgttacaccaagtatagttgctgccttcaaaatctaattcccttaaagcacacatgtttatagcattattgaagtttttcattaaataaccaggtttctcaccccctccttgtttctcaatcatgtttctaatttcattgaagtccccaccacataaccaaggccccttgaatcttctttctatgcgttgcattaatgtccacgagtgttttcgctgtgatggatcgggatccccgtaaaatcccgtaaaccgccagttaaagtcatcttccatattgatccaagcatca

SEQ ID NO: 35279 - DNA, 1384 bp, Cannabis sativa
gttagactcactactaaattaacttcttttttgtgaggagaagtgtggaattattatagtgtgttaattttagtcattttttatgtattttttttatatattatttatttttcttaaaaaaataattcttttttatcattagttatttgttttattattattttgatatctcatttattaattttgaatacttttaaaattttgtttaaatatatcatttattaacttttttgtgctaaatctaatattatttctgcatcaggtattggtataaaaaaaaagttttatatattatgttaattatgaagtggaaaaaattaacattacttaattttaccatataagaatgagtattgttattaggtacctaatattatattgatgtagtaagttaggaagtggttagcaattttttataatatttattaaattaatatatgtggaatttaatattaaattacactaattgttgggtcctactcttctaccttgttaggctaccacctcaacttgactcaaacattcgtatgatattgtctgctttgagtctaagtcctcacagttttattttgggcaccttctcaaaatgcctttactaatggagtagtgtccatctttatatatccatgatctttctcattccttgccaatgtgggactttggttgcattcccaataatccttccttcaaacacaggatcacatacccgtggactacccttcagtgaaaccaccttgtcatcgttatcaacttatcactaatgaaactcgtcgcctgaccatcacctttgtcaggaagactttcgacataggtcttaacaccgatctctatcttgtaccgtcgtaaccatcaacgggacacgctgcttgaccaccacaatatcaagtagacttttgatacaagacatcatatagatcttcaatcgcgaggtcatcatattaagagcttctctcacacatcgcaaatgcaactcattatcctaatgctcgtgaacctttagctctgataccacttgttggacctcgctcttccaccttgttgggccactacctcagcttgactccaacattagtataatattgtccgctttgggcctaagccctcacgattttattttggccaccttcttaaaagatctcatattaatagaatagtgtccatccttatatagatattgattcttcttattcttaaagaatatggaactttaattgcattcttaacaccaataataatatgccatctggtggtgtgagtgcaattttttatttttttttaagcttttagagcaactccaaagagccctcaaatttgaggatgcagtggttaatcttctccaaggtagcaccattttgaggtaatttatgcagtctttgctacagtg

SEQ ID NO: 35280 - DNA, 1299 bp, Cannabis sativa
attgcactaatgttggtgattttagcatttactatatggtaagacttgtggtagtttttggaatttggtggaaccaattattattactattgttatcttttaccattagtataagtttttggaaatttttttaccataacaatatgtgaagtacattattaagaaaatgaaattaaccaattttacctttttgttgacactgtgttttacgccaattatgtccataccaaaaataataaaaatacttatacttatgtattttcccattgtagtgagatgaaggcattaattctggccttgaatataaatttggatcataaagtgtaagtacagtacaataatgagaaataagaattaattattttaccaattatgttgacacaatttctttcataacaattttaccatttctaaatcatgtaatttaaatctatgaagaaaaaatttaatgtatttttaaaatgcaatatattgaacatcaaggtttataacaattatatggatacctctaatatattaaaaataataaataatggtaccaatctattaaacattaaactccatatctaagtaaatcatgtaatttaaaagtatgaaaaaaaaacctgaagtatttttaaaatgcaatatagtgaaacatagcactattcactaagttaccatgactgtttgtgtattatattctcaaaattactgatatttatctttaaatcttataaattgaaactagtttatttagttcttaaataatgctttttggatcactatgtaataatgaaatcactttgaaagacaattaatgtacacccacatattaacagtaaaaatcaatcaccaaatattacttaagaatttttttagaactaagttaaatcctagctttgctttgacaacatagaaaaaaaaagataaaataaacatcataccacatatcatatctctaacgaaatgaaagttggcaaatgatgaaaaggcaaataaatataatgaataataattttttaataatgttttcatggcgcatcttctctttctctaaaatccttatttggttttgcaatccgggagtagtgttagtaggttttttcggatgagattgatcgatccaacaaaagtaatcacatcctcgactttcgttgttctcctaaagttaaaataactacattagcatatttacaaagcctagtttaaaatcttattaattgaatctaagcagttaaaagtcttacatagtgcggacatccaaagaagcgacgaccaagatttgctctactactagaagtccaaacataagctaga

SEQ ID NO: 35281 - DNA, 1323 bp, Cannabis sativa
tttttataggaaaatagtaattctcataaaccattttatttttaataataaattattttatttttaatataaataaaaagtcacccagaattttgttatatatgcacataattatttgcttaaaattattattttataaatatataagaatataattatttgcttaaaattattatggtagtaaaaaatatcattatgttttttttaaaaaaaaaaaaatatattgatattaagattattttattttgttataatataatgcaaattaataaattaatttttttttcaaacaaaatcttaatcagagagaaaagtgtgatagagaagagaaaaaaaaacaattaatttttttttttttttttgtatatttatgttttaaggttttgattgtgtttcttaattatattctattataaaataaatttgctcaaaaacgataagataggagagaaaagtgtaacagaaggaaaaaaaaaaccgaaggtgtaaaattaacaaaccatcattaattatagtccttttaattttcgatcctcaattaataattaaattaaaaaataaattatagtttatacatttctatgtataaaacacaataatacattagattgaccaaaatacaaattctatgcattatagaaatttaatatattaaataaagttatataaacaaccaaaactaaataaatggagaagaagaagatgcataatcaaatagttgaaatggaaaaaaaattattgacacaattgttgtaatataatcctatttaagattaagaggatgtatttcaaaaataatatgaagaacaataggtgtataattggaagactagtattatactgatgatgatattaacacataagttaattcaaccactgaaagttaaaacagatcacagccccagtctatacttggacgccgccaatcataaaattccaaatttcatataaaagaaaaagaaaaaacaatctcttaatgaaaaagtgttcttaacaataaaaagagaagtggttgcagctgatgataaacccgaaacagcatagcttggcctgctgcgtctcatcgaacgaggctttttagaccagtggaggatattgcttggcctgctgtcggacccttttcttgtactctgtagcatcctgaaaaaaccaagtaggttagcatcggtgaggttttaacttcaactaagtaaaccagtttcgcatcttaaaaaatgtgaacttgaacatcttccaactagaaacttagttaaaggttgtaaaagaaacttcttacagctcggattacacaaagagtgtacatggtatgacaatgatgatgat

SEQ ID NO: 35282 - DNA, 1482 bp, Cannabis sativa
tgatgaggaaattcagaggttaaaacaacaaaggtctcatgtagtacctttacctcatatgccaatcattttcaatccggtattaccagcagaccaagatatgcctggtaattaagtggaaccattgtatgggggaaatcggatgcaagagtcaccaactctttagggagattcagatgtgaaggatgctctttggactgcgagccctaaagaatttattctaaaacctcatgaggacatgacagaaggtcggtcactactccccctactttcaattatgggagaggtggtaggggttccttggttgagcagaagagggaacatgcattgaaatttgtgggttcaagacgaaacaagcagttttgaaggaaccaaggtagatgtgaacgtcacggttattcttatcatgagtgcccccgttgtaagaatcatcatattggagaatgcaagcagaaaacatgcttccagtgtggcatggttgtgcattttaaggaaaattgccctcaagcaaagaaagataagaagaagctagaagcaaagcctgtacctactcggatgtttgctatcacttaagctgatgctgcagccagtccttccgtggtgacaggtcagcttcttgttaacaactcctattttactgtgttatttgactctggggctacacattcatatgtggcaacacaagtaactaatcatttgggtaggcattgtgactttattgaaagagggtttggaatcatactgcttagcggggaattgactgtctccaaaaggcaaattaggtctgccagttagagtgaaatatagggaattgagtgttgacttagtagatcaggaattagtagaatttggtatcatacttgggatgaatttcttatccaagtattgggccaacattgattgtacgcgaaaaatggtaacttttcaaccggagggcaaagatatgtttgtttagtgttggatctattcaggggtttcaaatctcgattattttagttttaagggctagagatttactagacagtggatgtgtaggatttttagcagttgtaattgaatctagcagacctgaaacatttgggcatgaggtggtcagagttgtaaaagaatttctcaacgtatttctcgaggagttgctaggattgccaccacaacaggagatagactttatcattgatttgccacctagagccgagcctgtttaaaaagcgccatatagaatggctccaatagaactcaaggagctaaaaatactacttcaggggatgctcgatttagggtttattactcgacctagtgtgtcgccctggggagctccagttttatttgtgaaaaagaaggatggttccctccgaatgtgtattgataaataggaactaaacaagtaaacaattaagaatatgtatatgttgttgggatggatgatttgttcgattagcttcacagaaagtctataattttaaagattgacttgcgacctgg

SEQ ID NO: 35283 - DNA, 1598 bp, Cannabis sativa
ttttcatatatgaattatgatataataaaacaataagggtgatcctataataaattacatctaataatatttttatagtagacctaattacttaatattttcatatatgaattattatataataaaatagtttgggtgatcctataataattacatctagcaatatttttatagctatctcctagggcgaaaaatgagtcgaaaccaaagcaatcacgggtattgtgcaaaaaatttgtacttgtatttgtcgtgtgacattctaaaaaaatacaatcaaataaaggattagaataaaaattatttcttttccattgtatttattcatcttttatccttccctcatattctcttctccgaagaatatgttaggctatttttagcttattgttcggattgtttttaaagttaatttcttttttattcacattttagaatagagtaatgcttattttctttagtttcaggtttcgacaattataatgtataaattggtcaaatttcataaaatggtggtctagaaaataaagaaaattttgcaaaaaaataaaggtgaaacttcaagcctaaatttgactatgttatgttcagattttagaaaaagtcaaaacatagaagttttagatctcttttttatctttccaacacacatgaaatatgctcatttggagtttgtatgtgaaagttatgcatatttttttgagagaggtcaaagtagataatcttactatcactgccactaattgtcgctgcggtgaggctcttggtggccgcggcgagggactacaaaaactccgatttttcacttttctacaaccgtcgtggtgaggctattgtctgccacggcgccgactccgtacgggttaaggagaacttcatcttttctcaactttggactaaaaaattctattttaatgaaagggggttgcggattatagagatattcaaaaaatagacctagaaacaaagaggaggactttctagagcaagtgtggcgatccgagtgattcatccaccagtttctttcttctctcttttaaaatttttgttgatttctgtttttagtttaattgtggatttgatcatggagattatgaacatgaagtccttatttagggatatgatgaatgtcgattaattttattccatgagttaatgttaattgttattttttctttcttgattgtgtattaattcatatatgtgcttaattacatgtttgagattgataaccttaggcatgatttatgatctcaatacaaaatctaaaaaatgagtactgagaatgctaaaattgaataaacttaggttttaatctgaaacgagagtctttacatagcatctgtgatatttaaattattgtttaatgcaaattatatgttattttatctcagagatgcaatagataacatatagtttagtagtattaagtttcaattctatgtgggttcggcctcacctttgtgagtactacttgattacgtgcactagcgtataatttataatcttcgcaatagaataagcttgcgagatcttttgaatatgtatgaatgagcttaactatatcaaaaccatgtgttttacaaaacaatgcttaa

SEQ ID NO: 35284 - DNA, 2829 bp, Cannabis sativa
gactaaatttgtacaaattaagggagagtataaattttaatatggggtatattattaagggcatcaagtgaaattttcctttggaaaatgaatttgcaaaaatattcaaaccaaatgaacatcaaaaagcattagcacagttgctctttctatttgcttaaacagatactcatgattaaataacaacttcgagcattatttaggatagaaaataataataagtctggcaaaaaaattggtaataatagtacacactgcaaagacgtacatgtattttacatacccatttcctcaatactcactttactttaccacttatttgtatgcagtaatttttttttttttaaaaaaaaaaaaaaaactacagtaacattgcaccccaaggtcatttccaaagatcacttatgaaagaatagactaagatttgcgtttataagagtgaaaataagaataagaaaatatataaaatgaaataaaatttaaaatgaataataaaaattgataaaatattattaatttttttttctcatgaatcacctttactttcattttataaatagaatagtcattttactaaaatagtagaaaataatattctaattttttaaatacaaccaaacaaataaatagaatgaaacttaattctttccattccattcaatttcattaccaacagccaaaggcaacctaaaagtccataaacaatatttccattgacatgatattatagtatagtggaaattcattgaaacgatatgaagaagaaacgatagattctatttatactaattttgaacatattgtatcgacaagtgtatcgctttctatggcagaactcttacagttacatacatcaaaagccatgtgtaatcattcaaaccacaattaagtccaattcaacaagagatcttactaattaccagtcaggaggaacatcacttactgtactacaatgcaatgctacgaaataccatttcacatctttttcatttgcaccaaaaagtcttgaaggtcttccaatttcgaaccagtaaagcctgaatgaaagaaacaaaatgaaaatctgatcaactgaataaacttggaagaaggcttctaattagagcatcaactttctttaaagttaccactgcaatgatcaaatgtggatgcatctctactcagggtaaaaagcctctctgttttcttgcgttcagtttcttccattctgtttgtcttcagctttgccatttttgctttaagttcagatactgtttttgccatctctgcaggcaccaataacttaatttttagcatcacggcttatctgatcatataacattcaaatataagtatctgaagcctctcttgtaaacatgtgtaccataggaaatagagagcgcattggaaatcttaagagagcacatttgaaagatggaagtgattaccctgaaacagtccatcaaaagagttctcctcatagacatgcagtgcctcgttgataagcccagcaaaatgactactaggaacagattgctgttctaaagctctgagctctcggttcagtgcagcagattccttaccaaccttcaaagcaaaattcatttaaggagattaaactgaaaacaaacaaatgtcacagtatcatacaaacgatagtttttcgcagctagcaaaattatatgtaccagagaaagcttgttccttaaggaatccaaccgagcatccaaatctggattcgacagtgcatcttgacagattgaattattgctggttggttcaccctgacaagacaagttcaagcacggacatatatgtaatttaaaatttatgcataatatgcgtgtaaactaatttcccattagatattatgttgaacatataatctctaacaaaagatattgtattactgcagcaaggatataagcgttactgaagtacacaaagccgaaagaatttgggaaccaagttccacaccaagcaaaaggaactcttgaaagtgtgacactaaactctcctttggtattaagaatccaaagcacttgacatttttccacattaataacatacaattttgaaacaacgcattgtcttcttgagagctatttgaaaacatacagcacacttttcttttcgaaagactaaactactagaacactttttactgccaaggacaagtaccagaaggaggagcgacaacaaaaactacgattgtaaaattaaaacgtttagcagtgttaactcataccacttgaaaagccaaactatttctcaaaccacagtgctgaatcttttaaaacataaaaatatgaaacatagaagtatattcacccttttagcaaccaaaagagcagtcagaaaaaaaaaaataattaaaaaaaataagtgtgcatagttcaactattacaggagaaaatgtttctacttcaaaacagctcgtgattcagcgttgacgacatataagttttaacataacaagagagtaatttacttcaaatatgaaactgttaaactagttagtgaactgcaatcaatataatctaacataaataccaaatgctactaatatactaccttaagtggcaattacttgaaatatcaacaccatgaacagaaagaaccaaatataccaaagataagacatcttaagcagataaacaaatcaaatcatttgcataaaagaaacctacagttttcggtaaagaaaatccctcaggaacttcgaaacagtgattaagacagtactgctcccacatagcgagccgcttatccaaaaccgaaattatcattttgtgaatcacagcaacaccctgagaaaacgaattttatatatttttattattaaaaata

SEQ ID NO: 35285 - DNA, 2348 bp, Cannabis sativa
ctctatcgtatgcccaatgtccttatgatatttacataattgggttgaatctctcttctgtctcgcatgccccatgggctcaggtttacgaaacacgatcctatgctcatgtgtgagatagatgttttcccgagtttcattaagctcagtataaattgtgtagattggcacgtacttgtgatgcttcttttgctttttcttgtccttggctgactccttagagttatctttcctctttgaactagaggctcctgaattgtcagctttggtcgagacggtgcttgttgagatagtgctgagtttacctcccaagccagtctttaacaacttcatctcttttcttacttcatcttttcaaacaaacacttgagatctttcattgaactcagtgatgtttgtcactgggcgaccttgtaggtcatcccatagctcccctcttatagtggagagatcagttgtgatccctgcccggagagcaataagctgggtactatcttccagatttctcaccctcgcatcagctgtgctaaaataacttaagtaaaccttaagcatctcgcacgttgttgctttatgttagtgagtgagaacgcctcgggtttcctatccttggctacttggaactatttcttgaagtctttggacaactgttccaagaggtgattgaatgatgaataaatttgttaaactagctactcgctaatctaattagcgaagtgggaaactaaatacagcgtaaattgttcgtaacattgctgcctcgcatgatagtatcaaaattatttaaatgtgagaccggatctatggtcccatcatatgacgagatgtcaggattctttaatccctaggggaattccgtattcataatgtctggatggaaaggctcaagttcctcgtccaagtcatatccacactcctttcaatattccccaacttgatacctcctaaatttgtcctcgaactcattaattcgcagttggataggatcctcttgcttttgactgagatgttaacgaaggtcatgttttttctggttaaagtgattacaaagatccagttcttgctggttatagttattaacagacctcgtcctactcatggaagtaactttttgttctactcattcctatactttctcgatcagtattgcgacgagttccgtgtcctcctctcgttgatcgactattgcttcttgtgcctctcgagttgacactcgccttgtcatgccccgtccttctcccttgggtatgggttattgcatgccccctgttgggctttgtacatgccctttccctgttggttcgagaaggacgttagtgatgtctccgtggtaacccacctgtaccaggttgagtcccaagatttccctcgttctcacgagggatttcttgttccctggtcccgggttaccttctgttctcatttcggtgacaaggctccggttggtcatttggttgttcattctcaacgggaccctcagtttccccaggttgttcttcctgagcgttttgaggattctcctcagccgtctcctacctactagttgatgagccgcgaggcctaactcgtggtctcttcactctaggattaggtttgttttgtgtgttgctctcctgtgctgccctggccgaggctgcctcctgttccaactcagcatttcgtcaatttgcctcctccaagcggcgcgtgagatggaaattttataactcgacaactggcacaaatctcgtgggatcataggcaccatcattatcatagtccatgggttgagaaccaccaaaacttatgttgggttcttcattccctatttctaggttctgaccaccttcacgctaggtccttctggaacgtgtggactgtatattttggccatcctcacattgggtgcttcttgaacgcgtgaaccatgtacatcatgaattaagaggcctccgtgtgcccattggctcttttccaggatggtgagtagtctcttcaggatgtgtatcaacattttgtctgctatcatccatggagaaagattattttttataaggagggttttttcagagcttttttcacgtaggctctcaatgaaagcactaaattgttaacgcagattttcgttaacgataataaagcctattttgtgattgatttgcacagaaataatagtagtaaaagacgaaataacaaaaagctttttacgtgattttgccgttaaaattttacgtagtccagaagtctatcttattagatttctctaatacaaactagggttctttctctcaaggattttttgtcccctttttcagtgtattctgcccaatttatagttacttatcgaggcagttaattacaattagatt

SEQ ID NO: 35286 - DNA, 1280 bp, Cannabis sativa
agtcgacagactcagtaagaaaagcataatatttaacatacaaataacccgggttataacactactacaaattaccctttttatgtctctttttctagtccaacaaaaatagtgttggacatgaaaaacttttgaagagatttcaagtccaacaatgatggactagaaaaaaatatatatcatgtccattgatgttggactagaaaaaaagtaaggtatgttaaaaatatcactattataaaaaaaatccttttaatgtccttttttatgtctagtaaaattattattggacataaaaaagttttagggagttttctagtctagtattgttggactagaaaaaaaactcatatgtccaataatgtttgactctaaaataagtagtggacataataaatatatatatttttttatttttctttaaacttgtctattttcacgtccaacattgttagactagaaaattattgaggagagttatctaatccaacataatcagacataaacctaattatataaaattaaaataaaaatatatattattaaggatttacaaagataaactttactgccatatataattcttaattttttattttgaaataattccataaataaataaaacatattaattttttgttggaaaggaataaaacatattaactaaaagacctaaaatctctcccttgaaaaaagcctaaactttctctatacgttctctctctctctctttctgattaaatgaatatcattatttttgttaaagtctctctctctatacaatgcaagcagtagcgtttaatcttcatctttctttctctcgacggctgctgcagtccattcttactctggcaatgaacgattaaaatattcactaaggttcactcactttcttctaatattgatcagtcacagtcagagatctacgacccgctgccagagaatgagcgaatggaggtcctcccttcttcgtcgacgtgcggtacaagaggcaacgagtttgaggtcctcgatcttcgtcgacaatgtccatggcagatcaagatgaaatggtgtccatcacagttttcaaaatttaatttttagggtctaatctagtatagcatttctttttcttctcatatcggcattgcattttcctatccccagtgtccttgcaaaccccaagcccaaccccattcatgtcactggaaacgatgaagcccatccatctaagaacaacgaagccattgcagctgcctttttttgcgaaatcccctagccgagccgccacccaagcc

SEQ ID NO: 35287 - DNA, 1416 bp, Cannabis sativa
taactaataattttgtcctctaaattttcgacaatactgattatgccccttaaaatatacaatttataaagaattactcggaacttttacatttatagaaatttagtcattctattagctttcgtcctattattccgtttaaatggtggcgtgtctttgtaaataaacaactttgcccccaaaacattgacaactatcaaaacgtaccccctcaaaattaaataaagaaaaattaatttttttagtaaatcttaaaaaaaaaataatttaaatcttaagaaaattatttttcagtcaataagaaaattaaaaaaaaaaattaaatttttaaactaattaagcgattaaaaaattatttatttttattaaaaatcaatttacatataaaaaatatatattaaaatttcaatttttgtaaaaactaaattttaggggaataagtttgagtatattttttttcctagaaaatctagatttatttaaataaatttaacatttttttagtttgattttttgttcgaaaattcttagtttgattaaattatttattggatttttaataatttaatttagttttattttttaatatacatatttataaataataaaaagtttgaaaatacttttttaggaataattcacgttttttaagtaaacttaatatttttataagtttttttttaataatttattaattttttcagaattaataaaacatttaaatttttaaaattaatttttttaataaaaatgggacaaaattttgtattggtcaaagttcaatagtaaaaatattaacttttaacggtaaaaaaataatagctaacagaagaggcataattacgtaattattatattttagagagtatttttaacaagccgtttattttgagaggcaaaatcggatagtgttggaacttcggaaagtaagaatgctaattattctttaaaaatactattttatctcatttctaaccttaaattattattattaattcattatttttgaaaattaaaaacccttcaattaatttgataacattactaattggacattaatgttaaaaaattggacataccaaaaattgatgaacatgttcgtacacccactggagatatgatccgaaatgctgaaaaaaaaacatccacggcatattattatatatatatgataaattgaggtattcggtattcctaaatctaagaaaaattattttagtagggtatattaatatagtgatcttgggaagaaattaaagattatcatataatatatggtgttcttgccattaattgattattccttttcttctttcaacaaaaccaacatgcatatgcatcaagaatttagaataatgacattaaatcatttatataaaatatcattacaatactactacaaaacaagtctttaga

SEQ ID NO: 35288 - DNA, 2008 bp, Cannabis sativa
  modified_base (1623)..(1633): a, c, t, g, unknown or other
aatggccgaaaaaacttccctaccggtagggaacttaaactaagtcctaccatagtcttgccctataattctcatataatttaataattattatgaaatatatatccttttgcaaggtctacctcatggtggttcctagtaattgcaaggtctacctcacgacatctaataatttcgaatacaatccaagattgacttatcacaaaggtagttactttgttaaagtttaaatcaatcgcaataaagtaaataaaaaaggattttgttttatatatatttatatatttttattatatatatttatatatcatataatttatataattatttaaaaaatataaaattgaaactaatatttttttttattatggttgatttaagttttaaagtcaacttatatatatatatttatatatcatataatttatataattatttaaaaaaatataaagttgaaactaatatattttttttattatgattgatttaagctttgaattcaacttatatatatttatctaatcattaaaattaattaaaacataacaattaaatgtaaaaataaaaaaaaataaaaaaaataatattagtggtcggtttagacagattaacccgactaatttcattagatgagttattattttcttttttcttaattatgcgagttctacttaaatttttataacgatctttacaatgaattgaataaaatgtactataaacagatcaaattgatcgaagtacacccctaatcaaaattattgtaatagttaacaattcggaaagttactcactatggtctcacatgttactattgaaataattaaattttattaaatactatataaaatataaaaataatactataaagtagttttttttttttaaaaaaaaaaagaagataaagtaatgacacatgattgttgataaaattgttatgaaattgataaccatattgcatatgtggcaaaaataactctatgtgtaactctcatttagaatgctctaagacatcaattttaaggccatttctaataacggtaaaacctaacttttgtattaaattaacacaaaataattattattttaacactaatttttttttttcaattccaattacaacactaaaaattacactaaattttacattattttattaatataataagaatatttaatactaaaaaaatatattattttttttttcttaaaagtattatttaattattaaaatttaaaaagcaaaaaagatactgtagacaaaactatttataagtataattttagtgtcttattagagtaaatatagtgtcaaactacactatatttaacattttgaagtccggttagaaatgcgctaagtggtaatacttaacaacaatactctttgtattaactaatcatgtttgagcatgtacactctttcttcccaccggcctacttttacggcctaactagcctgagtggcttatgatcgagacaaatttatttacacaattgtaattttttttattttatttgaggggctttatggcaaaaattaaatacaggttattgtgtccactttgaatatctatctacactctatagcacgtggtgatccaataataataataataatannnnnnnnnnnaataataataataataatatgtggtagtacatgttttagctgtgatttgtaagttttagataatttgacacataatctattgatcacacaagctttatatagtatttaattatttgttactattatcacctataaataaaggtattattgatcgatcttaaaatttgggttgcatatattgattattattgtaataagtttattgttatttcttttgtcaattatcctaaagtaactaatagagtggctcatgatgcacttgtattgttttctcttttgatgaccattttatttggtggctaattttgattgtatactgaagttttttccactggtttggtactgaggttttaatgagaatttctctaaaaaaaa

SEQ ID NO: 35289 - DNA, 1332 bp, Cannabis sativa
  modified_base (36)..(37): a, c, t, g, unknown or other
  modified_base (401)..(406): a, c, t, g, unknown or other
cccttagtgtgattttttgtccaatattttattctnntttaatccatataattcaaccctaagctctagttgaaactctatataaggaacacgatgctctcactcatccacttgatgccttcaaccaaatcaaatatagttttttttatgttagacaactagtagatgagagagttccttctatagtgatttcacctccttcattatttttcaccatattcgaaactttgagtgatagagtgctatgtccacacatagcaagtcaagtactcaatcatagtgagtaagatggtggtaaccaaacccaaaggagagaaagagatccaagctcagatcttgataatactcggcgattagaaggaacaagggttagagatctgagcagaaggagtcatattatnnnnnngcaaccaatgtaaggttttctaagctcttatgtgtttaatttcattattttagagatattcatatataggatgttaattcaacatacttgttagtaaatctagatctggtaaaatattcctaacaaagactccctagattggaagaaagtttcatatggattcttctccaccaagagagcctatttggaaagtctaaggttagaggagaatcaaggtgagagtttttggaagctgatttggaatcataatagtctttttaggcttgtaactatgctttggagagttctagctaggtgtctccctactaaggataagctggatttcatttgtaacaaattctttttgttatgtggaggaggtttggaatccccttatcatcttttctaggactgttcgtttgcaagggctttgtggttctttggatcattttcaataggttgttctgatttgaggggaacatagttgagagagattctttaggttttggttgggggtctgcctaatgaatgtaaatggaggcttctcacctttggaggatgtctcttcaaaagtatttgggatacgagaaatgttatttttttaagaacaaaaaaattgatattttgaattctagattaatattgcaaaggtttgaggattaattttgtgtcagttcaacatcattctacagataggctagttgtagttaaaattgattcatacttgaatttgaagattccttcgacaacgtcaaccgtctgtgtaactgatgcttcttgaaaaaatggcaaggcaggcctagcggttggttggcctgaaagagtttccaacaccagctcttagtttgcaaagtcttgtatggccgacactacaaaaaactgctacttttagtgtcaattttttagtcacaaaatatattttttgttactaaatgtgacttttagtc

SEQ ID NO: 35290 - DNA, 2579 bp, Cannabis sativa
taggctaaaaatagcctaacagagtgtaaataaaatttaccattattaatagcaaaaactttatatttacaattatgcccttatatgttttttttatagagaaatttcactgttattataaatcaaagtcatttacaacaacagagaaaatatgatagggaatttctcctatccaactaatgtcatcatccaatcctaaagtaaatttagctaaaccatgtgctgcttgattagcagttcgtttcacatgggtaactaatacttgagggaaaaatgataaaagacaacaaacatccataataagatcagaaaagcaagataaatttgtagatgaaaaatttaaagcagaggagactcttgaggcatccgtttcaatatgagtaagagcaagttgtgactgcaatacctaattaagagcatgaaaaagtgcttttgcctctatttcatccgatctaaaacttccttgaataacttttgaaaacacagcaaccaccattccattgtgatctctaattattgcaccaattcccattttcttttgctccaaatttgtagctacatccatgtttaatttaaatccattcaactgtggtggctgccatttgtgaacatgctgaacagtgtttgatcttggcaaagtagctgcttgattgctgttgacagcatcagatggaggagggactttgacacgggtgaaatcttcgtgaaatatggttgtttactgaactatagcccgtggaacaccaccatgaacaacccagtttttatccgtccatatcccccacaacacacataaaatgagctcaaagtcttgctgctgatggatagtagataaatggtgcaaataatcaccattaaacatactttgagcctgacgaaaatcaagttgaaacttggaaaattttcatatggctttagcattcttacaaccaaagagggcatgacctatagattcccaacttgaagcacaaagggaacattcaccagagtttaacaccttcttcttgaacaaagcagctgctgtaggaagcacattttggaaaactttccaggcaaaaattctgatctttgggggcaaattcaggttccagaaaaattttcaccaatctctatgctgattagaagttgaggaacaatattgttcttcaaaagatgtggctaaatggaacccagatttaacaatataagagccatttgtagtgtgatgccatattaatcggtctgtatcaccaaaataactcagaggtatagacaatatgcgttcaatatcaattggctgaaagaacctattcagcagtgatacattccaaactcgttcctctgtaacgaaacttgaaaccgacattgaaggaggtccagagaaacttacaggtctaaactcattataacccggaatccatggatcatgcccactttcaatatgatttctgttttcgattctataccgcagtcctttaatcaacagttccttgtcccaacaaatgctttgccaagttaaggatggtgagtggccgatgttaacataaagaaaaaaattgtttgaaaaatacctatgcttgagcagtcgattcaataaaaaatcggtgcccttatgtgttttatatttatttatatattttatttttttatttcagattacgtagtttcaatatatgtttcaaattttttggcattattgaaatttcatgatatatatcaaatttcctttcatctgtttccaaatttgttaccaatatcaatatttttactctaatgaaaaaagataataatgggggcatacattttctcatgactttttaattttagaagctaatattgaaaatccaactaaaagggcaaatgatgtcaattgaccaaaactttaatttggttgacaattctgtgataattcgtacctaatattattatgtataccatcactaattatcgtaattacttttcttacaatataagattcataatactatgcagtggtcctcagtcaaaatcattttatggggcagttaatctgtctttaccacttaacaattagcaactaaaaattattttagcaactttcacaattatcagggtttatttttaatgtgatagaaaaataatactggcttctttagagattatagtttaccaaaacatgacccttacttacaaggtttgttgtaccttaagttgactcatctatgattgcacttattttatgtttgactacaatcacacgtttatctgactatctttcttgaaggtttttttcagtatgtaataatggtttattttgttattgcatacaattgagaatttgatatgaaataaaactgaaagaaaaataatcaaacaaaaataaactttggtctatggtcaaatacattattattactagccgttagtactaatttattgtgatttatgtatatataaaaaaattggctggaaaatgacaaccacctgggcggaggggtcactctgtttgtgtgctgagaataaataaggcaagaaagatgtgtacggacagccattgaaatcagaatagtaaatgaccaaaatatccttacttttacaacaagcaagccaatgccaatgcc

SEQ ID NO: 35291 - DNA, 2404 bp, Cannabis sativa
tgtgacaatatttttataaaaattacttaaaatttcagtatttttgtaaattttacttttattataatttttaaagaaataaattgatatataaaaagacacggtttttcaaaatacattgtagaattttcttatggtagatgagggatccacaacacaaggggttcacgtgtgagttgtctgggagaaattattggttggcaagtggcagccgccaacttgtccacgtggagccccatcacacggtcatatatccacgtcatttgtgcaatgcatgtaacaaataatgttttcattttagctttttagggttttaactattattcatccttcttttgtcgttttatattttaggttcatcaatatttcttcaattcaattcaactcttttaaagtctcatctttcttttgtcgttttacatattatgttcatcaaaaagtcttctctgttctttctttcattaattgtttgatttttcttttttcctttcggtttgttgtacgcagtcgtagtggtttatacttatactactacctgcaacttcttttagattgatcatgtttgccaaaggtcattttaaatcaaacacatattgttaaaagacaattgttaaaatatattattggtatttagaatttttgtgggtatcatattattgttaatataattaaacatattaatctcatataacttaaaaaaataattttaaaacaatattattaactaattataaaatattacttataaaaaaatattaaacgctactatactcttgttataaatataatttataatgtcagaattactcataactcatcatttcttgttttattaaagtacttaatattaacacggcgaagtaataaactagtaacaatgtgaacaacaataataaagtacaagtatggttcagactattaattttaacatattaggtttctcactagcaaattagaatatctcttccctatctaaaaagttctcatattggaagaatcttgaatatatactttgtctctaaaatatgctccatttaaagtttttttttggacagatcattattcaaaacatttaaattaatataacacttttcaatgactaataaataaatttaattataaatattaattttaaaaatattaaatcattaaattttagtccgataataaataataaaaaaaaaaaaattaaaaatctatacttaatttaactacttaattaaaaaaattaaaaaaattaaaaaaattcctcttttacactatatcaaaaatatatttatataaaaatatttaagtcaaactccattttttttattatttttttaccggaaaacttatttttattattatttttcagttgataaaacaatctcagcccatattatgtaaaaatgagaaaattttctaattaaataaaaaaattaatcataaaatctcaaaattttttaatactaccctatgggtaatacccattaagagtatactcgtatttatatataggtaatagataggatccaatccaatctaattgaaccgaactgatccaattcttttaaaattagatatttaattacaattaaattaaattgaatgttaaaagttagattttaatcgaattgaattggttattaaatgtcaatctcaagattttagtaaacagcgatccaatcaattacatttaatatatattaaaatattattatatttatttatatataaaataaaaattattaaaaatgttaaaagttagatttcttgttgtgttgaagttgtaatatttagttttgtgtatttattttataatttttattttattttattacttgacagttgttgttttagttattttaaatttttaattgcattaaacctacaagaataatatttttatgaagtattaaacttaaattaaaagtgatatttaatttttacgtaggttaatattaaaagttaaatatgtaattggatatctaaataaaaaaagcttttacttaccaacagggtcggccctaggcataggcgggctaggcccacgcttagggcccactcatttttggggcccaaataaaaaaaaatatcttttataaaatatacatattttttaataatttttaacaatactatttatttttatagtaaaggcctaattttttttttttttgcctataacccatttcaattcaaggccgaccctgcttaccaatgcttacatattcataaaacaaacaaacatagttgcgttaatttatagccttattggagctcagacagtcagactcatcatgtcagctagatatattcactataaaaaactactacttttagtgacaattttttagtcataatataaattttttgtgactaaatgtgatttttagtcataacaaaaatttacttgtgacta

SEQ ID NO: 35292 - DNA, 1227 bp, Cannabis sativa
  modified_base (70)..(71): a, c, t, g, unknown or other
tttgggctcgaattgtctcaaaccttggttgacgtctcaaaggattttcagggaattcaataccccggtnntcaatgtaaggcctaatttttagcctcataaaacgattttgcgcctccttattgacaaaccgggttctattgaaacccgtagttggtgggtttgatgacgaaccctcctcaacatgcctagttctcttaggtgtcatttttttttctttcttcctagcaataataaaatatttttttttctttcttttttttcggatttttttttcttcttttttttctgatttgttttttcaaaataatgctaagaaaaattgggcagcacctccccttaattttctacttcctaaaaatttacaatcacttaaaacctatacaaataatatctccaataactcaacaccacaacacaataccaacaaacccaataacaataatttttttcacaacacgcactattattacccaaaaaaaatctataaaaagtaaatcaaattccttaaaattgtaggaagtgatacttacaaacccaaagaagcttttactccacctccattgttgaatgtccttgaaagcttgaggttgaagatgaagacaatggtattttcagatttgggataatatgagtgatttttgggatggtttttgatggtatgtgtagattgatgagtgaaattgggtttttgaatggattgggtttgagaaattgaagaaaagatgagaaaattgaagattggttatgataatttgaatttttggaagagagaatggcttgggtggctgaggagaatttgaaaaagtttgaatttggtttagggttgaatgagggggaaaataggatatttatagaaaacttgttagctagtcgcgacttgccctaaagctagtcacgactagcttaaagtcgaattttaggcaagtcgcgactactggaacatagaaatttcatgggttctgttaaacccctaagtcgcgaccagggtcgcgacccaagaacctggtggtcgcgaccactgggatcccagtcccgaaaaataatttttttttcacgtttttcacgattcaactaaaaaaatttaatgtctggtactcaactaaaaatttaaaatactaaaattactaaaatataaactaaaaacataaccagaaagtctgaaaaattaaagaaaacacttgggttgcctcccaagagcgctgtctttatcgtcatatagccgga

SEQ ID NO: 35293 - DNA, 3726 bp, Cannabis sativa
tttaggaccgtcgcgaattctgatatttgtagtagtgacgtgttctccgattttaactgttgtgtaattacattgttatctatatgtaatttataataaatttaattacccattaattttttttcttcttatatataaatagaagattagatttttaaaattaaactcaatttttaacagaaaaagttagagaaaatactcgcgaagtgcttaatgttagtttatcacttttcttagtgaatttttttatgagattctaagttcccttattattaaggcacacactgaaacctagtgtatttaatttatttctatttaaattctcagtatatgcttataatttttgtttcttaaaatagtttattcatctttaatatgacatattttcgatagttaaaaatgattaatgcttggttctatattttatttaaaataatattttttgactttttgtatttaaattaaattatttcacatttaatgtttagaagttataattttaatgtgagggaaaaactattttttgttaaaaaattattagtttgattactaattaaagtatgagaatcaatataaatataaatatttttatacttaagtggattctgaagccttaaaaattctctaaaatatctttcaacggtaaaatgattttattttattttgttaccaaaaatctcaccattttcagaactaggttagagttttaatatcttatattaaataagtatttttttttaatctctcgcaattttcatggttcgacctcgttcttcatgatgtttacactataataaagattcgtgcacttacgagttaattaatgcaaaacgtaccgttttggtcacaacaccttttaaaagaaagataaattatgaaaattaaaaaaaaaaaaaacataccccataaaatgaagagaaagagttccatggacctacaaaaaggggaaaaaagagttagtataaaaagaaataaacaaagaaaaaaaagggtttgcaaacgaaatagaaggagatatggttggttagtactccgttcatagagaagtaggtagagagattaatatatggacataaagagatcaatggatgattagagagtgagcacaactcgatttgccaatgagagtttatagggttgaaacttatttcacagggtttacagatttgaaactgaattttacgggttttgtaaaagggttacttcactttatgatgttattatatatttttgagtttaagtttcttttattattttatttttaggtttaaaactgttttcacacttatattttatttttagattattattgtgttattttgattatatttgtggttttttatattcttgggtgtatgtgtttttttttttctcccatttagttgactgatgaaaccaatttcagttatgtttattgttgttgtacgacgaaattagttttttttttgtcttcatgatagttattgttgttgtatgatgaaattgatttcaatttattttttgtatttttgttcaaatggaatctgattcctccagtatgaatgcatggaagatgttcctaaaattcaagtgctgattgtgaaaaaaattcttccagttaaagttaaaattcataagaaggttattcacaaggaaaaaaaatctcatgcaagttctaaggatttatctttggtatgattttttttgtgaagtatattaatttgttttaatttatcttcttatagttttatatatttatttgtagtttttgaaactagttttttaagtgtcttatgtctattcaatttcttagtttgctgtattatataattagttttcgtgtctaattgttggtttgttgtttgcgtaattgaggtttaagtttcatttttattttgttattttaagaaaccgatttcactgtgttagatttttaattagttgataaatgtaattggtttctgtgagttagattccaatgcctaactctagtgacgactccaatgtcaaactccagcaacaacgacaactctgacaattttttcgataatgcaattgtcgacgatttttcagcactggcaacaactccgacaacttttcggacaccaatagtaactccggtgacttttcaatatacctatgtatagtaattttaattaagtattatttaataatttttctagcttgttgtggttgtctactaaccttatctcagttaaaaggtaggcacgtgaatgtttctgttacttgtctcgtatgtaatgaaagggctgaatcaattcttcacattttggttgattgccaattaacaaaggcatgttggcagaaggttgatgaggctttatgaattttctcagcatctaatttcttaagttagtttcatcaagttttgggaagtttttctaagtcaatagtgtgtcatgttgccatgatttgttagttcctttggcgggctcataatgggctggtggggcatagtaaaagctctgttgcaaatggcgtggtgggtgtaacgttgttttactttaattaatagaaggattctcatgaacggtcaactaacactttagcttctatcgcttgtgttagtgtagggcattggtcgactccgagtgttgatacgattaaagtcaatgtacgtagatgcctctgttatttctggagtgaaattttttgggattcgatggcttactcatgaccatcatagtattgtgttatttccattcttcgaagtagatgcttggccgagttcagctcgttgtggctgaggcaattggcttcaaggaagctaagttggatcaaacaacaaggattctcacgtgttgtggactatgaaaataagaattatgaaaattaattaatctaatatatgaagccaattttttgttttgccattcatactttgcttggttagtttaatcatgttgacaaatgaatgtctatccatctaaaaaatttggttgggaccaaattgaatgatgtgaatttgaagatgagaattagttgctttgttgactgttgttgaaaatcatacaggtgaaaaagaagtggattttcgttaaggaattaaacaattaattaatggcattagaagttcataacatatgaaacaaacttcacctttaatgagtactactcataaatatgtgagttagtaaagtttgtttgtttgtttgtataagcaattttattgaagattgtatttgtctttgatttttcctctctattagaatcctttgataatgtttgttgttgagtagaaatgagggttcaatttagagttgtagtttacacaatatcatactgattcattcgtagtgttttttttttagaaagggattcattcattcaaagtttgttaaataagatttataattaaggtgtaattaattatttttttctcaacaaatcccaaagtgatttaagtacgtcagcatatgacatgatgactctaaccatatataacagaaataaatttctcttattcttgcaatgaatttagcatggaaaactcagaatattctcaatacatttccaaattaacgcgctaatgagtttcaggacaaacactttaagtacaacattctatatcttgatcatcgttataaggattatttggaagatttacaaaagttgatgacaatttggagttaagaaaccaaaaaagagaagaagaaaagtcaaagagagtttgattgagtggatgcaaagcttgatctatctaaaaaaagactacttttgaggcaa

SEQ ID NO: 35294 - DNA, 2550 bp, Cannabis sativa
  modified_base (113)..(136): a, c, t, g, unknown or other
atagtttaattttagaattaaaatagattaactaaaattaattaactgagtcttacaagcagtttgtctcaactagtattggaccatgagcctatataactgagcttccaatnnnnnnnnnnnnnnnnnnnnnnnnaaattctctaacttattaattcacagaatccacccctctatgatgacccatgcacgcaacactaatgcaaacatccaacctgttcaataaatgaggcaactgctaaacaaggagcgctcccaagcgctaaaagatgaggtcaaaaggttgagagccaatgacttcataacaaaggcattgtgtacccacattgggtatccaacctgctattggtgcctaaacccaacaagaaatggagagtatgcatcgatttcaccatcttgaacaaagcatgtcaaaaagactactttccactccccaaaattgactagcttgtagatgccacagttggccatgaaatcctgtgtttcatggacacgtatttaagttacaacccaataaagatgcaccccccagatcaggagcacactagcttcatgacggacctaggcctatactactaccaagtcatgccctttggctaatgtaggggccacatatcaaagactggtgaacattatgttcacagatctcatcgggtgtaacatggaggtgtatgtggatggcatgcttatcaagttcaaaaaggctgggggcacgtggaggacctatgcaagtgcttcaaaatcctttgcatctacaacatgaagatcaaccccctcaaatgctcttttgttgtaagctcaggaaaattccttagcttcatagtcaacgctaggggaatagaagcaaacccagacaagatccaagcccttttggacatgaagtcacccataattgtcaaggaagtacaagcataacaagatgaattgctgtattaagtagatttgtgtccaagtctacaaacaaatgtgtacccttcctcaacattctccaaaggtaaacaaaaaaaatttgagtagacagaggaatgtaaaaatgcattctaagagctgaagaaacaattggctcaaacaccagtgttgtctaaacccctacataatgaggagctaggagtgttcctaacagtcacaaaacatgctatgagtgctttcctcacaagagaagaagatagtgtacaacaccttgtataatacatcggcaaaaggctaatcggcaccaaaagtcagtaccgactcatggagaagctgacctacaacttgctcttggcttctaggaagctaaggccctacttccaggcacaccccataaaggtgtacactaatcaacaattgtggtaggttttgcagaaacttgaagcatcaggccgactactcaaatgggccattacgcttggccagttcgagatcacataccaaccaagaaacaaccataaagggtcaagcccttgtatagtttgtggctgagtggaccaactcaactctttagatccctcaagactcaggagaaaagtaaaacccagagaagaagcaagagcaagatcatcaacaaaatcccaaagaactaacatggaaactctatgttgacggaacctgcacagaccaattgtcttgtgcaggcattgcccttacaacacccagggtagcaactgcatggagcaatcaaattcagcttcaaagcctcaaacaatgaggctgaacacgaagccttaatatctggcgtcaagctggcacataaagtacatgctgactatcttgacatatttagcaattctcaactagttgtgaatcaagtcctaggtgaatatatggcttgtgacgaaaaagttgtggcctacttaagcaaaatcaaagacttgctaagtcagctcaaaggctaaacaattaggcagatccatagagagcaaaatgccacaatagatgcacttgcccgtctggcaagcagcaccattactaacaaagcacacttggtgcccatacagttcttagaggaacctagcattattatcgcagaagaagttgacatgttggatgacacctattgcagcttacttccaaactagagccttgccagaagacaaaaatgaagcaaacaaactgagaagaaaagttgctaggtacctaatcctagatgggataatgtgtagacaaagtttttaaattcctctcttaaggtatgtgaccaaagccgaagctgaatggttaatgatagaagtgcatgaaggctgctgcggcaatcatgctgggggcaaagcctatcaaagaagatacttcgacatgggtacttttaaccaacaatgattgaagactcaatggactatgtcagaaaatgtgttaagtgccagagacttttgaaaataccaagagttccacccaacaaatcatgatgatgtagtctccttagcccttcgcagtgtgggggtagacctaattggtcaactcgtaaagggaaaaggaggggtatagtttgctgtcatcgtagtagactacttcaccaaatggacggaagctgaacccctgacaacaatcacctttaagaagatccttgactttgtc

SEQ ID NO: 35295 - DNA, 3107 bp, Cannabis sativa
ccaaagcatcctgcactgaatactttgaacccttgcaacttgtctcagacttatggggtccctcccatacagtctctcataatggctacaagtattacatgtcatttgttgatgcctacagtacatttacatggatttatctacttaaaactaagtctgaagctcttaaaacttttttgaattttaaagctgaaactgagcttcaaatagggaaaaagatcaaagtggttcaaacagattgagggtgaatataggtcctttactgagcctttaaaacaggtcggtatcattcataggcatccatgccccacaacccatgaacaaaatgggttagttgaaaggaagcataggcaaattgtggaacatggtctaagcttgcttgctcaagcttccatgccactgaaattttgggatgaagcctttaggtgtgctatctacatacataacaggttacccacacctgtcttgaaccaaaactctcccattgacatgccatttcacataaaacctgaatacagtaaccttagaatctttggatgtctttgttaccctaacataaggccctacaacaagcataaacttcagtttaggtcttccccttgtacatttattgggtatagccttaatcataaaggctacaaatgcttagactcatctggtaggttgtatatttctagggatgttatctttaatgaaacaaaatttccctatgcattaaaggtctcacaatcaacatctgatcttgctactgctccctctgaatctcttccctcttcccatacatatagtgctgagttcctgtttccaaatgacctacctcagtccagtgattcgattctcattcctgacagcaatgaatcatcctctactgaacccaacacactgtccgtgccacaatttgaacctattaacacactagaaactcctatttatcatccattccccactgatcagttgcggactgtgtccacaacagttcccagcaccacttttattcctaataccagtcaatcttaaactcagtcacatcccagtgtcccggctcagtcatccagtgtcaccacaaacaagcatcaaatgaaaacaagggctaagtctggtatctacaagccaaaggcttatctggttcttcaggaaccaacaagtgtgaaaaatggctttacagcaagaagaatggaataatgctatgtttgatgaaatgggagctcttaagtaaaatgtaacctagacctatgttgtcttaccaccaggaaggacacctataggttgtaaatgggtgtacaagatcaagctgaatgcagatggcactattaacaagcttaaagcaagattagttgccaaaggatttcaccagcaaccagggtttgacttcactgaaactttcagccctgttgtcaagcctgctacaattagagttgtgctttctttggctctggcacaaggatggtgcattcaccaattagatgtgaacaatgcttttctaaatttaaaggaagaattctatgtgactcaacccttggctttgaattgcctgatgctcctcaccttgtctgcaagcttaacaaagctctttatggactcaaacaagaaccaagggcttggtttgagaaattgcagcattgcttgacagattttggctttgtctcctcaaaatctgaccacagtctcttcatacaacatacttccaaatctattacactcatacttgtgtatgttgatgatataatcatcacagggagtgattttgagctcattgcaaccttgataaaagatttggattctaagttctctctaaaaaatcttggtcaacttcactacttccttggtattaaagttcaaaacacagaggaaggtcttcatttgtcataaggaaaatatgtaagagacttactatacaaagcaaaaatgatgcatgccaaaccaacaccaactcccatgacaagtggtttaaaactttctgcttatggtggtgatgcagtggatgatcctcaattatacaggtctatagtgggagctcttcagtatctaaccattacaagacctgagatttcatatagtgtgaataaggtctgccaattcatggcaaatccactgcatactcactgggatgcagtgaaaagaatccttagataccttaaaggtaccatctatcataggttgaacttcaaaagatcacaagagtatgatgttaccattttgtgatgcagattgggccaatgatccagacgacaggaggtccacgtctggattcactatcttctttggccacaatcttgttgcctggcaatgcaagaaacaacacactgtttctcgatctagcacagaagccgaatatcgaagtctggctcaagttgtttctgaaattacttggatgcactctttattctctaaacttcacatacagctaccttggcctcctatcatatggtgtgataatatgtgcataattctcctaatagctaatcctgtattgcatgctcgtaccaaacatattgagcttgatttgtactttgttagagagaaattgtcccaacaaatggtgtgcatttaacatgttccagctgctgctcaaatagctgatggccttactaaagccatcacaagctcacagttcaatcagtttaaagacaaacttgaaattaaagaatgtaccaattccaagtttgatggggtgtgtcaagatagttaaagcttctaactgtctctgagttagttgctcttgtctgttagctagcagttggttttcggttaggagtttgttagtattgttgggctttattgttgtaatcttgagttgtatataatgtgctttccagttgatcaatgtaagagattctttctattaattatctctatctttcactgtattttccctctttccttcttcttcttcttcttcctctatttttggttctctgcttttctttatgcaacaatggcatggaataagagttctaataatactgagcaaaataatctcatcctagagtggtctgtagcaaaaatataggaatatgaatgagaatgagaattggagtaggaatggaatggaataaaatttaaaattcataaaaaattgataaaaaaaattattaaatttgttcaaa

SEQ ID NO: 35296 - DNA, 1850 bp, Cannabis sativa
gaattttttaaaattttacagaactatcttcaataatgtacacgaccataaaaaatgttaaactaaaaaagtttcttagatgcaaaaaaaaaaaaaaaaataggactacatcaatactttccttttaagaggtgcattgtataattttcgtataaatatatggcataaaagatggcatgaaattttctataaaattttatttttcttattttgtgttaataaatcattaaatgaaggtacggtacatactattttagattttgtattttataaaaattacaattgggccttctattttattaaataatatacagaccttatattttttaaaataatacaaaatagatactgatcagcttaattttgttgaattaaaacttaatattaatatgacatgatgctattatgatcattttagttatattttttttgtatctgttcatgctagaaattggtttcaggttttatattaaaaaaaaggacaaaaattgtgttcagtgtctattgttatcattttaaaaatataaggtttaattgataacttttacaaaatataaattctaaaaagatatttaccaaataattatattttagaaaaaatccaatataattttaaatttttaaatgattataattaatatggtaaaaaaataataatctatatatctatcttgtatatatttatagatcatttatttatatatcttgtatatatttatagatcatttatttatttttttttcacatttttaacattatttatttaattttataaaattttattgatttcatcactctagtgagctattttaaaaaaatctcatattgtttagaaataaatgtggtgttgcacttagagactatttatagattactatttctttcacttttgcaaagttaatattacatagttttaatatgtgtaattaatgattcttgcttgcgtagttataatcttttaaataaatacaacatatattcttgaattttttaattttgtcaaaatttctttaattatttgtaccaaacaaaaatattttattaaattttggttattacaatttttaagttatgttttttatgtaatttaataaatatataaaattcttaacaatttcaaaagaattaaaaatataagtatgcacaataatttataaatatgtatatatatctaaaacataatttatatgagcacttaattttatcataatcattctgctaaatgtttatcatttaattagatttttatgctaaaattaatattttatataaaactaaaatattacaaaacattactaataaaaaaattatcatcaatatcaaatgtattaactttaataacctatatatatatattattattattaatttttcttttatttttttggaaaaatgaaaagtccaaataaattaggttgttgatcatgcatacacttgaatgtatttatgcaatattacttttccttgttttcatgcagatatgttggacttaagatgctgaatgagagaagacgatcatgaaattagaaaatattttactttataattctcataatttactaaaaattactatataccctatatgtaatattcatattcatgtgccttttttcttttattattattttggatgtaacttaggtggagaggcttagccagatattgttaacattaataattattaggtgtataatttagtagtaaattatatataattctatatcatatctttatatattaaaagtaattatttaacaacaattcttagtttaacaaatttttttaacgtttatttttttttaagaaaaataaacaaaagtttaacgttaccgttaaccttcaataagaaa

SEQ ID NO: 35297 - DNA, 1100 bp, Cannabis sativa
tactgcttaggtaaaagagttaattattaagcgcttcgccttgattacaagataggaagattgggataattgactgcttcaactttatctgcgggattactagtttgattgaaaattaaaattgcattcattataggaattaagaataattgttgagggtggcgaataacctttaactagcttctcatatcgtagtctcacttttaatttatttttatttttatgccatttttttctaaacataaaaaccccatttttcaacttttgtcactaatttttgagtaattaaataaacatagtcctcgtgggatccacccttacttacaattatagtaaaataattggaggtattagaaatattagtaaatttgttttggcttacgacatgcatcatggacttctacatattctttagtcttgacttatttttggttccatgaggcttctccgtgacgggatcatagagggggatttttattagaaaaattataagactaattccttcctctaaatgtcacgtgtggataacaaatgtattaaagtatgaaatctttaatataatattataatagtacgatttactatactaagcactatttagtagtggtatgtaattttgattcagatcacatatatgggtagatatttagtaaaagtactatgtacaataaagattatgcatgattggactgatataaattaatatattttatcaacatgtcgtttatcataaaaaaaaataatttatatcacaaagattatcattagtagttctgtctgaatcttgagtatcatgaactcatatttgtgtttattaggttatttgactcattcgttaaagtttcttaaacataaagattaaaagtttttgttttgagaacttaataacatgaatgattgggaacatgttatacaataagcataatccaagcttttcgagaggatcaaatattagtccccttaagggtcaatcctaggagtgaatttagttattgagctcaaatctactatgattggattatagattattaactatttattatgaattaatggtacttgatgaatcaatagataattagaagggtaaatggtaattttga

SEQ ID NO: 35298 - DNA, 1554 bp, Cannabis sativa
ggtttccaggaaccctagttttccccaaattgttgattttagggtatggtcatgtcttttatagatagagttattcctagttgaccttaaagtccccgagaagtgtttagcgtgtctctcatcaaaattacaatgatgtgatttaggaccctgtgaaatgtcgagctgcaattccactcaggctgaccggcacacccaagcacggaaacgaggtaagatagcataaagtatatatatgtgtgaatatatacttgttattaattgattacactactaacaccaattaatatatagttttaagggtgctagtacagtgtagagttttagagtagttagggtgttaccaacacgagtacaaaattggtgctctagtgcatgtggtacaacactcggtaactcctggagtacaatttggccctaccaacacgagtacgaagtcagtactctagtgcatatggtacagtggtcgaccctactaacacgagtacagtgttggtgctctagtccatatggtatagtggtcgtacttccattaaaaacgttcttaaccacttggtgagctcagttattgagctcaggacggaaatccggtacatcatcactgttatatatgttatgtatatcttactgagtctgttgactcatcagtttgctaccttgtgtaggtaaaggaaaggctaagctggaggagcaatgagttagagcttggcgatgattgtacatatcgcggcagtgcaacctggagggtttcggttttataacattttgagctgccctatgttttgtaaaaaaaaaaattattacttaactttatatggtaaatataatttgcaactgtgtttaaatctcgaaatcctgacctataagcttatataattataatataataaaattagcttttggatttagtaaattttcaaatacgggtgttacaaataaaatgggatagaatggaaagaaaatacttttcattctattattttgtgtggtcgcattttaaagtattagaatataatgcttttttcaccattttggtggaatgactattccattttaaaaaaaaaaaagaaagaccatttcaatgtaacaagataaaaaatttaatgatttttttattaattttttttttatgcattttaaattttattcaattcctattgctattcccattctcattcctattattttcattcctctcaaccaaacaccacttaaggacttgacttgaccacttacaataattagccagatactttttaacacaaacaatctcacccaaatcagccttgtaaaaattgaaagtttcatttgcatattaggctattcctaaaaagaaaatctcactaatgtaaaagagtatctctaataaagtgttataaaagcactatattgtcatattttaaaacactagcaaaatgatattgtcattgtgatgtaaaatatgtactaaatttggttcatactaaacttatgtcaaatttaatacaaaatataacataagttaaatttgcactacaatatatatcacaatttttatttattatttttccatca

SEQ ID NO: 35299 - DNA, 2304 bp, Cannabis sativa
  modified_base (1215)..(1231): a, c, t, g, unknown or other
ggggtaccactatcaaaaatgtgatatttttactattttaattagaataattgttagtgcttaaaaactactttttctctcaaagtgtccaattgaaaagttatgcacaacggtattagcttcgtacatgtgaaatttcatgatttttcgagttgtgtagggtgaaatttaataaagagaacactactaacgaattgtaaaagtaaggaaaaaactttttaaaatttaccctaaatagaagaacattttcaatttctgaattagggggtcattttaactaaatttaatgcgaaaccaatctttatattcatgtcttagtagtacaaatttaatgtgactagtgagaaaaagtattctgagatgggtccgggccacatttcacaaaggggtacgactatcagaaatatgagattttcacgatttcagttgaaatgattgttattgattgaaaagtactttttctctcaacgtgtccaatagaaaagtaatgcatgacggtcttggcttcgtccctataaaattatatgatattttaagatgtgtagggtgtgttttaaagagaacgctaatgagtataaaagtaaggaaaaaccttgttaaaatttattttgaacagaataacaatttcaatttttgaattatggggcaatataaactaaatgtaatgcgaaatcaatctttatattcacgtcttagtagtacgaattcaatgtgattagtggaaaaaaatatattaagatgggtccgggccacatttcacaaaggagtaccattactattagaaatgtgagattttcattattttgattaaaattattgttagttcttgaaaactactttttctctcagcgtgtctgattgaaaagtgatgcacaatagtcttggcaccgtctatgtgaaatttcacgattttttaagatgtgtagggtgagattttaagagaacactaacgattgtaagggtaagaaaaaaacttgttaaaatttatcatgaaaagaagaatattttcaatttttgaattaggggccattttaactaaatttaacgcgaaaccaaccatcatattcacgtcttagtagtacgaattcattgtgagtagtggagaaaaatattcttagatgggtctgggccacatttaacaaaggggtgccactatcaaaaatgtgagattttcactattttgattaaaattattgttagtgcttgaaaactacnnnnnnnnnnnnnnnnnccaatagaaaagtgatgcacaacgatcttggcttcatccccataaaacttctttatttttccagatgtgtagggtgagttttaaagagaacgctaacgagtgtaaaagtgaaaaaacttattaaagtttatcctaaaaataagaatattttaaaaattttaattaagggggccatttaaccaaatttaatacaaaaccaatcttcatatatcacgtcttagtagtacgaattcaatgtgactagtgaaaaaatattctgagatgggtccgggccacatttcacaaagaggtaccactatcaaaaatgtgagatttttactatttcgattagaatgattgtcagtgcttgaaaactactttttctctcaatgtgtccatagaaaagtgatgcacaacggccttggcttcgccatatgaaatttgacgattttttgagatgtgtagggtaagattttaagagaatactaaggagtgtaagagtaaggaaaaaagttgttaattaaaatttaccctaaacagaagaacattttcaatttctaaattagggggtcattttaacaaaatttaaatgtgaaaccaatcttcatattcacgtcttagtagtacaaattcaatgtgactagtcggaaaaaatattctgagatgggttcggactatatttcatagagaggtacgactatcataaatttgagatttttattattttgattaaaatttagtgattaaaaactactttttctcttaacgtgtcttatagaaaagtgatgcacttctagattttgcacaaacaattacaatttgagagttgtaataatttatgacaattaaaacaaaatataaaaaattagcatgatctagaattacaatacaggatatagatgaatatatatagtatagatatactttcttgtgaaaaaacccagtacaaaaaatccatgccattatatcactacaagaaatgtcacttttaccagtacaattcgatgctgtgctggtaaaagtaacttttcccagcgcatttcgcaaactgcgttggcaaagtagtcaaagttttaccagcgtacatttgcagt

SEQ ID NO: 35300 - DNA, 4737 bp, Cannabis sativa
ccaactttaatttagtatggttacctccgacacgtggcagacagaggtgaattattacgcttcaaaatttggcgcaatctctcccgcgtatatatataacgaattttttcttgcagagcagtagagcacgctatggagaaaggcgagacctcaacaagcgacgccgatcggccatggcaatcttaccacaccgtatacaccaatgccaaagctggtaagtcatcttcatccaatctcgctgcatacttgaaatcctccacaaattatttgataattgtagaaactagggttttacacgttgtgaaccatattgttccagtgcaattgatttggttgattttaggtatggatggagtggacaaggagaaagtacaacgagtggtgtatgaaatgagcaaagggtctaagtactttgagaacgaggagcgcaaggaggcttttataaggcagaaaatagaaaatatgcgtgttcggtgtgccaagcttagtgccgaagatatatctcactttcagatggtacaatttttaattttatttcagttgtgcgagtttgaattttgttttttacttgaatttggggctgaaatgttgttgatgacaattaggaaataattcattacattgatgtttctaatgtttcttcttaaattcattatttttcttaaagaagaaagaaaagtggaaaaaaaaaaagaaaaagaagaccattctgggtgatgaatgattataattttaataaaaattattagtgtaatccttaatgggcatgtggtagctaaattgggcagaaatgtatctaatagcttgatatcaaataacaggttgcagaaaaacgaattttagagctagaagctgcaagaaacctttcaagaatttggatacatgtggatatggatgctttttatgcagctgttgaaacattaagcaatccttcgttaaaagggaagcccatggctgttggcagtatgtctatgatatccacagctaattatgaggttggaattgcctagactggagtttgagggataattatgaagtcctttcctttgtgttgtttaaacccaaaagttatgcaatagggtagaaagaacttgacatgactgtgttctcaagatgtatatcaataattaaaaggtaattcttggctcgcattgtaggctcggaagtttggagttcgagcggcaatgcctggttttattgctcgtaaattatgcccagagttaatttttgctcctacggatttcaaaaagtataattattacagtgacttaacgagaaaaggttaggcttttggcttgctcttcttctaggttgcatttgaattaaagatatttgtactagcgaccgattcttatttcactttttcctattttttgagttagttttccagacgtatgatcctaattacatggctgctggtttagatgaagcctaccttgatgtaacggaggcctgcaaagaaaggggtattactggtgaagaagtattaaacctttacttttgcttctttcttctttacatccttttttttcttttccatatttttactcttaaattgtctttcttgtttcaaagattgccaaagaaatcagaaccaacatatatgaagagactggtcttacatgtagtgctggagttgcagcaaaccgtctacttgcaaaggttgacaagctaataagctatttatcgaacaattagtactaaatttatttaagaatttaggtagtagacttgttgatattacttatgctgcccaaaatatttgcaatcatgttgaatgaatattttgtcccctcccccgtccccaaaaataatataaaatctatactcttttagaatttaaaattttgttactttatgtcatatatggtcttgtgggaaaaaaaaagaaccagctctgttctgtaagagcaataatctactgcaaacttgcaaattgacaataatttggttaatataaagtctttagaagttgcagtatatagtatcatgtgagttgaagggttttcttgccatgtaaggagtctttttttccattaagggagaggaagaactaagatgaggactattaaatcaaagaagttgaggatcttcttggaaataatgcaaattttataaagtagttaattataaatgactcaagtgtactgacaaattactagcaattgaaaatgatctgaactgacacatttgtttttactccatcctgctctatttccctttcctttttttttgtggcaatgaatacttctctgaaaattaatgctaattgttaattgcactgctaatgatcttgtttgcataaaactttccctatgttttcactttgcagatgtttcttttgaggaaatttcatttgtgtttcccttgacataatgcatgctgaatttcttttcatcacattggtgtcaataggtttgctctgatataaacaaaccaaatgggcagtttgttttaccaaataaccgggtggctgtgatgacatttatatcttcacttcccatacgaaaggtatagtgtaatgcaaattgtaattcacaagcagcttattttacatgttgttttagtcatttgtgtagtttacatcctgataaagagacatcatagtgaactttaaacacagattggaggaattgggaaagtcactgaacacattttaagggatgctttaggaatcagtacatgtgaggagatgttgcaaaaaggaagttatatctgtgccctattttctcaatctacagcaggttttcaccattgtcattccttttttactatgtctttacttcactcactatgtggaccatgaccatagcccttaaacactgcagatttttttctctctgtgggacttgggcttggagggacagatactcctgaagtcaggttgcgaaaaagtattagcaatgagagaacattttctgccacaggggatgaaacattgctttatcgcaaattaggtgattattgttttatgtctttcattttcatagtggggaattttttgtcttatgattcacgactcatacaagacatggacttgtggctcctttttagtggtttcagtttcattctttatcatgtttccacaatgtataatctggttcaaacctcttgaggtataagaggtatctaaatagaacttagaaggttacagactgatacattagcatcattatcattgatcattgatatagttttcgtaggaatctttatttctgactttgaagctttaagcctgaaaatttggctatagtgcctgttatagacccttgtgtgcatggccaatggacttgagaaaataatagtctaactagtacattcctcgcattggattattattatatttaaaatacactatcagtttctttgacaactaaaattgtaagccttattgttacagaggaactttcagaaatgttatcagctgacatgcaaaaagaaggtctttgtgggagaacattgactctcaaattgaaaacggcagcctttgaggtatatgcactgatttttcagcaggttgctttgtatcttactgatgtgattgttatgctatgaatattgatactagtttttaatctacagcttcgaacaagagctgtatctttgcaaaaacacatttgctcaagtgaagatattttaaagcatgcatcaaagctgctgaaggctgaatttcctatttcattaaggctaataggtgggcatgtacattgtttacactttacatgcatataatcatttacacatgtcgtttagtttgtatgcatgcacagcggtgatgttgggatgctaaggaccttgccttttatataactttatttttttcttgttgacaggcttgaggatatctcatttaaatatagagagggatggtgctcttcttgatcctacccagaaaactctgactaacttctttgtatcaggagatacttccggcaaagatgtaaatggccaaagaccctttggccatgacacaagtaattacttagtgaacaatgataattctgattcttttattggcgaacacgagacacatcatacttatagtgatgcgaattgcagtcattcatcaatacttgacaatgataacagtactctcagcagtatttcagctcaaatggaccatagtttatcgagtgatgttactgcatacaaggtatgtaagttgataaaataattgttttggttgggactgaaattgctaatgttatgtagtatttctttacttgcgaggacagtgttatacatgatgtgaacaatatgctaaatgaataaggtcttggatgtgatgtttagaaatagcttttgtatatcggttccatcattcacgagctgtacgttgtatgacaactccagtacaggctaataagtttcattcaacatgaagaactatattggggatggagtgtagaaactttttaagcagtgtgttctctgcaggttgagggcaccaattgcccaaacagagtgactaatggagtaaacttcacggcagctgaggctgaggtagtatcttcaatgggtcaaagagagttatttctatgggtaaatgattacaagtgctcaatatgcgggatagaaatgccaccggattttgttgaggaaagacaagagcactgtgattttcatttagccgagaagcttcagaaagaggaatctggcactgggtttagaagttctactttgagacacaggttattatcattattttaaatatttcagaatttaaaatgatatttg

SEQ ID NO: 35301 - DNA, 1547 bp, Cannabis sativa
atgacaaaataggcatatttacacaatgtgtaattttttagttcaaaataacaccatgtgttatttttagcatgaaagatcaaatttcccaaaataaaaatctctcaataacaaaagggctgaatcatggccacacgtgcttaattgttctctgtaactttattttttaaaaattattttatgaaaaatggacaaacatgcctaatttttgtcaagaaatagttttctatttttaaaataaaaacaattttttatttaaaatgtcaaacatgcaataagtcttccacattaagagaaaataatactaacgtagcaagaaagaaatatccaaataaatccatcattttatttaaatgacgggaagaataaggaggaaattgaaggtcgattgcttagattcggccaatcgttctcttaattgtcaactctcctacttcactaatggcacatttcgtattggatcataggtgtcttttgatcagactgccttttcaatctcgtcttaaaagggtcagttcattgagaggctccttccctagcattctatgtgttccttaatttcctttaattaatcgcttttatttattattaggatgatcaatttgattgtcttcttccactactatgaaaatcctttttacgattttaagaaattttggaaccaaaggcactctaggcgaagcaaaagaggttgaagaaaacataaggcaacaacaagtgcacaaaatcactagcgggcccattttttcgacgaaaaaaatcgatataaaccctttttgtcgacgcatttaccaattgcgtcggtgaaaacaattttaccgaccacagattactggccagaattaccgacgcatttatgtgccgacaaaaagttacaagtgcattatgcctggttctttggcgcaaattggcgttggcaaaaaccttctttcttgtaaggtaaataatttatttaaaaaatcttaaaaaatattttttttcttttttttttctcttcttctttgtcttcttcatctccaccccaatttacccccatcctgaccccacactcccgacaccaattttgccaaccagcgaccaaaaattccattagcacaatccatttgcagcgatccaccacccaccatcgattttggaaaagggtaccaaaatctccaacacccaatttcagtcactggctatgacatatacattcacgtatatatttatatctacgtatttctcttagctaggatttaagtaaaaataagaagaaaaatactacctaacttcatccattttcacatgtttgatcatcattatagttatatataagcagtttatcagataattttagcttttatatattcaaacttcaaactcaaagcattgatattgaatgtttatgtaacccaaaaaaaatggcggagataatggaggcaaacgatattgagttcgtaaagagttcatgcatgcacttttttttcgttttatgcttattttcttgttattcatttctaaataaaaaatgaaatgaatatgattatattccctgttggctgattatc

SEQ ID NO: 35302 - DNA, 2573 bp, Cannabis sativa
ttatattaaattatatgggacccgctacttagttggaccaatagcgatattaacacataggagggtgctaggcaccactggtacattttagcatttttcaattataatttattatattcagtaatggtttaacagaattatttaagtacatgattcccaacatatgggctactagcgatagtcaatatgacctgagcatcaggtattgtgaaaaattaataagctaagagattctagttaacaaatcggatctgattttgctaattgaaaaaaaaaaggatggtagcatcttgcttctaattaaatttttgttgcttttcaactagtcttgtagtgagaagatgtctagtaaatgtttagttattttttggcatagaaaatagtatatttgctaactactgcaaaatttgagaatccctatttcttatactaaaactttctaagctccacagagagtatttttttgaagaaaaaaagtatttacaaaaatatggtagaaacccaaataaaatagctcattacccaataagcccactgaaaaacagcccaacccccaaaaaattataaattaaacaaactattttataaaaaagtccaacctattgagcaaactctagtaaacaccaacaaaaagaaaaaaaaaaagcccttattataaagatcttcatgtttgataaaattaagaccaaccaaatttaggtggtgtttggtaatatcttttcaatcagttttctgtttttaaaattagcttagtgaaaataatttttagaaaaatgttctgtaaaactatttttattttttaattttttcattgagaatcaaaattttgaaaacaaaataaaatcactttcaatatttttttaaacagttttttttttttcttaatcaatattttagatttcgaccagacccagactcaaatccccaaacggccctaatgctgaacccgacctctgattcgaacccaaatctgatcccaaacctaaaaatgaaaataaactttacagaacacacttttgtcttctatttttaaaattaaaaacaaaagtggttataaaacgcatttttgtttttcaaaaataaatttttaaaaacaaaaattttattttcattttgtgattaaaaacttagaaaacaaaagtgttatcaaatggtacctaaataaattatataaactaagggttaataacggtgtaaatacacaaagttttaagtttataagtagtataaatttaatgtttatttttagcggtataagtactcaatgtttatgaaattgtaatttttctctaattaatttcttaactgctgactctgttattgtcttaaacaaagtacatataaggcccaaattctagatatcattgagtctagacataaacatgtagtatcggttacttctaaatgttcttttaacaaattcaaaatagaatttttatattgacgaaattagaagaaaattatactattacaaacattggttacttatgctactaaaaataaaaattgaatttatgacgcttataaacttaaaactttaagtacttatgttgctacttacccataaactaacaactcagtaaaaaggttgcatcaaaaagaaaaaaaaaaacctaagtcagtaaaagaaatattttacagaaaaacgtgaaatataaattaaaaataaagtttacacacacgtgtacttttaatatgtgaagggagtcatctttgtttatttaatcaagagatatgtgcagtataaatattttgtattttagattttatacacttatatactatatgttttaattatattaacttattttaaaaataaataacataattataaaaatttaccaaaaaaatatctggatcccctctcttcgtttcccttattgtagagcctctccttcaaaaaattcatctctttttttttaaaaaaattgtctctctttgtcgttattgttcgctcgcgcttgttaatttcttttctcaatcgactaaggttttgaaattttatgtgaaaaagttatgagatttgaagatgttggtttgcttcaggcgaggtgcccaactctctcaatctctttatcatataagtgtataaaattttaaacatgaaatattattatgtcgcaaataattctttaattaatataacaaagagttatatttgagtttttttaagtaaaaaataaaattcgattaaacgataataaagtgagtgaaataaaattattatttctcaaaaatatacttcaaaaatatacttcacgtattcatatatagatagagcacaaataaatttgattatcagaaagtaaatatgagaaatgataacaatccattttcaattaattaaaaacacacacatttttttttttttagatttttttctttttctttttttttttctttttggatttaacccaactaattacaaattttttgtccaattacaaaaattatttaaaggaattttctcaaattataatgtaacttttgcttaaaggaaatatatatatcccataactttttattgtattattaaaatctgtgtttaagttcacttttattaaaactatatc

SEQ ID NO: 35303 - DNA, 1542 bp, Cannabis sativa
atttaataatatattttattcactaatttttcttcgttttaaaatttattctgactaaataattttttttagtgattagatgacgatgagctttagatcttaaagaaagagaatgtcaccgtatacgtagtgaccaacttgatcttcttgtagagtgattgaatacacaagtttctttatagcaacaggttcctcgacaaaataaatataaatttggacatctttaacttcaaaaataaaatatttatatgatgttttgtattgtataaatatttatatatataaatgtcatttttctaaagtttgggctcttgggctcgtctcgatcaaaagaattaatttcaaaaacttatatatttcgtccctgatcaataaaaataaacgcaatcagcatttaacataatggtagtaacgtaaattgatcgaaacgaacatgtggtatttaattcgtaaaaaaacagatacgatatttaagtgtataaaattaaaaacataaattatttatgccgcaaatttttcaaaaagttattcttaacaatggcctcagctgtgtataaataggtattttagtgaatagaagcgatatcaacgcagactattcagagaaataagatgaagaagaaaggaaaagaaaaggtagacaaagagcgtgcatataaaacgcttgtttgaagtttatcttttgtgaaagattttgaggtgaaagattcaaggaagtttgtatacaagcatgttgttatgcttcgacgcttacaagcagctgtgtagaggaagagaaagaaagaataatttctttcataattgataagataagcttgatgggactagacgccttcttttcctctttccttctctttatccgtccctagctaatagcttgggtgaatgtatttatagaggtagcttattgtgcctcttcgaggtgaactgtatcttcgtaaaaaaaatcaagtggcagatgcttttatctttatgcactcacacctaaactcaagtatacattcatctcacgttttgtgcgactattattcatatattttttttcgttttatacacaactatttactattttgcttcttttactgttattattttattttattgcacaatcttttctttctttttttttttcttttttactagccccttgtctgtgtttaataaaaaaaaacacttaatattttttcttcacacagacaatttttttttttacttttcaaagttgattactcacctctctattttttttactaggtgtggagggttggtgttcctcctgtccatggatcatcatgctcttctttcacttttatgcatcacaccaatattttatggctcaaagatgattactcatcaatctttttactcacatgcatcatactcattttttagtgttcattgtgattactcatgtcttcaatttttaattactacgtgtaggcatgggaacgaagctcttatgcttataaattaccacatttttctttcatttccatgcatttccttcattcttcccatgcaacttctcttttgcggcctctt

SEQ ID NO: 35304 - DNA, 1859 bp, Cannabis sativa
aaatatatattttacgttttcatacataaataaattatattgtgataaccttaaaatgtgaattaaccaaaacacatcactaacatgtagtctatagttactcagctacttctaccaacaagtctaatgtgagaattaatcagtattgttaactttgctactcacacaataataccccgatcaccttaatttttttaaaagcactatattatactatacacacacatatatatgtatcatttttttgtatgtatacactaggttgaataattttatcctgtttgtaacataaatattaaagtttaaaatattcatctcaacccaatgaacccaacccaacccacccctttattattatactaaatagggttgggttgtacaataaaaaaaattgaatggtttatagtttatccaaaccacaattattgggttggcctattaaaatacctctaacccagccaatccaactcatgggcacccctactcgaaccgaagaactaccaccgaccaaatccctaacatcaaacatctcgaactctctcatcaatctatgaccatcacgatatctcagactctctcaccaatctatgaccatcacggcatctcagactctctctccaacccatgaccactgtggctagaccatcgcaatgtcgaaggtaagattttggaccctctttttttttatttcatttcattgtatttttaggttaaaatgtacgagtttattgatttagaattaaaatgtatgatgaatctttgtgatatgtgagtttatgttagatttaaagttgggtttggtcagatctgtattttgggcaaaaactaatttttacgctaggtctgatgctggtacgatgcaggcctaatgcctttctgttattaaaatgagtaaaggttgaaaatgtaagtcaaatggtggcccgatgtaagtccgatggtggcccgatgctactcattttttatttactttttattattttattatacataaaaaataggtagcatcaggccaccattggatctacgtcttcaatctttgttcatttcaacaacaaaaaggcatcgggtctgcattggaccaccttccgaccatatcctacatttatgggtagcattgggccaccattagacctacgtctttaacttttactcatttcaataacagaaaatgcatcgggtctacatcagaacaccatcgaaccttcatctataacctccaaattacactactatcgtactcagtatcggaccactatcgtacctggttgtaccatatacaaaaaaattacaaaaatattgatttcaccaaaactcaactttttaccaaacaataaacaaaaatatatgtataaaatatatattaatttaataaaaaattatataatatataatcttatatatgtatacaatatataaaattttaaacttatatatgtatacaatatataaaattttaaatatatattatagaatataaataaatatttattatataatatatataattttgtaacaaaaaaaatatattaatttttttatatatatatatatattaatattttttctagtttaggttagtaataattagatagggtttttctaatatattttttaattaatatatgtaaataaatgtaattaagaaattagaattatatatattatttactgggttggcgcgcggtttcggatccaactcaaaacccgatgaacattaaaatttaacccacaaattcgcccaatggagtaccgtgttggacctgactcgtctaaacattttttttttttaaaattttgcaggttgactgggtcagattcgagttaaatccactcaaaatattcagtcctattataaa

SEQ ID NO: 35305 - DNA, 1773 bp, Cannabis sativa
aaatctaaagcatgcttggctctgtttatggatcgagtaaaaggtaatgcatgtgactttccaaattgacaggcttcacgaaaagttaattgatcattgattgaaatttttacattagtagctcttaacacttgacgcaggacacgaggtgagggatgtcgcaaccttctatgccataagtttttcttggaattgaaattactacctactgagctaacagactcactactatttccaactacaccagaaaaaggtttaacagcagtagctaaaaataactcaggactcaagtgttggttatttgttgatgacaaactggaagaggacaggttggatctagttgtggaagcttcaagctgatataaaccatctctaagactcccttgaagaaccaccatctttgttgccaagtccttcacaaaacacacatcagagaaaaattcaacaaacactttattatcagcagtgagttttgaaatgctaatcaaattctttgctattttgggcacatgtaacatgtcatttaagtacagcacattaccatgattagactttaaagtaccagacccaatatgagagatggcaagttggttaccatcaccaactgttagccgatccttaccattgtaagcagccttgttgctcatgttgtcttgatcagaagtgaggtgattgcttgcccctgaatcagcataccagatctcattgtcaacaacttcaggtgtggctatataagcactaggatctttcttctcttgttgtggattgttgctgccaggagtgaaacccatgaaggattcatcatatctgttgtagcagaatgctgcagaatgtccatatcgtccgcaaacttgacatgtgggctttgagtttctaccccctctaccacggccacggcctgagtttccaccacgattgttatgacctctgccacctcttccatttgcattgttgttgtagttgttgttgtagttagaactgcctctgccagtggggtaattctgttttttgtttgcaaacgctgcagatggtccagcacctgtggaattggagtttttagcagtattagtgagtaagtttagtcgttccaacttactgtcgaaactcaggagagtttcttgcatttcctgccaagtgagaccgattttggcctgagcttcaagctgacacacaatggtcaaatattcagcatccaaacgactaagaacattagacaccaaatgtgcctcaggatactgatctccagccagtgcaagactatcagcccaggatcttttctgtcgaaggtaatcagccattgtggtattgcccttcctggtagtttggatctttgttctcgtatcatccattttagctctcgagtgcgctccatagagattctcaagagccacccacaaagttctagcagaggtgcaacccatgacctcagttgcaatcatctcagtcattgacccataaaaccaacccatgagcagttggtcacaaacaatccaatgctcatactcagggttgagttgaaagccaaagccaggtgtattcaccccccaatctgtttgtaatttcttgattttcctctcaaattgggtttcagccatgtttttaaattggataaatgctgtaagagcatcagacttggattttaggggatatatccatgtgtatcgactaaaatcatcgataaaatggatataataccttaaggttgtattggacatgactggggctggaccccagagatctgtatgcaccaaatctaaagcatgcttggctctg

SEQ ID NO: 35306 - DNA, 1643 bp, Cannabis sativa
  modified_base (156)..(156): a, c, t, g, unknown or other
atcattacctcgattaccatcgagtcacaacaaatacatatcgttaacctcaattaagattaagtcacaataaacacataccgagatcttgatcacaatccagactgtaacaatcataacattacaatatacggtgcttaatacttttcttacctnaagtccaaagtcaagtatgtgggccgatctgagtggaatgatgcacgaccatctcaagtcctatgtcacgacaaaagtaaatcaataagggtctatttcaaaacactgtctaaaatccgcataaaataacttagggttttctaccgaatcttatggtgaaaataccctaaaataaaatacatcttttggctctagtctatgactcatactgtagagctcttcataagcttcgaaacggtatatagaatgtcaaaaaaggacaccagagtgaaaaattatggctaaaatacgaaaatcgacgattcctaaaaattgaccatccgaaattccggttggtgcagccctgtaccatctggaattccggttcactacagcagaaactcgaaaatttcaaatcttcaaagtcccaaaacttgctccaaacctaaccaattgttcccaaacttcacagaacagtataataaccataatacaacatattccaagcttcaaaacacaacaattaaatgattgaatcaaattcacaaattaaagtgaagaaaactcaactttagcttcaacaaactaaactcaatcaagcagccttagaaaccacttaaaaccatttctaacatactcaaaaacctaccctaaacacaacctaatcttagtctaatccctacagccacagaaatgtaaaactctacctcaaaaccaactcaaaacttagagtttccaatccaaagagtaagaaacttacctcaaaacttctctaggttgtttgggataagaatcagcttgaaaatgaagaaaatggctgaagagaaaccctcaagctggctggtttggcttgcactaaggggaagaagagaaggagaagctttttggtgccttagcaactaagtaatcccatataaaggtttttttcttttttttttcttcttttcttttcttttcttgtttttttcttttaaaataagggtcagcccaaaaaagtcaaaagggataaaaaaaaactaacctacccctcaaaaacatagacttttaacaaaaataacctatcgggattatggtaaattactaatccattaaaccgacgttctaaaattctaaactagtctagaatatcctcaaaatagtccatccattaatgtcatgacatttctgaccacatcgtcaaatttccacagtcgttgggcccgaaaaatatttttattttaaaaatggtatcctcgattcccacatatcctaatataatctccgtaattaataaattatgcttaatataatcatttaataaatcctcactaattaccctaagtaagatcataatcttacttcattacaaaataattacatatttaatagaatatgtctatttaaatatcattttattttcctagagattacacattttatgtcaatagattcaaactgtatgttaatgtatggaatttgagtttagtattatgtgaccaggatcgacttggactactctaagaactctt

SEQ ID NO: 35307 - DNA, 7688 bp, Cannabis sativa
  modified_base (1944)..(1944): a, c, t, g, unknown or other
  modified_base (2671)..(2677): a, c, t, g, unknown or other
catttagaatagagggaccatatgcagtatgcggttagcttgcgagctataccaggagagctattcttctaagagagagaagttcttcccaagttaaagtgggggagcccactaattcatatgtttaaagaattagggtacttgttcagttttggtgtgtgaatccagagggaaacactacaacaaatgggttgttcagtgcgaagacttgcatgattactacaagctgcagatagacaatatgcatgggcgtagactgagatcaagactgagctagtttgtggcatgttatgggcgtgctttgtgtttatgggaacactggtgttgtatgggatactgtaagccgaatggttcagagaacatataccgataggagatagcggattgggatgacttcaagtcttaagagtaagactttgtgttatcaagtttgttaaaatttagtgaattatcagaggatgcagggttgattttgagagatggacttgtgacacagtgttattgagccgacacgagcaagagccagaaggcaaactcgtggttttaggtgattggtagatcatgcccacgtgaaaaaatcttagaggagcaagtatgcagtgggtcagtggggccttttgcatgaagtcgtggtgtgcgatacggtcggagggccaatatggagaacttcacaaagtgattatgtgcaagagtgcacttggggttgtattaggtgcagttggcttgcgagtctcatccaagtgggacacatcaaaatttaccatgcgatatgagtgtcttgctcgatttccatcaagaggatggtgcgccatggagttggcatgtgaattttctggaaggacttgcccagagggacttagcttcagtagaagcgtgttctgtaggtgtcattgggtacagttggtttgcgaatctcaccccaaggggtgcaccatacttagtccttgtcaaaaggagattaatgcattagacattggcgagtgaactactatcataggatgtgttagcttcaggatcagtgttgcaagtgctacttggttgactggagggacattgtgatggactcagagaagttcatgttgggggaagtattctagtgtggaggcactactccgtgggtggttctgaatagcgatagtggcacaggttcttagatcaagtccaagagtgggcgagggaattcgtcaccaagagggtggttctacgaagatagagggacaagtgtagacttagtattcgtatgaagcttggagtaagctttggagtcgagatcaaaaagattggcctgcagtccgttgatgagggcatcaacatgttgaagtgagggagaatgtaacatgcgtgccaatgtggcacattacaagctaggtgatgcccacaagttggccaagtggtggtcaactggtggcgcatgttgatgtgcatgctggtggcatgttgatgcttagtttgtacggtagtggcatttttgtaaatatctttaatattacccagattacgatgggacttggtattcattatttatttaggtctacgaatacaatggtgcaatcagatttgggaaaatttgtgatttggtatatggtttgagcatatgtctacagagcaaaaatcatgtatgttcctggtagaaggctaaaagcgtagaatatagacaccccctggcaccttggtgccaagtgagctactactagtcagtgggactagtagggcgggcatatgaggaatactcatgtgttggaatactcatggacactatcgggccgacctggtagtgcgtctacgaatgctgccaaaggttagcgggtacgtttccattggcttgtcggtatgccgcttgcacgggacgtggcctaaacctccaagagacgttgtggtgtgccttggccacgagtctcaacacgagatggcacatgtagtcattcgtggactagtttgcatacncgcataggacggatgcaccatgttgaaaagagacagaggtctaacgtatgcgtggaggcatggtgcctttaggattggacaccactagtacctaatagtattgctcttaaagagtactattattggtaccagtggtaactagcaccaccaaagagagtgctaagcattacttgtgttttttagtatttttttttttacattaaattatagaataatttgcgacataaatacttaagcttaatcccaaattacaaataaatacttaaatttaatttttgacgataacaatatctaagttatatttttggaacttacgtaagtacctatcattaagtgtcaagtcaataatcacgtgacagtctctgattagtacatctcattgaatttttatttttttatttaaatattaattatttcaatataccaataaaaaaaacaatacttgacacttaaaagggttaggtacctaccgaagtttaacttacatattattaacgttaacaattaaacttaagtatttatctctatccgataattaaacttaagtttaacttctagttgtaaataaatacataagtttaatttttaacgatgttaatacctaaattatatttataaaactttcgtgggtatctcaacattaaatgtcaagttattatcacgtggtatatgacaatttattagaagtttcaaaattataattttaagtattattaccgctaaaaannnnnnntaaatatttatttataactaaaataaattttaaatatgtatacaataaattattgttaaacttatttatttatatcacaaattactctaaattatataataaaccatacttattttttcagcatttcacttaacaaaaaatgttacaagtatcttttttgaagagaatttgatgaatgaattagtaaattgttatgtttttgagacccaaacatggcagaattcgaattctcttcataccctccaattgagcccaacaccttcgatctcatcctcatcggcaccggtttacctcaatccataatcgccgccgccgcctcatccgccggaaaaaccgttctccacctcgatcccaacccttactacggtagccacttcacttctctctccatttctgatttaacttctttcctcaaaccccaactttccactaccaccaccattgatgatgatgatgatgatcaaaactatactgtactgaatctcaatctcaatctcagttctctttattctgatgttgagatttcgtcttttgatgctgaaaccattgccaaacactccagaagtttcaacattgacctcgggggacctagggttttgttctgtgctgataaagccattgatttgatattgaaatctggtgtgaatcagtatgttgagttcaaaagtattgattcgagctttgtttgtgatgataatgggaagttatcgtgtgttcctgactctcgagcggccatttttaaggataagagtcttagtcttacggagaagaatcagttgatgagattctttaagctggttcagcagcatttggagaattctgaggaagaaagtagtgagagttcgaggatttctatggaggatttggaaagcccttttgttgaattcttgaagaaattgcgattgcctcctaagattaaatcgtactgattttctttatctgtaaatgagaattttttatttttttttcttctgccatttcagattttgagtctagtaaatgatttatatatatatatatatatatatgtttatgtatatatatttatgcaggattattctatatgctattgccatggcggattatgatcaaagcaacttagagctttgcaaaggtatacttaagactagacatgggatagaacgtttaactctgtatcacaaatcagttggcaggttagatttcatattctatatttgctaatttgaaggcttggtacaatcttaagagacttataaaaggttacaaatatatttgtgttcattataatatgaaatatagctacattatgaattaaagtttcatgtttgagatggaatttagaacccaatatgttcttttaatgtttgacacttcatctttagtttatttcgaaaagctagtatgatcagtattctacgagcatttttttttttaattcttatgctgttcttaggtttatgaatgcgtctggtgccttgatttatccaatttatggccatggagagttatctcaggccttttgccgccgtgcggctgtcaaaggttgtattcatgtaagttctgaaggtggtatctctagttttctatatcatgcgaaacttcaacttgatttccataatttctttaagatttacttatgccatagtatattgctgactatatttgggtgtgtgtttttctccttatatctatagcctttaagagttgtttttgtttgatatttcttccttcataacgtctttcttgcacggccggtgtacattttacatggaagaatttggaatttgaccttcatgttcttgatatactcagtgattattgcacttcaaggattagaatatagttttgtctggctgcaaaatccgaacattgcattgcatatactccgtgattatgcatgcttattaatcttgagatctttgttatacaggttctgagaatgccagtgatttcattgcttatggacaaggtacagattgcattgcttaaaataattatgccttaaaagttattactcttaaggatcatataagctcacaaacatttgagcttgagaacttttccaggagagcgggcagtacaagggtgttagattagcttcaggtcaggatttattcagcaatcagcttgttcttgacccaacgttcacggtcccatgtttaccagagcctctcagaggaactttagaaggtttaaatctaagagatgttaaaggaaaggtggcaagggggatatgtgttacaacaagttccttgaaggcagatgtagtcaattttctcgttatgtaccctcctcgaagtaagaatgttttctaatccaatgctctcgttgatgttttttattttcttatctttgataccaaataaacgatgttcgtatttttttagctttatatcctgagcagagtatgtcgatccgagctttgcagattggtggcaatctggcagtttgtccctcaggaatgtaagtgatagttttgttgaaatgtatttttctcctattataacataatatagaaatatctcttatttggtgacgtacttttggttttagttcttagcatatctttgtggtcttttttttttgggaaattgaattttcttaggagattatgatgtatcatatgttaaaacaaaatggctaatttggattttttccccaactttgacatgtaccaatttgtgcctctgaccatttaagccgttataaattctcctgaactattgagattgttagattcaaggacttgttaggtgttcgttagtaaaattgaacggaattggactaaagtcattaaatctaataatttcaatagttcgtcgatgatttttaacaacctgaaaaaatttatgaggtataatttggtataaattcaggaggaaaaacagcttaattagaaaacaaatatattgtttttgtagttattcctaaaacaaaaaggtttagcattttatcatagtcacgccttcagttgtgagagtttgtctttgctatcccaagttggatgcatgacaacaactcttctatcgtttttacaaattgatgctctaaacagttgtataaagttacttaccatgaatgaactattatcatttacttttttgcttttatgaatgaactattgactggcagatgacctttagcccccactcaccactcaaaaatgtgtaattggctactgtttactttctcttcttcaggtttatattgtacttttcagcattgtgtgatgacgcaaaacaagggaaagacatgttacgtgcagctatgaatgcccttctcaagatcccggcttctgaaatttccgaaaagagttctgaagtccaaaatcaagatgcagaagtaaaacccactttgctttggagcgcaatgtatattcaggagttgactacggtcggtttgcttcttattcttctcacattgtcaatgtacacttccctataattctcaattttcggcttcaagtttaactgttacaaattgtttttataatttccagggtaactttgatcatatcagctccacaccaatgccagatggaaatcttgactacaacgatttattagatgaaactgtaaaggtattgtgtttcgaaagacctgtgcaaattcttacttacaattgtttggtaactcatgaatttggaattgttttactttcgataacaatagcttttcgagaagatgtatcctagtgaagaattcttccccgaggttgagtcgtcgcctgacaatatcgaggatgaagattaatttggtcctccggagaactagtctcgtacacgaggaatcgctttgccggtggcctcggaaagtatgccatttggttatggatgtttaagtgttgtatattaagaacctgtggtctgaacagaagttgtactacactaactaactatacaaaggaggctgactaatagaagagatttttgtattaaaattaaaaaattatctcatatatgtttggattgaagttgtaaaaaaagaaagtcattcttaccatttgttatttgaatttaactatagaaaacaacagaagaaaagtttgtttggacaagaattgagaaggatgatgatggtttaaagaaaaaaaaaatagtgatgaaattaatgtattttatttaattttataaaaatttgagttgaataattattatttttattctattttaatttataattaaaatttatacttttttttttaatgtgaaatttctcattagatcaaagctaaagcaagtttgaagacttgcataaacttattaagattattataaattaaataaatatcttgcaaaattgaattataaatcactaaacacacgattttattcttgttcaataacttaaaataaattttactagtctatttattattttaattaaaaataattttaaaaaatttaaatttgttaaaataatacctaaaaagtaaaagtgtactttagttttattacatttattcaactaaatgtaaataaataaccagttacaaataattaagtgtaacctacttaaataaaaaaaaaaaaaatagctagttcaatagattggtcgattcaattgaattagcactaatattgacaaatatactttgaatttaaaattcaaatctaacatatgaaataaacatagtttgaactatatttttaaaaattgtgttaaaaaaaaaagaactatattttaaaaaatggatataaattatattatataaataataaaaacatactaaaaagcacttaattagattggtcaagttagtttagattaattagataggttgactttattttcaacttgtttaatatatattgggcagattgtactttcttcttgtttttcggtttgtattttttattaattttttttagtttgattttagtgcgttattcgaattgaacagttttaccaaaaaaatatataaatatatatatactagttagaagttacgtgccgaggcacgtaaatattagttttatttagagtttagttcctcccagtcttctaagtgtgaatgtttttcctgtacc

SEQ ID NO: 35308 - DNA, 1396 bp, Cannabis sativa
tgcacttgcgtagtaattaataattttcgcaacagaagacgtcccccaggaatttcaagaattcccgaccaatgtccttcattagtcagaccccatttttatttaagatactctccatgacattatgcctattacgaatagtggcaacaatgaaaagaaagaacttagagcatttttccccatccttaatccaagaaacatgagatctctgttactagtatgtagctttctgcctcaaagcctcattaaaggcctttctcacttcaactttgttatacctgaaattcgcctgccatctcagtggaggacacgtgtcaagataaagggaatattgatcgatgcaaattgctttatatggaataactcattaattacgtgagtatcagagtatatttgtaacctgtagactgtaagatcttaggcgaggaatcaatatacaaactggtgcttagtatattagcgagaaaccatatgtcgctgaatgcaaatagctaggcatcaaggacagtacacataggaagacaaaagcgagatatataaatttcgaaagcccttagtgtacaaactaagtgtaacagtcgaatcagctcgagaccaagtaagcaaggtgccagtctcgctatggaaaggatccctgtaacttcatccaattaacattagtgagactcacaatcctcgcaagtcaagaagttaacatttagatgagcttcgaagaactctttgtaaataagaactgcgatcgacacaagacatgcatcatcgacctcggaaggaaaaaaagcccaagctcgctatgagatcactggatacaagcttctgtcgaggcatctccagatacaataattaaagacgtgttgaaaacacaatcatttttacccggtaaaagtagaaaaatcacagctatatgattttcaaatcataaccgcatttacactacgtgatatgtaatcaagtccgggattgattgttgtaaacatattacaatcaactttgtaattaactgtccactatgtaattataaatagtggcaagtaagataacagggggacgaaaaaaagctcatacgggagaggccctaaaaaacaatcagaactctgtgtaaaagcttagaaaaaccctcccttcttttgaagaaaaaccacctccttgatggctgaaaatttggaaaatgttaacaccccacatgaggaaactgatcatccttatgggaaagatcccatgggctccaaaagaactgccaacccacggtccatacggaccacctattccaggaggactcaacttgagggtggcccttgtaaacggaccacgcgttatcggagaacccaacctgacgttggtcctagtacccggacaacacgctcgaggagaactcagcgtgggagtggccagaacc

SEQ ID NO: 35309 - DNA, 939 bp, Cannabis sativa
gcttcctttctttacggccagaaccacctcttcttgctcgtgatgtaattttcgggcatacccttcccgggctttgcctgaatctctagctatgtgcgggcctccaataatgacttgcaaatgtccatctactgctggtggtagtaaatcttgattattatctgtctgagcagccctttgattttgatcggccttgacatatctttgcacgtgcgggttattctttcttatcaaaaattcaatttcccacttcaaattgttgcattcgttggtgtcatggccataatctccataaaaatggcaaaacttggtcatgtctctcttacttacgtcctttttcataggagtgggtttcttgtacagagctaatgactgagtagccatgtaaatagtctctaaatcttctgccaggacagagaaagtagtaaacttggcaggattttccctaggggcctgttcggttttgccagcgaactttccctttttcccattgccttatctattattgttgttagaccgtttaccgcccaagcttgaattgcttgggtactgagggagctggacggatgttccagcaaagggagcttttagctggccaggtttaagcttgacttctgctcgctgaatggcctcttcaagcttgatgaagccatttgtacgatcaaggaagtcactcatagaatctactggtccgtctcttttgatatccttccaaagctctccgagagctttgatgccccctagtattgcggttaattttccttcttcggttaaccgtgcaaccttcgttgcctccatcatgaatttattgatgtaagctcggagaggttctcttggcctttgcttcactttgaccaggtcttctaaatgcaacgggaattggcgggaagaagagaattgtgcatggaattccaaggagaaagccttccaagagttgaa

SEQ ID NO: 35310 - DNA, 1218 bp, Cannabis sativa
  modified_base (308)..(319): a, c, t, g, unknown or other
atttctcaatgtataaaaattagtgttaacattgttttaataattataatttatttatacaaaagaaaggataaatataattttggactatgtgttttgcaaaagttattaattggaccatctatttttttaaatgacaaaagtgaccttatatttttcaaaatggtaaaaatagaactctgagttcaatttttaacaattttattttttaatataaccaactttaaaacaatttataacacgaataaatacagaaaataaaatcagttttgtcataatatctctagatcatattattattaagtttnnnnnnnnnnnnaaatcagttcagggtcctatttgaacaattttaaaaaatacagggtccattttatttaacaaaataaaatgtctaattaataatttttgcaaaatacatggtccaaaataatatttacccagaaataatgtgtgtaaatttttcaatttttgtgtatatcatttataaatatttaaattacatattcatcttattttcaaaaatgatacattattataaaaaaatccaaaaactctttttataaatattttaagaaaaatttaacacttaatccatcattttaataaaattaacatgaagtcccttgacttaaaaacaattaaaaataaaccccaactaaaaatttcactttataattcgtcacaaactatgatcgatccttcaatcgataattacactgaatatcataaataaattaataaagaatcgaaatagaatatgcttttcaataaatcaaaacaattcatttttaattttgtcttaattaatttctcgatgccatcgtatataaattctactctttacgaaatggacaagaaaattagccaaaaaattaataataattatctaattttttttaatattaattaaattatcacaaggtaaaaatctttggtattaacccctaaaagaaactctaaacattactttgtaatatacgctatacacatctctataaaattattaattatttcattattacaattccgaatgccaaatgtactaaactcttattaagaaaagaatcaccactcctctttgctaccaaaatctccctagacactccaataatgggatcattcccttccccatcgctttccttgtccccctcatcatcaccggataactctttatcgggtaaaattagggtttatttagcctttcgatttagagaagca

SEQ ID NO: 35311 - DNA, 2360 bp, Cannabis sativa
aataaattatacagtcttattaaaacgattggtcattgatgaaacttaaagcaaaacgaaagagaagagaaaaagagaagaaaggaaagagaaagattagtgaagaaaagagaatctcattgaattacaataccagtcgagtatatatacaatgagcaaaacaacaaatagtataagaaagctaaccaactaacacacataacaactaacaaaaataacagaattagttataactaacaactaactttctgttctaacaccccttcaaactcacaattgaatgatcttcaattttgagtttggttctaaagtctaagaatctttaactggagatagctttagtcagcccatctgggagttggttgtatgctgaaacatgtttaatctgaatggttttgttcaaaactttctctctgacaaagtacaggtcaagttctatatgtttagttttagcatgtagcacagggttttgtgtaagcataattgtgcttagattatcacaccaaattattggaggtagcgtcattcgaatgtgcagctctgaaaatagataatgcaaccatgtgagttttgctgtgacatttgctacactcctatactcagcttcagtgctagaacgagagattgtttgttgtttcttacttttccaggcaactagattagatccaaagaagatggcaaagcctaaagtggatttcttgtcatctggatccgatgcccagtctgcatcacaataggcagtcagttcataagacaggggcttagttaggtgaaggccaaagtcagatgttccacttatgtacttgagaatcctttttacagcttgccagcatgttaacagaggtctttgcatgaattgacaaactttgttaacacaaaatgatagttcaggtctggtaattgtaaggtactgcagggcaccaacaattgacctgtatagttgaacatttggcataggatccccttggtgagctgacaatcaaaggccactggtcattggtctcagcaatcgattccctctgattgctgcaagaatctgctgcttccactggagaaagttgtgatcattgagacgaacagataggctgtggttgaataagactagatcatgattcatttgagcccagttgtcagcttgagctcctagtatgttgtttctgttgttgttcgctgcaggattggtattgttgtttccaagagtagtcatgttagttgagagcagagaaaagtactctgataccatgttaaactgattggccattgatgaagcttaaagctaaacgaaagagaagagagaaagattggagaagaaaggagaatctcattgaattacaataccagtcgagtatatatacaatgagcgaaacaacaagtagtaaaaaaaagctaaccaactaacacacttaacaactaacagaaataacagaattagttataactaataactaacttcctgttgtaacaagtcttattcagtccaattatgcatatcaaatggaccttaaatgtatacatgcatgtcttttatagtattgttattgggcatcaataattctcaacaccttttataggtggcgctccacgattagttagcgatatttcttaaaaattatttttttaagttatatgagacttaatacttaattacaccaatagtggtataatattgaaaagagtactaaacactaatgatacttgttagcaattcttggattgaaccatggacatctagctacttgggcctggatatgtttatacattattcaccggactcagactctggtaaaaataataaagtttgaatggttaatcgaatgcttttattatatatttatggaatagagtactaataatcctcaaaacatgtaatcattaactacaccaagttttgtaggtgtctaggtgagtatcatgtgacccaagaatgagtgaactatagttaaaaaagaacacaatatccgagacttcggaagtacattaatattgaaactaatgatgaaagtgttgggagtaaattagtttaaaaacaaaacaattcaccccatttaaagtttagactgatattaggataagaagctaactatttatttatttatttatttattattattattattcaaattagaaaaatacaaaaacaaaaacaaaaaagtggtttgtatttgtaaaaagtaatgatatataatttgcattatatggctcttgaggtatctttcatatcatcaatccctttgcattaacttttcattatttgtattttattaatttattattatttgaatttgtaaaaatgagagagaaaggttgtaagtaagaaagaaggcaggaaagtttggcctaaactttaccatgtgacttct

SEQ ID NO: 35312 - DNA, 3696 bp, Cannabis sativa
ggcatttttcaacttaccccctttctatatctattctatataaaatgtgtctatgcaacaaaattcttggtttaacgatattttttagatttctatgttaaacttaacagaatatcctattacttaacagaatattctttattaattttataatattattatatatattttaaaataaaaattatataaatattttatatacaaaattttaatttaaatttaaatacttaaaatattatagatatttttaatcattttaaaatttattggtttaaaactttaaaataaaaagaaaaattatatagatattttatataaagaaatttaaatttaaatttaaattattaaaaatatttttaaccatatttttaattttattattattatttattttatattttaaattaaaatagttgtaataaggaattaattgctttctattttagttatggtaaactgattcacataccatatttttcataaagtttgggaataaaaaacttttatatcaaatttacaaatctagcctatgtatagaaacacttaaatttggttatatgagttttggttaaagatacagtaaattgcaatatataattatcaaatacgttacctaattaagaaaatttagaaaatacgtatatatatatatataatcacattcaaatgacacaccaatgtagcaatagctaaataagatttcttaaagatcaaaatctcatactccatttcaaaaattaaaaaaaaaaattatacatgtattgcacttaacatcacttaattaaacttaattaaaaagaaaactaattatacgtgcattgcacgtaacatcaatttagtataaagatataaatatagatatctttgtcaataatatttttttttggttgaaaaaagccatatattgcaacaagagaataagaagttagtacaggttacaatatatcaagatttggaacaattccattccaaatgacctcactctcaagtcctaaagttgtcctagctaacttatgaggaataagattccaaaaaacatgctgaacagaaacattaggaaaattagagagagatgatacaatttgattaactaagtctgaaagtgaagacttatccttccacctatgtttaattttacttattaaaaccttacaatcacacttaacaatacacaaaggaaatctaactattgaacaccaattgagagctgtagccaacgcctttgcttcaaccgtaataggagataagttgccaatcaaaggagaagagattgctgccacaacctccccacttgaattcctaactgctgcaccatcccaattttatttctgctattatccactacaacatccacacttaatttaaaaaaacctgcagcaaaagactggctcactgaactctctaccctttggccttaaaactgaactggtgctgcactttgacccacacgaactgcattataatcttgagcttcatcaaagtcatgtaacaaagcatccacctgaaactcagcagtagtcaatatagtcttattcttattaaataaaatagtatttcgcctattccaattttcccagataatacataagaaaattcttaactcctccttagacaaagcatcaaaacccctaagaatgtactccatgatatcatgacatttattattttagtagaaagactcaaatatagaatcactccactcaaaagaagctctagaacactctataaaggcatgggaaacaaattctgcatttccagaataaagagaacaaagaggagatgttagaactttcctatggaaaaagataaagagctacagaaagattatgatagaaagccctccaaataaagtgttttattttctgagggatcttaaggttccagaggactttccaccaacgaaccaaagagtgattgtctgaagaagcaggaagagaagtagagaatttagctaaatgggaagcaaaattcacagtaaaggagccaaagggatgatgctcccaaataaaactatcctgaagagaaggatcaccaattggaacaacaagaataactaagactaactcatgatcaaaaaattccaacaaccgatccttactccaacaaccattatcatcaataaaataagacacagaaggatctaggggttgaacattacctttgtaagggatgaatctccaactaggaatccaataagagtgcacagtggagatagattgaccattgcctactctccacagaagacctctcttaagaaaattccttccccaaagcaaactttgccatgtaaaagaagcacaatgacctttagatgcattaagaaagaaattgtgtctaaaatacttagctttaaataacctggacacaagagaatctggcatcatgagaatacgccaggcttatttagcaagcaaagcttgattatgatgaataaaagaacgaaaacccaacccaccaaaaaattttgactgacacatgttttcccaatgtttccaatgactttttcttttatcacccaccgacccccaccaaaactgagtcataagactttcaaattttcttaatatttctctataatatttgtaactgaatgaataatggtttttcatagcaacattttttattattcttttttatcttttaactaaataatttaccttttactattttaactactctagtaagattgtcccgaagtgtaataaaagttttactttttgaacattttttttcgatcgacgagaagtgtgattaaacttgtctggcagtattggtggtcatgctactacctagtcacggaagaattaatatttaatatatacttatttactgtgaagggtgaagggttgaattgggttttgggaataggaagaaagaagaagaataaaaaaggacggaatgtgggggcgaccaccaccaccaccgggtcccctctcaccgcgcagaagggggctattcctacaaatacttataattaattgactactcccaccaccatccattctaggtcatttctctctttctaatttcatctttttatttttttaattgttcaatttcatgaaattttgttttactttctgtaagacctaaatcagaagttacattattttttaaaaaaaagtgttcgaaaacgactcccatattctttatttgctggtagattggtgtagcctatggtctatgattgcttttttttttttttctttataatatcaatatgttattgtgtggctgaagacaaacctttctgtagtcaaatgattatagatgtagaagaaaaagtgtttatttggctacattgttttggaatgtacagtattgaattctatatgtgtgtacgtgtatctacttggttctactttgtggctgttgttctgttcgaatggacctacttatgtttcaaatgggcaaagttgcatttttttttttcatgttcatgaattgtgtccactagcaaaacatggagacatgcttatgttacacttcactattatcacttttatttttatttttatttttctatatttgatccatgcaaaaattttgcctttttttttttggtttgactaagaaactgtagcaataacactataatagggatcaaaaactacatcaataacactgtaatagggttcaaaaactacagtagtaatagtataatttggataaaaaactatagcaattgctatatag

SEQ ID NO: 35313 - DNA, 1658 bp, Cannabis sativa
acccgcagtacatcggcggcaatcacgacagagttctcagaaatttctaaatcaggaagaggaggcaaaggtctgcaaacagattaaaatcatctgtcactacaagtatagaataactcatcaccatcctggaaacttctgaagtttcctaagcttctaaactaattacattttgtaattatgtcttcttataaatgatgattcccatcatctaaatctcaaaataaatcatcaccccatcttgaaaactttaacttcacaccacgtaaattgacgaatgtcattttaaaagacatgtattcaataatcaatacgagtagcttcttatttcttcaaacagaacgaagattcccgtaacttattacacgaatctagtagagccataactcatctctgttaaatccaccttttttttcagaaaccacgcaaaagggaaactcatttcttaatctgcattggttcttatataacttgaatgcactctgatttcgcttagaacttctagttatagcaagctcaattaacattcactcagccatctctatttttcagtctttcaatttaaattggataaatagataaattattcgtcaataaatggtttctcagttgaaggaaattactcaaagaaaaattcccataaccaaaaccactacaaatcagacaagacaagagataaccaactgaaaatggaatcaaggtgaaaacacttaacaaatacctgttgagaagagatgcagattttgcccagaagaagagaatgacgacaagtaacaatagaacattagccacaaaagataacgggttgtagcctgctcgttcaaataggaaccataacgccgttgatgaaagtagtactgcaactcctacgctccatttcttccatagcagcacatcagaaactaaccccaaaaaagaaagaaaaatgaaaattcagaggagtagacaaatagtacaatcaagttccaatatcaagcgcgatatgtaacataaatatgcgtaaattaaattcaaaattgaacataaatgtaaagtaattagttatcaactgtcattggatgccaaatagattttctctgcagtttaattaaatgaaaatagattgatttgaaattgaggtcaatgacgaagaagcgtatataatatcaaacagaagatatataaatatgaaaaaggaaagagtaccatatccaccgccgagagcttggtgaacggaaatgcgacgaggaggcatagaatctgccatggcgattagggttttcagaatgggaaaagtgagaaacagagggcagatcacaatttggcagagaaattatattgttcaaaattcgtactttagtttcaaaatctcaacaaataaatgataacattttcagatttgtcaaatgtttcgaattggaattttttgcttaacaattggaaaggtatactttgttggacgtaagtttatttttattattttttttctttttcaaaacaaatgttagaaaaatgtagattaaatattatttcgataccatttcaaaaaaaaaaaaaaattatttggatagtatttatgtatttatttattggctaattagcaattttttccttcgaactttgacatatactaaattatgcctcctaaacttttttggccgttaaaaattccctttgaa

SEQ ID NO: 35314 - DNA, 1510 bp, Cannabis sativa
cttcctgggcaataataatgttatccgaaatgagtctacccgggagaaacgcactttgattgggggagatcaaagaattaaggacagattttagccgattagccagcgtcttggagataactttgtagatgacgttgcagagactgatcggcctgaaatcggacagggaggagggtcgtttgaccttggggataagggtgatgagggttgcgttcaaaggggtgatgtccccattcccattaagaaagcttgtagctgctttgaggacgtcgtgcctgacagaggtccagttggatttgtagaaattagaattgaagccgtcaggaccaggagctttatctgaaggaagttggaaaaaagctttctcaatttcgtccaaggaaaactcctcagcaaggaaagatttgtccatctcggagagggagattgtgatgccttgaagaacttgatggaaatcctcctcggaggggtttgtggacgagaagagttggttaaaatgggattccatttcgcgggagatgccttcatcatcagagacaatacctccattagcaaggtggagtttgttgattttattgattttctttctgtgggaggcatgacggtgaaagaatttggtgttcttatcaccctgggctaaccactgggtcctagctctctgcttccaataggtttcttctttgtacagaagagagtcaagcctggattggagctcctttattttcctgatggtattgtcatcccaaacggaagcagatcgggcaaattccaagtctctctctagcctggtgatgtgctttttaaaattgaaatcctttttatggttccaattgttaagcatctcagcacaagaggcttgagtcgagacaagcttgaggatggggtcatgctggttcgggtgactagtccaagatcggtcaagaacttgattccaatttggatccttgagccagacgttctcgaagtgaaaacgtttgtttttgttattaaggcaagtgcccggaggattagaagtgttgagttcaagggcacggtggtcagagccgaagaatcccaaatgggcaagggtggcatcagggaaggtatctacccagtggttgttgacaatgccccagtcaagacgctcttgaatgttttttggggatgcaacattattattccacgtgagtaagggtccagaaggatcgagaggggagagattaaaagagtcaaggaaatgtctgaaatccgaggaagggcctctatcgggattgcccccttgtttatcgtatgaaaagagaaaagcattaaaatccccaataataagccacgggtctcgaggattacccctaccaatacggttaagaatattccacgtatgagacttgagagaatcaaccggggagccataaaaacaagtaagatgaaaagagacattggtaattgaacacgagacatagcaatcaaaatgactgatagattgagatagcaaagtgacaattacatcattagtccaaaataaaagcaagcc

SEQ ID NO: 35315 - DNA, 1658 bp, Cannabis sativa
ctgctgcaaacgcttacagtttttatattttcgtatatacaactgacatttgtaaaaactcggtttttcaattatgtatgctgttgtgcatatcatgtagatagaaataacaagttaattatatattctttagccaaaaagaaaattataagttatctaaagagatgacaaaagggattttgtacaaatgaaaaccaaaaagcaataacagaaattaaggacataaacgtgcctttagaacagctgtacattaaacaatgtattagtgtgagtaaaatgttgtgtattagtcatgaggttaccatttcttaacaccacccctcaggtaaaaggggatgttgtcacactgagcttgtcatctaaaaattggaaccgagaatgagataggacctttgtaaagaaatttactatttgttcgcaagatatatatcaaatgcctaaatgtctgtcttcttctacagtactgtgctggaaaaagtgacatttcttgtagttgtctttcatgaacaaagtgaatgttcaactttctgtggttggtacgagcaatatagattgggttggaagcaaagagcacttgtactggtgttatcacaccagattacgggtaatgaagcaagagtaaactacacttcatgaagcagaggttcgagccatataatttcagaagaaacttgagtaagagctcaatattcttactcagtgctagatcgagacacaactatttgttctttcactaccatgacatgagtgtttcaccaaagtagacacaataacctcttatttattttcgatcacctgggcagcatgcttagtcatcatctgatcagtatccaacaagactcaaattttcactttgtttagtatgcatactatgatgaaatgtacctttgaggtatctcggacatttgagaaactgacttagcctattcactacaaactctatgtcaggccttgtatgtgtgaggtattgcattgcccttataatgcttcgataggtggttggtttgttcagaacttgacaattgttaagtgacaatggtttttcaacagtcataggtgtgggaaaaggcttcgaattcagcatattcatcttcttaagcaattgtgtaatatacttccattgactaagatacattcaagttgtttctttatatacctcaattccaagaaagtaattaagatctctacaatctttgagagaaaaaaatcttggtcactttttcaatgaacttcttcagttctattgagttgctccttgtaattataatatcatctacatagatgagagccagaacaacattttgtggagttttcaacatatagaatgaagtgtcggcctttaaattctcaaagttccaggtgatcaaagtgctcttaagtttctcaaataggcccttagaggctgctttagtccgtaaagagatttctctagattgcgaacataatctgttctgtccttaattgttcacaaagctctacggttgcaccatatacacaatcttttctaactttccatttagaaaagcattatcgatgtcaagttatatcactatccaccctttagaagctgttacagatagcactacccgaattgttgaagatttgatgacaggactaaaggtctccctaaaatttaggcattgtctttgatggatccc

SEQ ID NO: 35316 - DNA, 1378 bp, Cannabis sativa
  modified_base (338)..(341): a, c, t, g, unknown or other
  modified_base (390)..(391): a, c, t, g, unknown or other
taatgccaattaattactaacctaaacctagcagttctataaatagaaagtgaaggctcacaccaaactaagcagttaagcaattgttcaacaattctggaaactgcctcttttttagaaagttgagcctttcctttttctctcaatagccgaaccctatatctcttgtcttgctcttccaatttcgagaaccctagtgaaaagagtagtgcccacacacaacaaacagtacctcaatcatagtttggaagattgtgaaggatctaaatccaagagaaggatattcgaactcagaacctgataatactctgcaacagaaacgatacaagggttagagnnnngagtggaaggagacatattattcaattgcacccaatgtaaggtttctcnnactttatatgtgtttatttattatcgttttagaaagttcatctttgagatgttaatcaacatacttgtgagtagatctaagatcttggttaaaataaattccaacaggcctgtcctttaattactgttcggggttgaaagattatctcatattgacccaattccactgtccattttagtaaccgtccagatgcattaggtttttgtaatacttggcgtagtggttggtcagtgtaaaacaggatgagcctggaagttgggccttaacttccttgttgctaagattaggcagtaagtaagcttttctatcaatgggtatcgtccttcagcttcaacaactcttttgttgatataatagactggatgatgtacgttgttttcttctctgatcagcacaacactcacaacatattctgtaatagctaagtatattcctaattcttctccctctagatgttttgagagtacaagagattttgcgagttgcctttttagttcttgaaaggcattcttgcattcctccatccattcaaatttcttgttagcccaaaggatgttgaagaaagaaacacacttatctattgactttgaaacaaatctactgagtgcggctatccgaccaattaagctttggacttcttttgtttttgttggcgatttcatatccagaaggcttgaattttctctacattggtttcgataccttaggcattaacaataaaaccaagaaacttacccgagctgactccaaatgagcactttaagggattgagtttcatgttgtattttctgaggattttgaagcattcatccaggtcatctatatgcccccagccttcttggatttgacgagcatgtcatccacgtatacttccatgtttcgtccaatctggtctttagacatttaattcaccaacctttggtaggtagctgcagcattctttagaccaaatagcataactttgtaacagtacagatccatatatat

SEQ ID NO: 35317 - DNA, 956 bp, Cannabis sativa
agaataataagaataccattttttatgatttatatataattttacgacctaaagtttttgtttacaaaatattcttgtaaaattttaaaattacaaaggtacacttttctcagcaaacaataagaaacaactaaaacataacgagaatcaatcttacgataactataaatcaactataaacatataaaataattaaaagcaacctcatgacaactataatacaactataaatatactatataacaaccgaaagaacgatttattgttttatactgaataagtatttttgtaaattaaaatattcaaagcataaaaataaaaaatttctgtattaatatatttataatttttttcaaatctttggttgtaaatttttcataacaaaaatttattttaataaatttttaaaaacataagatagtaggaaatcaacttaaattaatacgatactttaatacttttttttatctagaagagaaacttcattaattactagcaaaaaatcaaaacaatacaagcaaaggcacagtaaaaatagttgcccaacaaaaaactaaagattatattttaattttacaagaaaatttctttcatctaagaataacttcatattatttacatggtagaatctgtaaacaacaacctgttttatttttttaactatagcaacaatattttttgatcagccttcaaaaagacatttgttacggttagaccaaatgtaataaacacaagctgccagtgtagctattataacaacaacaatcattcctgatgtcctgctagccagccaagtgatccaactcccatagtcccttggccaggaagaaaaacccagcgataaaaagatctcatctgtaactttcgtagataagctacactcaaaaaataagtgggtatgactctcatcaaagagcccacaaacaactaacagaagagtctccaagggaatacta

SEQ ID NO: 35318 - DNA, 1143 bp, Cannabis sativa
ggcataaaacccaacaacatcttgtaaggagccatccctgtagtactctggtaactgctgctgtacgaaaactctatcaaatgcaaggacttgctggaggagccctcgaaatccaacacataggctcgcaacatgtcttccagtatctgaattttcctttcgaactatctatcagtctgaggatggaaagttatactgaatttcaatttggtacccatagcctgctgaagactctgccagaattttgaagtaatcttcgggtctctatcagatataatggactttggagcaccatgtaacctcactatctctttcacgtacaaatctgcataatgatccactgtaaaggttgtttttacaggtataaaatgtgcagactttgtgaattggtctaccacaacccaaatcgaatcatataatctcgtgcttctaggtaacccaaccacaaagtccatagtgacatcctctcacttccactcaggaagtgtcagtggctgtaataaccctgtcgatctctgatgtttagccttgacctgttgacaagttaagcactgggatacaaattccaccacatctttctttatcccgcaccaccagtagtagggtttaagatcttgatacatcttggtagtgccaggatgcagtgaatatggaatggtatgagcttcctcgagaatctcactcctaatttttgcactaattggaacacaaatcctggtcttatacaacaacattctgtcatctgacaccgtaaaatctttagcttaactagctaaaaccctttccagatcttcactaattctggaacagttaactgagcagctttaattcgttctaacatatcagagtgcaacgtcaaattatgaagtttgcctacaacaaactcaatgcctgatctgaccatgccatctgctaactgtggtgaaatctttagcatactagttacctgccgaggacccttcctacttagggcatcaatccttacattggccttccaaggatggtaagggatttcacagtcgtaatccttaaccaacttcaaccagcttctctacctcatatttaaatctttctgggtaaagaagtatttaaggctctatgtagagataatgctgccaaatattcaaagcaaacactaccgcg

SEQ ID NO: 35319 - DNA, 1455 bp, Cannabis sativa
cataataaagtattggaatgtcattccaatagaatggtctttctaccattttggtggaatgactattctattttgaatggaaagaaagaccattccgatgcttgatgagaaaaaaattaataattttttatgcattttaaattttattccattccactcctatttttatttccatccccattcatattcctatgttttcattcctcccaaccaaacaccaccttagttattttgtgtatttatttgcatgatgttttgttctattttagtacttgttaatgttgttgttttagttattttaatcttttatttgtgttacacttgtaacgatgatatttttatagagtattaaacttaaataaatggtgatatttcgattttacatatttttctttattttttatgttaatattaaaaattaagtgtgtaattggacatgtaatttaaaaatcgaagattagattggattgcattttaaggtatacttggatttaatcggatgaagattttccaaatccaattattaattggattggattagatgagaataaaaatattgaattggatcgaatatccaactcggcctagttggaaagtttagatgtcaaaaactcaaaaatgtgtattatgcccctcaaaattgtgccaaatacttattgattttaaaggtctagaaaattgaaacaaaaaaccttttgaaattattctaaaaaaagtcccacaaaaagattagtgtgttcataacatgacaatcttaacccaactataaattactaatgtagtgatttttgcatcattattatattagaaaaaattacttcatggttccggctcacattttactaataattacataatttgcgatcatattatagatatatttattcatcaatatactgtacatttaaatattagccaactagaagagtttatgagctgatatatgctctttacgaaaaggacaaatgataaatgacaagagttttctctctaaggcaggacagaataatctcttggtttgccccatgggccaaccatatcacaaggtttaaacaagttttactctgaaactcacttaattgagatgactctaatggcatgaggagcaagctttttctagtatattagatcagatcacttcatgaattgaagggccatattctctcttaagcacatggaataaccggcggtggctatagagttgtatccatggcataacaaccaagtacccgaagaaaagttgtaagttcctgctagtaaataacaaatttggtttacataactcccaataattagctaagagtatattatattctaaagaataatattgtgaaaataagaggggagaagaaaacctgcaactgctctaaagcactttgtgcacgtggttctgccatagatgcctcaaaatcaatatagaaaaggtaatcaaagtacctacaaccaaataaatgt

SEQ ID NO: 35320 - DNA, 1482 bp, Cannabis sativa
  modified_base (375)..(383): a, c, t, g, unknown or other
  modified_base (641)..(647): a, c, t, g, unknown or other
  modified_base (1205)..(1231): a, c, t, g, unknown or other
gaaacaatgaagagatttataaaagaagaataattttgactctcgcgtaccgggacatcgttgaattcttattttaaatcgaaattatccttcattagtttcctcttagctttttcacttcgaatttgcttaaatagttatatcattggatgaatggtttataaatcatctgcttatgatgtcactctaatttctcttataaaattgaatggcgcagatgactatattcgcaatattgtatccgaaaatgatataaattcttgatcttagaaatctcctacttgtatatgcttactataggcaacttaaacttgagttagattagtagtggtggtcaaagctagaataaaaactcattgtatatttggtataaannnnnnnnnttgactttaaattttagattctaaatataaatttttaatttcagtttcctagaatacattggacaatatagtatgactttcacaagttattaatatccattttctgtcaatggatccaaactgtatgtttatatatgaaatatgagcttagtattttgtgaccaggatccactcggactattctcagaactctttatagtaactaaacctaagtcatcaaaagaccaaaaccgtattcttatatatctatggcatttnnnnnnngttcatagtggttttgacaagatgtttctctgcaaaaagaaaacatgcctatatccactgtaaaataagatcatctatattcaaatatagatgtacattcaggggtagataagtttttcgttatattcttaagacaatcactctagataccttgtgcaaagaaatttgaaatgtttgagaaatttcatgaatttctagcaatgttgaaaaacattaaggtaagtggttaaacatcttgcgaattgataggggtggagaaatatttggatatgcagttcaaaaattattaagtttatttttttcgaattgcatccaaacttacctctctaaaaaattcaatttgcatgttgattatagtgaaaggtctatgattagttactagcagttgcttgagtccttctaggaaataccttaatgataggaaaattttagaatgatggaattgttgtgtacttagtgtaaaccattactagattcatggatgtcctgattgtgaccttaagaaaagctagaattgttaactaagatttacatatttgatagctattctaagtgatnnnnnnnnnnnnnnnnnnnnnnnnnnnagataagaaagtgtttgttttaataaatactaattttctaagaaaatgactaagtttgaaaagcaaagtagcaaagtagaggagatattttttcttgattccaaagtgttctatcatcttattctatataagatggtcccaccgcctctgttgtcttgacacaaccgacgaggacaatgccatttaggttcttagagaaaaagtcgcagttcttgctgtagtgggagggtttcaaggaactcaccctgtta

SEQ ID NO: 35321 - DNA, 1850 bp, Cannabis sativa
tgttttaccatcattggctggagtagctgcagcttcaacccatttcgaaacataatccatagcgaataagatgtataaattgctaaaagaagaaggaaaaggacccatgaaatctatccgccaaacatcaaacaattccacttccaggattcgtgttaaaggtatttcatttctcgtagagatatttcctgttcgctgacaacgatcacatgcctttacaaaatcacaagcatccttgaaaagaggaggccaaaagaatccgctttgcagcacctttgcagcagttcttgagccactgaaatgtccccctcatggtaaagcatgacagtggtttagaatagaatatacatctcctcctcaggcacacatctcctaattatctcatcagcatagtgtttgtagagaattggctcttcccaatagtaatgctttacctcagaaaagaatttcttcaattgttgatgagacaactcagaaggagttatattggcagccaagaagttgacatagtcagcataccatggtaccatcaagttttccctcaacctaaagagttgttcatcaagaaattcttcatttatttgtacctcttttgcattctgggtttcttctaattccagtcttgacagatgatctgctactagattttcagtccccttcttatcctttatctctatgtcaaattcttggagtagaagtacccaccgaatcagcctgggttttgcatccttcttggtcataaggtacttgattgttgagtggactgtgtaaactatcaccttatttccaattagatagggccggaacttatcacatgcaaacacaattgccagcatctctttttccatcgtggcataatttagttgagcatcattcagggttctactagcgtagtagattgtatggaacaccctgtcaacccgttgacctaagaccactccgattgcctagtcacttgcagcacacatcaactcgaagggaaactcccaatttggtgaagtgactattggtgctaaaatcaacttctccttaagaatttggaatgcctttaaacattcttccccaaactcgaaggaaacccctttaacaagtagattggacaacagttttgagatctttgagaagtccttaataaatcttcggtaaaaaccagcatgacccaagaaactccttactcccttcacagacactggagggggtaaattctctattttgacaccttggctttatccacctcaatacctgcctttgagatcttgtgcctcaaaactgccccttctgttaccataatgtgacacttctcccagtttaggaccaagttcgactcttcacatctgattaacaccttctccaaattctctaggcaatgatcgaatgaagaaccaaagactgagaaatcatccataaagatctctatgcaggattctattaggtctgaaaagatagccatcataaacctctgaaatgttgtaggtgctttacatagtccaaaggccattctcctaaaagcaaaagtaccacaaggacatgtaaaagtagtcttctcttgatcctcaggtgctatggctatttgatggtacccaaaatagccatctaagaagcagtagtactttcgcccagccaaccggtctaacatctgatcaataaaaggcaagggaaaagggtccttccttgttgccttgttgagcttcctgtagttgatacagatcctctgaccagtaactgttcttgtgggactcaattcgttcttctgatttttgattactgtcatcccccctttctttggtactacttgcaccggactaacccatttactatctgaaattgggtaggccactccagcatctaac

SEQ ID NO: 35322 - DNA, 2239 bp, Cannabis sativa
  modified_base (26)..(28): a, c, t, g, unknown or other
  modified_base (55)..(57): a, c, t, g, unknown or other
  modified_base (84)..(86): a, c, t, g, unknown or other
  modified_base (218)..(222): a, c, t, g, unknown or other
  modified_base (537)..(538): a, c, t, g, unknown or other
  modified_base (1348)..(1355): a, c, t, g, unknown or other
  modified_base (1609)..(1628): a, c, t, g, unknown or other
  modified_base (1732)..(1733): a, c, t, g, unknown or other
ttacgcccagtacgtcgccaggaaannngcccagtacgtcgccaggaaaatcgcnnncagtacgtcgccaggaaaatcgcatcnnntaatcaggtgagcccgtacctacactcggtactcatcatatatcactaacgcccgtacttacatccagtacatcgccaagaaatcacatcacctaaaaaggtgagcttgtacctacgctcagtactcatcannnnncactgacgcccgtacttacgcccagtacgttgctaggaaatcgcatcacctaaacaggtgagcccatatatcacatgcataatatcatcacattatcgaaactcaactaatcaatcttttcattatataacaatattaactatatctcaatgttaatcaattcattgcaatactaattgtattccatataacgtagtatgccgtacaatatatttttcttacctttaatccaggttcatatatttcggccaacccaagtggagaactatcctcgatgatctcagccctatgtcacaacaacgataaaccaataanngtttatcccaaaacactacttatactcacataagacaatctaggattttctaccaaatcatgtggtataaacacactaaaataccacttatattttggctctaaaacatacaccatattgtagagctcgtcgcaagttttgaaacggtatatagaatgtccaacacggacactcgtatcaaaagttatgacaaaaatacaatttctgatctcttaggaatttctaaaaactataaaactcaaaaatcccaatttttgcactcaccgaaacactaccaaaacttatccaaatcagtccaaacttcacagggcgcatatataccataaatattaccatcctcacgtaacataaataaaaatcgaccccttatatgaaaaacgccattaatgttcgaactaagctttaaaaagttcaaaactcgatttctaactcaaaatcaattcaacaagtaaacatcagaactagtcacatgactacccaagaataatcctataaggtcagaaccttcataactattctaatttataaaacccttatacgaaactaattgttttcaaacttaaaacgaaattaaaccataccttaagcttttctttttcaaagattttctatcctgctactaccggagcttagatcgataggtttcggattgaaaatcaaagaaaaatagatataaggggagaatgttttatcgaaggagggagaaggagaatttcgttcgatcattctttctgtttcactgttataacttaatatatatataaacttaaacgttaacttttatatatataaaaataatattataataannnnnnnntaataataataataatattataacaatataatattaataacaactttattattaatagttatcttattatttcttaaccattaataaacttttactttaaaggtatttggccaattctaagtaccccaaaatacccgagtatttttaaaattaacttatcccaataatcccatcaatatttctaactaaaaccgttgtggcatttttggcctccaatcaggtttccagagttgtcgaacctgaaaatatttttnnnnnnnnnnnnnnnnnnnntatatccacgtatttcaaataaatgtccgtaattaacaaattacgcttatttactcacttataacaaaatttaaattttttgctgaaataaattagtaggatcnnaatcccacttattacctgattaacccataatattaatataaaccctaattatttaccattaggcttatcgggatattacaaaatctatcattgaaagttctaaactccattagtttgtctaaataatagtgttgcttagtgcaactagaagattattaagacttataaagattcagatgctgattttgaatttgttcacgtcaaggaataattactattgtcaccaaaaggtaacacatatattgtaacccaatagtagagattttcaatccccaaaatgaataaaattgtttataagttttggaaatagagaagtttgatgctggacacaaactacaagatctatttacaaagataaagacatatactacactctatttttacatcaagcttataagatttagagagatgcacttttgttttatgttcgtgcaagtgggagtatgttgagattttatgccctaaataaaactcatctcatggtaatcttattaactattaaagaa

SEQ ID NO: 35323 - DNA, 1666 bp, Cannabis sativa
gaaaaaatacattcagtacgaaagttttaatattttacagttttttagattttatttacataatacgatatttggtatatttttatgttgtaattttatcatttttttattgatttttttgttatttgtacattatttttatattgttgtcttgtatttttataaaataccataaattataaaataccataaaaatatatatataaaataccataaaaatatatatataaaataccataaaaatatatatataaataccataaaaatatatatatataaaaaaaaaaaaaaaaaccttgaacgtaaaaataaaaaaaaaaattacaaaaattagtgttttatataattctcccttgaaatagagaatcatgtgtagttttcgaaacaaagattctataagaattataaaaatacggttgtacagaattttaaatatttttttttatgatttttaaaattttattcacataaaatatagtcttttgatattttcatattatttttatattgtattttttgttattttattattatttttctattggttttttgtttttcatttgtatattattttgatgttgtttttatgttatttttacataattttcttattattttcgtgaattaaagtgttaaatttttaccaaaaatagtgttttatttaaagttttcaagaattaaactaaactaaaacacaagaatttaaaattgcatatacattatttaagtgaaattacacattttatgggctcttatatgatttgtgcaaaaatatgctctctttaaaaaatatatatattattggaaaattttttaaaaaataataaaaataatataaaataattggttactctttggttaacctaagagtaactaaattgttttcatatattttttattttgaattctataaagtaattttttcaaaaaaaaaatcatatttttgtaaactttattaaaaaaaacaccataaaaataaaaattcaccttaattactataacatcactcaaaaatgatttagcaataaatctaaaaagttagagacattaatttgtgaaaagctaaacttagtggtgtgaaacaaaaggatgattatatatcattgatgaagacttattaaagactcattttcaacaagtagtccaataatggtacaactaataccttatccataaatattccaaactccaaaataatagggtttcactactatattagtgtctactattattgcaagaaatactagacaacaacaacaacaaagtagaaaaccacatcaattgaatccatttccaatattgtcacttccaattgtcccatttcatttcataatccaaaccctaccaaaagttagaaaacaaaaactcttatcataacaccaataaatcacaaaatcatatacctaaacccattcatctttgtaaacaaggcacaaggcatagcaaaatatgaggatggaagatcgatcttgaaatttaataggtcataagaaaaaaaaaaattggaacccttatatataataaaaaaaaagtgtaattttaaaaggataaaaaaaaatattaggctcttggattaagtgggtcataggcacaagcctagctcgcttatatccaaggtcgagcctaatagaatcaactcaaattttgtttctttatttgtagagtt

SEQ ID NO: 35324 - DNA, 1909 bp, Cannabis sativa
gaggtgaagggcgaatgaactcctccggaccagcaaggttggaggtgaacagtgactttgcatttaatgcagtatagggaaaacatttgagaatacccataagaggatgtgtcagacttcataaacccgactttgggcgattacacgataatcaagagagctagtgacggctccattatgaagaatcacatcaatcaagaagggatgaaggttaatctcacctaaacccttggcagcctactacgtaggttatgcatgccctattttgtatcttttgggaatttgtgtgtgcccatagataagcacttgaagacaagtaaacccttttcttcttgccaccaatcgctataaaaaccccttaataaaaattagtgaggggatcagaaaagagtgagacaaaaaatattctctgtaagaaatactcacttattagtaacaaagactcgtggactacgactccttaatgctcgatccacgtaaaaatatctgcattaattatccctaagcgctcattattacattagatatttggttaccgaaaacctctgtcaacgttttggtgctttcattgagagttgtgggaagcattgtccaaagaacgacaacagaagatctagagtacaatggtggagactcaaaaccatacctgtcagcctcgtccctcccaagatcctcagagcccaggggacgaagaagcagcttcacaagtaaacatggactctgaagagcgtgacaaaacaaatgatgaggagtacgaagaaaacccagaagggtatgatgcttatgacgatggcaattataccaaactactggccctaaggcaaaatgcagttgatcacgaggccgaactgaccgcgcaaaaggaacaaaataagaggatgtaagaaataatagttgtcgtccaaaaggctatggaaacggctggaatccacgttcatcccaaggtcatacctccgagatcagaagaaacataggaagagtcctcaccaagtacccaaaagcctaaaaataaggaaccgagccccatattgtatccatttgaaggaatccctaagagaaatcctacatcgttccccggaaagaataattaaaaaagctcaagatccgtgaaaagtccgctctgatttctcgaaagggaaaggttagcagaggggcagactccttcgagagagcactagccttcaggaccgagaggaacgaaaaagcatatcagtgcatcaggaacctgaggaaagagttagaaaaagtcgcaagcatccccctaccgacttaagacagaagcttaatgataagcatggtgaccttaggaagcacttggagaaaaagaagcaagcaatacctatgtcggagggtgccctaaatgaaggaatttttgtcgaattggcaatcctcaacaaagacatcgctagggtctcgcgaaggcaaaagggagatgactcgaagtccaactgtgaggaccggaagtcctgcgccaggaatatcctagaggtagaactccccaaaaatttcaaaatacccgaaatggaaatatacataggagataaggatcccagtgattatctatctcgattcaacatagtaatgactgtcatgagagtcagtattgatgcaaagtatttatgtttcttgttaacattaggtagatccgccaaggaatggttcaagaagttagttaccagatccgtagactgttggaacaagctacaagtcagcttttgacgacattttgtggcggcaagaaagattaacctcgaggtaagtgccctaaccaacataaaataactaccaacagagaccctgaagaatttcataaagaggttcaaagaggaagctttaaaaaccaaaaaggtcgatgatggacaacaattggctttactccaagccagaatccagaccgggattcctttct

SEQ ID NO: 35325 - DNA, 1578 bp, Cannabis sativa
  modified_base (1408)..(1432): a, c, t, g, unknown or other
attgttgggcggcttctgagagtgtggcaggaaaaactctgcaacacacatctcctcgtactccttgtaagttcatttgcatgtcaaaatatttgagatgtgataaggaatcttctttcccggtatacatcttccaggttggcatcttgaatttgtggggtagcttcagaacattgatctctggagtaaaaggggatccacgcacgtcctcgatccaactcgagatcattgtgcttttgaacagccagaccttgaaacatgtttttcagctcatccaattgtgcctgcacggatgcatgaacttgttcagcctcttggccgacaactgctatgtcatgatctctttgagctagatcttgagcgtgggtcccggactgagtggctgctggaacatattgttcatcaaaccctctccttctgttcagatcatctcttagatcatgagctgttccctgtctattaaatacagatgcaccaggttgtctcagtgactggttggtttggtcgagcacttggccagaaccactagtctaggcggagttattggggataacccatcctgacaaattactagacaaggtctggcagcctaccgcttggcccacaggcaaaacctgtgactggggattggacggctgaccgttcagagtttaggaagcgttcccagctggatcttcgtctgatccgcccaacgggatgctggacgtgggtttctgattagtaacttagtaggctcttcgtatcagtacagtggcctatcttgttcggtcgtcgatggtagcttgttgagctctcaacgtttcgatctctttatccctcaattcggtgaactgatccctttgctcttcaaacgcaaggttcactccagcacggagctctttttgatcatgatgcagtgtgttagtatggccttgcatgagcccaagagcgttacggagattctggatctcagtgtcatctacaatagttttccaaacattttttgctgaaggaaccctagtactgggagtacttagatcagctgacgaactggtatttccagtctcttgcacaccaggtgcggttccagtcaaaggagacgtcactccatgactcacggttggtggttgcgtgattggttgttaaggatttgtggctggtgggacccttgcataccctaaagtctgcagtgcgggatccattgtcggtggatctacctgatcgaccacgcctctacgagtttgtaccaccatcgtgtttatgattaaatttgaagtaaagagcaaatttatgatccttgctctcaatgaaagcaccaaaatgttgttaaaaatttagggttgttaaaaacaaccttaaatatcttttcaaaattcaaaattaaactaattttaaagtatctacttttatttaaattattttatcaaannnnnnnnnnnnnnnnnnnnnnnnnatgatttgaaaataaccaaatagatattttcaatatcactttccaattttataatttaatataattaaaataataacataaactaattttaaaatagatatggttaggaaattattattttaggaataaaataataaacaaataat

SEQ ID NO: 35326 - DNA, 2209 bp, Cannabis sativa
  modified_base (43)..(64): a, c, t, g, unknown or other
tttctccttgttcttgagttaatacaaataatgaggattaggnnnnnnnnnnnnnnnnnnnnnntgaacctctataaaattcttgcgtctttacgttgctttaccatatttcaatctttataaactacttgtcgattactaaattagactcactgtcgttgtcttaaatcgaggtcaacattttggtgctttcattgagagcaaagtcaagaatcgctcttcattttaaatttaatcacaagtacgatggtggtacagactcgtaggggcatggttgatctggcaaatccacaggcggtggatcctgcattacagaacccaggaaacacaagggttctgctagctgtaaatcccgaggaacagtcaaacgcaggtcatggtgtgacgactcctgtggatgaaatcgtgcttggtgtgcaagagactgggaataccagttcagcacccagccagggcattcataacacagctgttccgcctgctaccaacgttcgaatgaccattggagatgatactgagatctaaaacctccgtgctgctcttggactcatgctagtaataccaacaccctacatcatgatgaggaggaactccgcgctgcggtaaatcttgaattcgaagagaaaaggtgcttgtttgccgaatggagggataaagagatggaagcgttaagggcccatcatgcaaaattgacaatcgtagtcgacaagctacaatgctgatatggaaggcctatcaatttgtcgggcagcaacccccgaatgtcatccccctgggtgaaacagacgaagatccagtgatgaatacttctcagactataaatggtcagccgccaaatctcctctcacaggctccacctatgggccaagcagtaggcgggcaaaccttgtctagtaattcatcggaagaagtcgtacctaattccaaccaggttaatggtgtcggtcagcatgttaaccaaaccaatcaatcactgagataatcaggcgtatctgtatttgaaagtttgataatgactcatgatctcagaaacaatctgaatagaatgagaggagcagacgatcagcttggcacactgatcgtgcagctcggaacctgtgctcaaattactgctcagaaagatattaacgtgactccaatcggtcaaaatgccaaacaggttagtgcagctgtgcaagcacaatgggatgaactaaaaaatatgttccaaggcatggccggacagagaaacaatgatctcgagtcagaccgagcacgtggaacccctttctctcccgctctcccgagattaatctcttaatctcttggtcttggcatttggcattgccccacaagtttaaaatgccaaccttgaagatgtacactggaagagaagatcctctttaccacctcaagtattttaagatgcacatggatctgcagggggtacgaagagatgtatgttgcagaatttgtcctaccaccctctcggatgccgcccagcaatggtatttcaagctggcccctggaaagttcaactcatggaaagctttctcctcggaatttcatgcaaaattctcctcctttcatcaacttccgttgcatctaggagacctagtagaagtcaagcaaagaccaggtgagcctctccgagcatacatcagcagattcatgacggaagcgatgaaggtttcacgggtaactgaagatggaaatttgtctgcgatactggggggcattgaagtcctcggtgaactttaaaaggaaataaggaagaacggtccggtagacttaatgagtgattttctagaccgcgctgaaggcttcatcaaacttgaagaggccattcagcgggcagaaggcgagcaaaagcctggcaagtcaaaagctccttccactggaacgtccgccgaactcccccattacccaaataattcaaggtcaaacagtaaacgttctaacaacaacaatagacaagtgaatggaaagaaaggaaagttcactggaaaaaccgagcaagctccccgggaaaatcaagctaagtacactgtttttaccatcttgactgaggatatagaaagtgtttacatggccaccaagtcgctagccctgtataagaagcccgcgccaatgaagaaggatgtcagcaagagagagatgaccaagttttgtcggtttcacagagactacggcaacgacaccaatgaatgttggaaattattttactagg

SEQ ID NO: 35327 - DNA, 1470 bp, Cannabis sativa
gggactggtatttggcatgaataatcggaatgaagacttatatgtgattagtggatttgtggactctaattatgcaaggtgtatattgatacccgaaagactttgaccaaatttatgtttactatgttccaaacaactattagttggaaagctaaccttcaaaatgttgtgtaatgaccacatgatagattatggattagtaaaggcaattaacattaattatggacattttataattaaatataattttatattttattgtatgctctattttagaaatgggtattagagttataatttttcaattccagagacgttactaaactctaagagtattatttatgttaaatatgaattatacaatttttataatttttgctcggcgacaatatggaaaatgcgatggatagtcattagagtcacatgggtaagtttagaacctagttcctagtgagacaaacataagagatatttggtgtaacgtcttgtcctacagggacgccacgtgtgtgtgcttttataaaactactcttttactaattcatgtaattataccaaaaagtatggctaattaaaattttgcaattaaaacaaacgcataatttttataaaagataagtattaatatttacggggaccccctgttactaaaatatttatattccaaaccaaaagtgcttttacaaagtacgcttatacttcaaaatacaatcaaaacgggttatcctgtccaccgggccgtggcaccgtgactgatatgtacattgctgctgcgacatcaaactcatggctgcttaactttggccttccctttacctgcaccatttagcacccgtgagtcacagagactcagcaagaaaagtgaataaatctgtaaacaatataacattcatttaatcacatcacatattagcatgcttaaataattacacaacatcgtaatcacacaatctaggtacttcataaagcacccttactattcgttaaccacgagctacgtatgtcactatcgttgcctgatacagcgaacggtaagtaagaaacctatctgtagtttcaagagtaattactcgtaatggtaatgactgtttctaactctcggtcatacccgaggcatatcaaacacataaccaagatctcgatcataatcaaaactatattaaacacaatcgctaatcacttaatcctaagtgatgcgtaacacttttcttactcaatctagaaatcaggtgtgcgggccaacctgagtggaaataaagttgggcgatcccggtcctatgccacgacaaccaaaactcaataaatgtcttaaacaaaaactccggatgaaaatcctaaatctgaaattagacataacctaacttctaacaatgtcaaaataggccacacaacacataaataacctaaatcgattactaagtaacaccccgagccaaaatagaactcgaagaaaactcaagaattccccct

SEQ ID NO: 35328 - DNA, 1048 bp, Cannabis sativa
tcgtagattctttattttttttatcaaaataattttcaaaacttaccaaaaaaaatatattaaaattttaagttaatttttacaaaaatactgtgtttttataaaataactaaaaataacagtgaaacaactaaaaaccaataatagaacaacagtaaaaacttaacacagtacacaatatttttgaaaaaaaaatacaatattttcggaaaaaacacaatatttttgaaaagaaaataattcgtcccacagtaaaaaatataaaaaaatggaaattttagtatgtggtgtaaataatctaataatttttccaataatcaaccagcctaactacagttaaagaccaataacaaaccttcttaactctcaaaatttagatcaaaataatttttttatatacaagtaaatgtataatattacaaaaaaaatatgcaaaaaaaacataattacacaattctaattctatacagtgttacgagtatttacaaataaatatatatttatgattttaacatgttgattactttcaattgattttctaaaaaaaaaaaaaaaataaacatataaaactaaataggtaaatataaaagttaatatttatattttgatatattactaaaataatatgtttattaaaatttaatacgaaattaaaaaagtatacaaatacatttacaaattttgtttatgttttataaatagtatatatttatttattaaatatttaattagtattattaatgtttataatgctattattaatttagtgtgtttattatgataatatttcaatagaatatatatagtttgtttattaaaaattcataccaattttaaaaatgaaacatttaagtttatttatttatttcaataaatatttttttttgtttagtaaaaggtcataaataattttaaaaaggtaacacttaatacttgtcattgaaaaatgtgtttaaaaaataaataaaattgtaattaaatgtgatcttatgtataaacacttattattgttaatgtttattaattattaatcgaatatatttgttag

SEQ ID NO: 35329 - DNA, 1683 bp, Cannabis sativa
ttttttttttctgtatgttgcattttttaaagtgttttttatgttgtgttgttgttttcgtttttgttatacagcctaaaacgggattacaaagcctattatagaaagcgttaaaaataaaaaattactaaaaaaaatggcaactatatatacagaaatttaacataacaaaaacaacgttatttttgaaaataattgtcaaaataaggtggcccatgaaaattttcctaaaatatatgctaaaattaagtggaaggagggggtatatttagcaactcactcacaaatatatttcaataaaatataatataaagttatttttgattgatggacacaagaaaagggtaattttcaacttatccttgacaatttacaaacttaatagaggaaattaggaatttgatggtttggatggtttgatgctgttctttttccatgtttcttaactttttttaaaaattttttatataaaataacttttctgaaactagtttttatattaggatatttttataaataacaaaaatttgtagaaatacagattataatttttttaacttgaattttaactttatttttataaactaatgatagtttgtcattatttttctattgttttcactttccaactaccttaaaacaaatttcttttcttaaaaaaactacaagtacaaagataccccatttgtttatacaaataaaatacataaaaggagtattatcctttttaaatatgttttttcctatgttttgcacaattcaataccaaaacttatgcaacactccatatgaatatattgcttttagttattaggaataagaaatttatagcaattaaataatttaggtggggactgtttcactatgtgggattcttccactattaaaaagttcatttgggtaatgaaccatgttgatcataaaaatttggttcataaaatacttggttttcattttgttctatttcattaaatttgattttgatttaataataagattttgaggagtgcaaaatttaattgtatatcttcctactatgcatcactaagaccattctcaagagatgagcttaaatagctacatacatatttaaaaatacaaagaattgggtcaaaaacacatcacaacaaaagttttgtaatttttttttgacggtttagattccttcattaattattatgtgaattttcgtaaaaatatatataaataaaaaaaaattgctttaaaatgtaaaaataacaaaactcttaaaccaaatttgtgtcaaaaagagaataattatgtgtatatattaaacattattatttaagtacaaatagaagttcaaaaaaattaataataattaatgggtagacaacaagagaagagtagaatgtaattaatttttagtggtcaacaacttatactcaaaaacagcagaagaaagaaacaaaacactaagaacaactgcataggcagcagtccaaccctttccttcaccacccaaatggattccatagaaaacatttgatatggcaaaaataattaaaatccttcctacaatgtaatgataccaattccaatattttcgaacctttgatgctttatcaggcctagccaaaatagccaccacctgtcaaaatcaaaacatattagttaaaataaaattctaaaaaaacaacatactactttaagtaactagtt

SEQ ID NO: 35330 - DNA, 6670 bp, Cannabis sativa
ttagatattaaataaatttaaaaaattcattaaattaaaaatttaattattatttaaatttttttaaaaaaaaaagttatttttttctagttaaaatacttcgttttaaaattaaatgcattgaattttaatatgtttttaattatacttaatatatttaataaatttaaatttttttattaaattaaaaatctaattatacaatatttttttataaaaaaaaataaaattaaacctttttttagttaagatacttagttttaaaattaaatgcattgaattttaatatgtttataatattacttatatatatattaaataaatttcaaaataatttttaaaataaaaatttaattatttaataattttcttaaaatataaaactaaacttctttttaattaagatacttagttttaaaattatatgcattgaattgaattttaatacgtttacaataatacttatatattcaattttaaaaaattattaaattaaaaatctaattatttacttttttttttttttggttcagttacttagttttaaaaataaattctttaatttttaatatcttataataatatttaaatattaaatttttaaagaaatattaaatgaaaaatctaattatttaatatttttttaaaaaaaaattataaattacagttttttattaaattacttagtttttaattattaaattattaaataatttaaatttaaatttaatttcatgcaaatttttaaataattaattatttaaataatattttatttaaaaattttatttttcaataattttttataaatttactaacttattataaattataaaattaatataattttttaatcatctcaaaattctactaacatttcggcggcacaacaactacattttaacccatcctattttttctaaaatttatcctaaacactctaaaaatcttcaaatacatcacaaataaacactatttctacatacacaaaatttacatataacaaaaaaaaaaataaacagttagtaacacttataaaaaaaattacataaaatctgtttttttaaactatattaaatctgttttttttttttaaattacactaaaaaatttaatcttttatacaaaagattaataaattataaaaattacatttatttacaaattaacatataataaacaaattttttataaataaattaatatttataaacaaattaacatataaaaataaaaaaaaaaatactaactgtttatggtggctcaaatcaagaactctagcaaattttcccaataatgcttccaaaattcgtaaaaacaaatatttttaattatatcagatcaatacatatatataatgcagtgaccaaaatacgaagtgaatttgatgaattataactgacctaaaattgaatcaaataatgcaatgaccaaaatagaacgaatattttgaaggtacttatttattactatctaaagttgatcatgaattcaaacaaaacaggaacccacattcagaaattggttcccaacaaaagccgacaacattttcatttctaacaataaaatttcaagaaatgcacaaataccaatctcaactgaacgaataatactagttaaacacacaatagtaattttgagaagaaatgagaagaagagctctttgaatctttaccctaataaaaaccacaaaaatcatttccctcgaaaaataacaaatcttaaaaataaaataggagaaaataaattcataccctaaaatgggggacgacagtggtggacggcacaacaaccaccatcgaccgaacctgctatcaacgaaggaagaagatgaaaaatagggtttaatcttttggaggagatttaatatttttgcaagtagaagatgaaatgttgacaagggaaaatgggaaacgatatgagggattcaaggttttaattgtttttttaacactattaatggcgacataacactgacgacaaagtcatcagtgatcatggactgttcactaatgaggtggcagtccatcactgacgaatttgtcgccagtgattgttttattgggaacctttctgcatgttccaaagactatttttcaaaaaataaaaattactaatgataatttcgtcattaatatatatctcaatgactcattgatatattttgtctccattgatctatacttcagccaaaaaaaaaaaaacattttcattactgaggatacttaaatttcattggtaataatgttacttttagtgaggactttttggcgtcagtgatagtgtcgttagtgatacccattattcttgtagtgaaagttgagagtcaaagcttcagcatgagctgaatccaataaccccgaaattggaatggccaaccctgcaatgatattatcataatcatctttgacaactgctctcaatcctagttttcttcttttgtaatctgttgccgcatcagtacaaagtttgaaagaaccccggtcgacagtcacaggatcatgatcccccatagaagaatgttgagtgaccataggggttttcattcgagcattcctgtaatcttcaagataagatcttaaccatacaatagtgttagaagcagacaaataatttttaccaaaaagagtcttattcctattatcccaggtaacccacaaaaacaaaatccctaatacaatactcaaatcatctttattaggggactcgaaagcaataagattaaagtctctaatatcacaacgctaataattcatgtagaaacttttaaagggagacttgcaccaaaattttctaactcttgaacaatctagcaaggagtgtgtcacagtttccataggataggtacaaagagaacaatcaggactaggggtaatgtgtttagaaaaaatattagagactgtattccacgtttcctcaatcttgaattacgtggacatgccatgttaggtggacaaaatttaggataatattttcccctagtccctgtttgaacatctcttctgatagggactttccaactcgcgtcctgcctgtagtagcctctgtcgagcagctttgccttagccaagtatctcgcttttcacatggcatgcttttagatctttgatcttctctctccatatatgcctcatcttcttttcttcgacttctcttctttgagtttatcattgataagttccaatctttataaggttttagaattttttttattctcacgtagtattttcacattataattttcttgatagctttaagatgtataatgtttcactcttctgtgaaaaatatttgattctaaactttattgtgattcttgaatctttgagtcatgaagaatattaagaacatgaagaacacgtttgaatcttggaaaaacacatattttaatccattacatgccctggccgacccttgggatcttgtttaagtcttggccgacccatggtgttttcatgggggatggttggttctaaggtttgtcctaggaacttggctagttcatgcatgggtcacaggtctctggctgaccctctcaatgctttggaaccctagctgacctaggccttggtcccaagtgggtggccagtttttcatcctcttttgacctcagtaagaatcctatcatgaccttgtgaatctatacaacctttgtctcatacgggggtccattttaaacttcatatgacactttatgatgagtctcttataatgaaatgctcaacttaagactaaacacttatctaagttgttacactagaaaccgtacttcactaatacccagccttgtacaatgacattatttggcaagtacccttgcgtacagttgatcagagtcttgtctatggcttggaacctttataggaactctaccctttggcttggagcctactaggaactttgccttttggcttggaacctattaggaactctgccttttagcttggaacctgctagaaattctaccttgccttagagatttagcctggtacatggttcctataggatctctgtctggttcttctttggttttactattctcgcggggcctcgaccttatgcattttgaatcgcatggttcttcaaaggccttggcattatgcatttgaacattttattcatatttgggcttagggatttcatgttcttgcttttggcctataggccctctattttcgaacattacttatgtttatccttaaagcctttcactatggacatatgactatcctggttgtcttcttattgccttgacatttaagtatccagatttacttttctttatcccaaggtaaagtattcctacacttgacttagcgatagctttagtagcttatactaagctttaaatttctctacataagctctctgtgctagtttgatgttttgtacggtgtgggtgcccccaagtgagcacacatacttatagtcccttggtcacttgctattcaccaattttcatagaccttgcgtgggaattttcttggggcgctactgggtgtatgcatgtggaactgaaaaagattaactttaagaagttatcttattagaaagtagtttagacaaatatcattgaactaaaacaccatttttattcatcaattggtcttgcacatgtgttgttgttgtgaaatgtacatgttttgtgtaacaaaaacttacagcttaatgtctacttttgaaatcacgttgtggctacccctatgcgacttaccatgcaagggccatcactgaagagtgatggggaggccatcgctaaagagccataagtacttagctctttttgaatccctggatggtgaaacattagagcaaccactattgaagagtacaagttggttagagagattacttactaagatgttctccattctaatattttggttgacgagccaactccaagttctcattctactcgacaggcttgtatgcacattttcttattatcttctaacttggtgtagacctttttactttggtccaaacatgcttgctgcagaatctttattatgaaggaatattcttctgaacactaagtctcttacgaagaatttcctccccttgacttgtttgttgaagtacctagcaactttttgctggcaaacatgctactttaagttggcttggtcacttctttcttccttttcattaggggatcctgctagcaagatgtagtttacttctttgtcatagtagaccaaaagtataagagtagactgttggcaaatcaggccggccagggtacagactaggtggacagccacgttgagggagcatcacttggctagtttaatgaggtgatggctgaccagcctatgtaggtagtggtcgaccatgttgttgattccatggtcggccagcctgctgaggccatggtcagccaaccttttagaggccaggtcagaactatagtctaggacaattttatctcgcctatagtcagttggctttgcccccatcatgattgttgtagagccttcatgccacttctgtcaatatctttttagcctatctcttggtaacgcacaatagaggtggtattgggataccatgtctgcgtgttacgccttcaaggattggacacccaacaactatccctcttatccatgctttttggcaaggttttagtttggaagtatgctgctataggtgtcatccatattggtcagtcatccaacatatctatttcttttaaactagagatgctcagttcctttaagaactgaacgggtacaaagttttccttgtctgtcaaggtgctgctggtaagtcgagtgagtgaatcggctattgcgtcatctttggggacttgcctattagtatagcctttgagctaacttaacaagtgttggaattagctcaaataggccatcatctttttgccttgagttgtgtattcacttaggacatgacctacgactagttgaaagttatggtgtatgtctaggtatttagcccgtccttcatgtgctaccttgaggccagcaatcggagcttcatatttagcctcattattagaagctttgaaactgatctctattgcctcgtgaagccattatcccccaagtgccctgagggccatgcctgcaccgggcgggtggtcaatgcaccttttaggttgagttgtcttgctctttctcttgcttcttctatggctcttgcttttctccccaatcttgaatgatttgggaagacatgcttgtatattcagccatgaagcttacgagagcttggcctttcatggccatgttagcttgataagtggccttatattggacgacctcgatggtctgggtggtacaggtttttgttacacctattgccatggccagtcggcatgcatttctttgggagttttggtaggtgattgaagcatgtgcttttctcctacttatcccttagacttcatggcctaaggaaattgttgaatttccctttttttgccactattttggccaaagccatcattgttgcgtttgcctcaaatattctctttgttggagacttgatagacattgtttgtgctggctggcatgttggacaacagttggggtagtatgatgccctatgtctgtaatgaccgctttagtaatttggattagtaaaggaaattagcagtaatttctgttatttttatgattatttatgaaattaattatttgtggacccc

SEQ ID NO: 35331 - DNA, 2659 bp, Cannabis sativa
agaagaggatggaagatcatgagaagaaaaagcaagatgataggcagacttaactgtacactctcccgaactatcatgcccccaaacaagatcatccttaccaagatcacccataagagggacactaagaatttcatcaaccaaaggagtagaaaaacatcttgcaagtttagaaacatcccaatccccattctcagtaataaaataggacaaaaaaggggaaggaggcctataatcagaggaaaaaaatttaaccctgttatatggaagccaatgatcctcaatggttctaatatgactaccatcacccactttccataaaagtcccatattcaataactctctaccccaaagaatacttctccaagtgaaagaacggttgtgaccaagtttagcatcaagaaacgcagtacgagggaagtatctagccttaagaacagaagcaaggagagaagaggggttcttaaaaattctccaagcttgcttagccagcatagcttgattaaaatgaataagagaacgaaaacccaacccccccaaaattttagacttgcacaaagatttccaagacttccaatgaattttatgagaactccccgaagatccccaccagaatctggccatcacagcttcgatacctttacacaacttaacaggcagacgaaaacaagacatggcataagcagggatagcctgaataacagccttcaacaaaacctccttaccagctcgagaaaaacacttagaagaccaacccctaagaacagaattaaccttatcttttgaaaaagaaaaagagtgatatttagaacgagttaagcattgaggaaggcccaaatatttacagataaaaggcctgtcttcaagattaaaagtagtgaagaaaacagtacgaatatcaggctgagtattaggggaaaagagaatagaggacttggaaaaattaatagcctgacccgaagccctagaatagacatcaaaaacattttgaagagctaaacgggaagtacgattagcagtgcaaaagataaggctatcatcagcaaaaaacaggtgggataatgaaggagcattcctagagatagcaatgccagttagtaaaccagcatcttgcttcgccctaagaatagcagaaaggccttcaccacaaagaataaagagatagggtgagagaggatcaccctgcctaaggcccctagaaggctgaatagatccatgaacagaaccattaatcagaaaagaaagagaagtagtagaaatgcatttcatgatgagagaaacaaacctagaaggaaaattaaaatgaaacatgatactctccaagtagtgccaattaacccgatcaaaagccttagccatatccaatttaagagcagcccaacctattttcccatttttcctagaattgatagcatgaacaacttcttgggcaataagaatattatcaaagattactctaccagagacaaaagcactttgaaaaggagatatgatcttatccaaaacaacctttaaacggttggctaagaccttagatataaccttataaaaggtagagcaaaggctaatgggcctaaaatccttaagagtgtgagcatgctgcttcttaggaataagagagatgagagtagtgttaacaacagaaaaatcaaccccctcattaagacaagaaaggacagccttagcaaaatcaacccctaaggttgaccaatttttttgataaaaataagcatttaaaccatcaaggccaggggccttatccccagaaagattaaaaagggccttcctaacttctttaagtaaaaagggttcatccaagaaagcataatcccactcttccaaaggaggacccaagcaatcaagaataaggctaatagcatcagcatcactaccatcagaactaaataagtaagagaaataagaaactactaaattttccctatccatatgaccagagacaatattctcatgatcatccttgagaaatttgatagtattattcctctttcgttgagaagcaaaacgatgaaaaaacttggtatttctatcaccagccttaagccactgagttcgagccctttacttccaataaacctcttccttgtaaaggagagcatcgagttcagattgaaggcacttaacccgaaatcgactttcatgatcaacaatcgaaatatcctgtaggcaggcaatttccttttgaagatcagaaatacgagatttaatggaataattggacactttattccaagacttaagtgcagaaatgcacaagtcctgagtggacaaaaaggaatgaaaaggagtcaaagcattctgattggaaagaccactatcccaagcagtcttaacaacagagaaaaaatcaggattctcaagccaaacattctcaaaatgaaatctttttccattcctagagtgagaattgagtccattgtcattgagaataagctttaaagcacgatgatccgacccaaaaaaggaaagatggtgcaaagaagcattagggaaaagatcactccaagaagccgaactaacaactcaatcaatatgttccttaaccgaatgattgtgccaagtaaacttattaccctcaaaaggcaagggggaaagatgaaacttatgaataaaattggagaagttgtccatatccttacta

SEQ ID NO: 35332 - DNA, 1806 bp, Cannabis sativa
acggctgccgtacatcacaaaatacattccatgaaagtacatcacaggacaaaatcgtgtccctaaaattataatatgaaacgtgtgataataattgaagattatttaaaaagaattattaaaatgtatcattataatgttattggggtaattaaatattacatgtcatttaacttaaaaaaaatatcaattactctttaaaagagtctgagtgtgtttttgtgtgaacttgttggggtcatgtacaaaaaaaatggttattgcttgaaattaattcaaactaattgtttttttaatttcctaaaagtactcaataatggggcccgcggaaaactctccgtgtgaatttctctaatcgtgagtcatatagtaaatgaagcgtgcaaaattaaataagctttatatgaacagtaagaagtttcaagcttaattttgtctgctcaatgcttcaagcaaggtgtatatctggcttttcattgctttcaatgtttccaaagtttgacgcaacgaaccgagtagacggacatattacatatgtatataccaatatataaattaatagagttacatttctttgttggcatctgatcacttcagctttccacactaaaaatacatattgtttgtttaacgtatctcttgtgcctcaataagggaaacttttttgagatatacaaccgatggagatcttttttttttttttaaggtaaatggatatttttattaataaacaaattagacatagtaatgaagatctatactgtcaaaatcatacataaatggtttgattttttatctcgaaaaattggatgacgtgtagttcaaaattgagggcaagtatttagcatactttcactcttctatccatatatagctacttagatacataacggtagataagggctatttgaagtgttaatatttttcttacacggttttatataccgacttataaaaatactaaaatttgggttaacttttacaaaaatactgtcattaaaatttttttcgaaaatactgtatttttataaaacaccagtaaaacacaaagtagtataactcaaaacaacagtagaacactagtaaaacacgagtagaacaccaataaaaacttaacacaatatactgcagtatgaaacttataaaaaaatacaataaaaaagtaaaaaataacaaaagtaaatataccatgtaaatttcccaaaaagaatgctctttaagcttttcttcgaagttaacatcagaatcaaagctaaattatttgaaagtgtgaatatatataattcgaaaattgcaatgtagttatttaaagcataaccaaatggagaaaggtacgtacgtatctgacatatgtataataatatgttaacatcctttgattgtttccctataaaaaagaatgggtataatattagaaaaatttaaatttagtgttaaataaacactaaaaaaaaatactattttaatactaatttttttttttaaattccaactacaatactaaaaattacaccaaattttatattctttattaatttattattttattgatataataagaatatttttatattaaatatatatataattatttagtttttcttcttaaaagtattatttaattattaaaaaaaattcaaaaaaataatgtggtttacagtatccctctaaatttagtgggacactgtagacaaagctatttatgagtataattttagtgtctcattagagtaaatatagtgtgaaacttaccttagtgtgaccctacaaaaaattttacttttagtcacaatgactaaaagtgaa

SEQ ID NO: 35333 - DNA, 940 bp, Cannabis sativa
atttattaaatattcgtataaatatttaattatttatttatatataaatatatttattattatttattatttataaatatttgttattttttttttattctaattggtattagcggcggaccctgtttttggccgctaataatattaatagcggccaagcaatagcggcggaccaatagcggccgagggccaccgctattaccctgtagcggccaggaatgatactaatagcggcggagaggtccgccgctattagtgataaatgttgtagtgaaaatttagatggaaacgttattgttgttcacaaaaaagagtctgaaaactcaataaattaaaactttatcaagctatatgagcaatgcaattagaaaatattgtagagttaactactcattataaaagtctcatttggggtgagaatataaggcacacatgatgtaccttcgtgaagctaacaataaaacaaaaatacataccaattaagaatttataacttttggacaaataaattgattaaataatatatattaattcaagtcaaaaaattaatactaataaatatatgtaaattattacatttgaaaaaataattaaaatatacacatttaatactacttcataaaatgtaaactgatatatatatatatatatatacatataaatactaatttttagtaagtaattatacataaatagctaccaaagaaataatattttctctaacaataaaatttggtgatagaacaatcattgaatatttaatatttttcagctaaattttcaaaaaagagatattaattgcatataatatatatttaataaaaaaaataaagtatcaaccataacaccataatacattatttttacatcgaacaatcaagttttataattttagaacaattaatggaaagatgtgaaagataggatgttggcggagatt

SEQ ID NO: 35334 - DNA, 2024 bp, Cannabis sativa
agcttcagagattggaccagagtccattgatcttagtacttcagacatagctgtgagcaccgtaacaactccttgctcaaaccttttctgacgttgttgatctaatgtgtaagcatgagccaaattccaaacttctgacagtaacttgacttgccaatgagcagagggcaagcgagaggtgggtgatgtgctcacttgaggaatttctgatacagcaggggcagcagggtcagatgtagtaaatgctataaccgatggaggaatgggcttgccaaacactggttgaaaagtcttgccaatggagggcacaggcactgtaacatcctgctcaaggatagctggattacctcgtaagaccaatctctgaatcagaataggatatggaagagtgtgcttaacacctttagccttagcagaatccaacattcgggtgtagatcagtgatggtaaatcaatagagacactagtaccaagggcatatagaaaacgtgcagtgttatagttgatggtagatgtatgtgaattggcccaccaattggacaaagcaattttatgaagaacccgataaaactcagagaggatagtaacaggaaactcctttccattccacacaaaatcaggtttaccagtaagttcaacaccaacatccttaaacaatggtttatactcatcggtgtaagtggggtgagctagcctaggaattttcagtataaggctaatggtagacggagcacacttaaaccaagacccacgaatatacgcctgatatttgtgtttacttttctcatttacaatactttcatctagattagcataaaactcacggacaaggttgacattgggcgattgaaggtgagtgactatgtgttcccattttctagcctgaacaatctcacgaaccctagcaaaatgtttcaacttaaccctatactctggccacagaggacgggaacagacattctcttgaaaacgaagaagtttgtcatgggagtagaagggcaaactaggagagggttcagactcagagacaacacccttacgttttttggactcagactctttagccccctgaacagcttttcgtttactcgacgatggacctaagttcttaagaagaacaggtggggacttagaggacgatatgggtgaagtggacccagggggtgcagtcgacacaggtggagctggtgagagagacggggaagacagagatgaacgagtgaaacgtttagggtttgaagacatacctgacaaagtggaagggcagagaggtgagacgaaccgtgaatggagacccaaacacttcttcaggaacagtttgcacgcttccccagacagcaaaagatgaacagtcgaaggtggagtgtgctgtgatgaatgaggggaaaagatgcaaacttataacaaatggctgctggtcccagctgaacaaatagttgtagtatgtttctgaaatcgtacaaggcccacaagcccaacaaaacaggcccacacaacattcaacccaacccacgacatacagagaaaaaaatgaaacccctaactgagacaaaacttattttaagaaacatgtattccacataagctcaactcagtagaaaaaaaaacaaaaaaaaaactatagatgcaatctcaaacacgaacttagaaaaaaaaaaacaacacaccagaccctcaatggataaacaaggaagtgtgagtactaattaaaaacaaaattccttctgatgatttgaacacaatagatgtcatatgtgtgtgcaagtgtcctcatgtgagccctccaaggattagttggacaactcactctctctacttgaacagttaggagttcttctagacatttgatataggaacatacttgcgagtgtatgatttttttgtatacattcatgttatttttccaaccagttatggctttcactcctccctggagatgtagccgtctccttatgaatatttctcaaagaatatagtgagaaggagcaaactcctcaaagacattcagtggtacaaaggaagct

SEQ ID NO: 35335 - DNA, 1059 bp, Cannabis sativa
accagccactgtttggctaagctattccacctgaggatcagcctcctcgaggttttataattccacgcgtggttccccaagtggaatttgttcattagtctcagtacaagtggcagttggtggcctaaggggacgagctgtggagcttgttctgaggcctccacctggcatctgagatgcaggtgttgtcccatcaccagtccctgtaactgacgggcccctagtttattggccagttgtagtacttctttccacactagttgattatgttgcaaccatcttgtaagtgacttcttgagttgtggctatcaatgaaatcaccaaaatattgacgcagaaagctggccaactcgctcacatgtatagacgagatgaaagttagaagtaactaagtaaaaaagagagctcacacaagaatttatagtagttcactcactgtgtagcgatagtattagagctacatctactttgagttttaattctcacgagaatgattataagaaaatagctaagtctgaaatctctaatttctagagagagatgctctaaccttatgggtacttttctaaatgtgaaaaatgagctagaggagctctccttttctagagaatgaggtaaaattaaaataataaaatattaaaaaaaatgtgaaaaaatatatttaagctacctgttaccgttgataatggtctacggtgaaattgactccaaaggttggtcgtcaatttctgtagcttaaatcgcatccgtggggccttttttcatataagttgtagttaaaatttgtaactctcttgatgtataaatttggactttatatctttagaattacgataggggtgtgagacataagtttacagaacatttaaatagcattgaaacacaagttgaaccttgtcaattgaataattattgagttatggctattttacggaagactgctctaatacctacgcccaggttgacatatgcctaagtgatattttgacatcagtcactcaatttcttttttatggtgaagacgttcacccgttttcaaagatgttgctatttcgcgaa

SEQ ID NO: 35336 - DNA, 1201 bp, Cannabis sativa
tgagagtgtgtttgttttctagggtttcaaagaaaaatggcaaaaactaaaaatgctcaaccttccaagaggccctctcgtggctctgtttttgcatctccgatcaccccacctgcaccatctgctccagtgaccagagttcctggttcgttttctgctccgatgaccactaccagaaagtcgaagacccaagctcaaaagtcgacttacaaccttgtttctcctccaatcattgcctctccaattgctactccaactcttgggcttggtgatcatgatgaatctcattcatctgatcactcattgtcgaagtcttcttcttccaaaggtgctccaaatgtcgagaaagtaatagtgcccttgccaactgtgagttctcgtacaaggtccaaggtatccacacctcaaaaacccgaagtggttctacccacaagtgtctccaaagggaaaaaggtggtgtcttcatcttcaaaggctaaaagtctcaaagagaatcccccttctatatcatcatcggattctgaacctataaaagaaactgaggaggatcacgaatcagagagtatgtctgattcaagtgaagagtttgtgcccaaagaacaaccctctggtgatgattctaggtctgaaagtgatgaccctgaagctaaacctgttagtgcaaaacaagttgttgtccctgctgcagttccaaagaaggacaaaggaaaactacccattgtctctccaagtgctattcttcctcagaaaagaaagaggccctatggtattactcttgaaaacttcaagccccattctcattatttttgttacaatgatcatgctagagacatgaaattttatgagaatcgaaattttactattgaaaaaatttcaatgtcattgctcataagccttttggggtttataacatgttgaaagaaacaaaatggatggatactttgattggttttgatggctatatggatcgaattgtgaaggaattttatgctaacatcactgatgagtgcctcgatgaggactcttttatatttggcaaagtatttattaggggacaatggtattcctttactgtgaaggatgtggctaaggctctcaatctgcctatgggaatttagacaattgatgttgagtttgatcgtcaaaaggtgttcggatatttaactggtaataatgatgtggaactctccgacacaatgca

SEQ ID NO: 35337 - DNA, 1121 bp, Cannabis sativa
gcacgattaactgaagaaggaaaattagccgccatactggggggcatcgagattctcggagagctgtggaaggacatcaagaaaagtgctttcatagattctatgagtgattttctcgatcgcggagatggtttcatcaagctcgaagaagccattcagcgagcagatgtcgagcctaaattaggccaatgacaagctccttcagcgggaacgtccgttcaaagcacccagtaccctagtaaatccagctcaggcggtaaaagatctaacaacaacaatagacaaggcaatggaaaaaatgggaagttctccggcaaagccgaacaaacccttatagagaatccatccaaattcattgctttctctttcctgactgatgacttgaagaccatctacatggctacttagtcagtagttccgtacaagaaatctgctcccatgaaaaaggacataagtaagagggacatgtccaagttttgccattttcatggagactatggccatgacaccaatgaatgcaacaatttgaagtgggaatttgaattcctattaagaaaaaataacctgcacatacaaaaatatgtcaaggccaactagaatcagagagccagccagacagacaataacttagatttattattgccaccaccagtagatgggcatttgcaagtcatcattgatggctcgcatatagctggagatttgggcaaagctcgggaaaggtatgcccaaaccttacagcatgagcaaaaagaaatggtcctggccgcagaagaaaggaagccaaaaataccacgggtaggggaacccacaataaaattcaatgaagaagatgctgtcaaggtttgcttcccgcacaatgatccattagtcgtggaagtacaaatggtcaataaaaacagtggctcgtactatgatagataatggagcctcagcaaatattctgttcaaaacgccatatgaaaaaatggggccccaactcaaagatctaatcccttacctccagctcgtatatggtttcttgagccagagcattgcacctttaggtaaaatttgcctacccctcattgttgggaaagctccgaagagcacaactttgatggcacaatttttggtattgg

SEQ ID NO: 35338 - DNA, 2740 bp, Cannabis sativa
gccaaataatttccacgtatgtgcataggtcaccaagccctttaaattctatcactagccagtggctattcggggtatggggcatagatttaattggtgagttaccaaaggaaaatggaggagttaaatatgtagtggtcgtagtagactactttaccaagtgggttgaggccgaagccttagcaacaataacagcagcaaaactatgcgagtttgtctatcaaaaattatctgtaggtttggtattccttataagttaatttctaataatagaaaacaatttgattgtaaagaaatgcagagattgtgcgatcatttagggatacaaaaggcttttgcagcagttgcatatcctcaaagtaatgggcaaactgaagcggtcaacaaaatcattaaacataccataaaaggcaatcttgaggaatgaaaaggtgtttggctaaaagaactactgcaagttttgtggtcatacaacacaattcctcactccacgactggcgaaacccccatctcactttcttatgggtgcgaagccatttttccagttgaggtaggagctggatacttgagatgagatgtttttaacattgaaaacatcgaggagaacaagttactccaacttgatctaatagaagaaaagtgtgatcaggctcagatgaaaagtgcagcctatcaacagcgtacaacacgctattttaactccaaggttaaagaaaggagtttacgagtagggaatttggtgttgcgaaaagtcattcctaatacacgcaattttgtgcatgaggttttcagcgacaattggaaaggtccttacctaatcactgaaaatattggaaacgtaacataccagttattcgatctcaacgatttagtcttcgataaagcctggaacggagaacatttgaagtattattactaatagtatctacatgtatatacttagtcaattttttctaaattatctaagtataggggtatatatattctgtcattgtactattgattgttcaatgaattgctaatttttaaaaattgatatttttattttgatcatttattgtttgcatatattttggtgttgtcattgtactattgattattctgtgattcattgttttagggatagaatgtgtatgaaacaaataggctcattattaaagaggaaataattttcctttttttttatttgaggcaatcgtatgtactttaatctattgcgagtcgctttaactgtagtggcattttccccgacaaatatctttgaagatgtagatattagtctcaaattttttaatgagcgagctaaaccattagcttcattaattgtgggatttcatatacttgttatatgattgaacccatttatttattgctcgaaatatgagaataacatatttaagcactaattttttttaataatcacaaaataatatttatcaaataaaaaaaaatttaaatattattattaattatgataaaaaaaatgtcttaatcaataaaaactttttttaattttcttctatttcaccatgaaaattcttgaaattgattaaatcaaaattgtgaatattaattaattaaataaattaattattgagacctactattcaacaatagcctagatattatagggacaataagcctataaaatgaagctcttaataattaaatctaaaatttaatagataaatttcctaatttattaatttctcatgactcaactaaagactcaaattgtactcctaatttaacagaacgctctatatacataatatagatacactataaatcatccattatttctatcatatcaattaaaaatcctctgtagattgtctataatgagtaaggactaatattaccattttacccttcacttataatttatgcttaaaataattaatataaatgatatttcagtaaactaatgtaattactaaaatgagcgctctatcatttattattttaaccaaaatcaaaggaaaccatcactccacttctaacaaatagaagttatagatgtccatatcaatgactaatacttcaactcatttacactatcaagttcccgagatagaggtatgtcttagtccgtacggtaagctggtaacgaacaaatcaaagaactcaaattatagaattagcttaaactttaattatcttaggattcagatctaatttacctatggtaaactaactaatatatatatagatttagaataaatataatagtatgattataatatctattgtactttaaatatttgtccaattcgatataaatctatatatttgagtctaatctatttttccaattccctggaaaaagcataccactagtcttagtgtaaataaaccatattgatgattatcatgtcaatataaatttagtgcactgataaatttcgtgacttaaattattcaaagcataaaattacaattatttttcattgtgaagatattactataattataaataactatatgtctagattcaatagatttaatattaagcatgtaatcacataaaataaacatgtgaactaagaaattgataaagtcataaataatttctatatctttgtttataaatagagagaatacataggaaaggttttatttaggtcacaaaccttaatagtgagatccacaaatttctcattctggatgattgatgatgtcagtagaattgtattcatgcctatgtgatgatcagggaaacctcatgtgagttgagtct

SEQ ID NO: 35339 - DNA, 1388 bp, Cannabis sativa
  modified_base (1339)..(1358): a, c, t, g, unknown or other
attttggggtcactaataaaagaataggatagttataaaatttttagaagggtggtataattaaacaccctatctaatgtttaagcataaaatgtcaaatttcccaaaataaacaatatattatttcaaaaatatcaattataataaatatgaatgtaattaattttaagaataattagaatttttatcccttgaacgttcgacaatacttattctgccccctaaaatatacgacttattaagaattctccttgaacttttacatttatagaaatttagtccttgtgttaggttacatcccattattccgtttaaatgctcacatgtctttgtaaattagcagttttgtcccctaaactttgacaactattaaatcgtactccctcaaaataaaaatgagaaaaattcaatatttttttagtaaatcttaagaaaaatcattttgaatgattaagaaaattagaaaacaaattaaaattttaaaattaataaagcgatttaaaaaattatttatttattttattaaaaatatattttgatataaaaaatatattaaaaattaaatttttgcaaaaactaaattttacgggaacaagtttgagtctattttttcctcaaaaaattagatttgtttaagtaaacataaacattttttagtttaatttctaactttttttttcaaaataattttttatattaattgaatttttaattatttttctttatttttgaagatatgagtttataaatataaataagtttaattttttcattaaaaaaaatcttagtttgtttaaattatttattggatttttaataattttggtgttagtttttaagatacatgtttatagataaaataaaatttgaaaatattttcttagaaataatttagattttttaagtaaacttaatattttttaattcatttaatatttttatcaggttttttagtaatttttttattaacttttttcagaattaatagaatattataatttttattttttttttcataaaaggggaaatttttttgtattgatcaacgtttagggaataaaaatactaatttttaatggtaaaagaaacaaaatctaatagaaggggcataattatgtaactattgtgttttagggagaattttagacaacctaagcaagaggagcaaaaatattaattattctaactttaataaagcaaaactattaaaagataattgactaaacaacgtgctaaattaaaaatatattaaagataataaaaatgaaaagatttaatttatgaaaaatattataattaaattcaaataatatctatttattctatataaagtgtgccnnnnnnnnnnnnnnnnnnnnttatgagaaattcatgagtgactttttatt

SEQ ID NO: 35340 - DNA, 2452 bp, Cannabis sativa
  modified_base (26)..(27): a, c, t, g, unknown or other
ataaatcacttcaaatttcttatatnnataactaatcagattgtaaaggattttatttagggaacaaaacctaacataaccgaggtgttgaaagtaaaaaatctcatctgtcatagtgactcacagctgtttgtaaaccaggtttgtggcgaatgccaggcttaggatctgaaaatggctaagtatttagagaaggttcagaagaacttggaaagattcgatgactttaaaatcgagcaaatcccaagagaacaaaactctaacattgatgccctggcaaaaatggcctcccaaaatgatttggatgaattaaacttggttccaatggagatgctaagcgagacaaatatatgtgaaaaggaagacgtagacaactctcctacatggatgactcctataatcaactctgtactcgacaggcaacttccaactgacaaaaacgaggcacaaaaactcttatactcagtgcctcgacacaagataattgaaggatcactatacaaaaaaaggttattcgatgtgtctacttcggtgtgttctctctacagcagcaaacgaaatcatcagagaaattgatgaaggattttgtggggatcatgcaggttggcagagcctatctaaaaagatcattagactaggatattactggccaatgatcaataaggacacccatgagtttgtcaaaaaatgtgataagtgtcagaggttctcacatatacctcacgtgccgccaacggatgtaaggatgatggcctcaccttatccatttgctatatggaggattgatctaatcagggcattacccaccgggagaagaggatccaagtacgcagtggtagcagttgacttcttcactaaatggactgaggctgagcctcttgtttacataacctgcaagaaagtcctcaacttcattgtcaagaacattgtctgtaggtttataattcccaagaatatagtatccgataacggaactcaatttgatggcgacttgttcactgagttctgcgagaggaacaaaataattaagagcttctcgtcagtatccaggcctcaggcgaatggacaagtggaagctgttaataaaaccttaaaggatactattaagaagaagctagatgctgccaaaggcaggtgggtcgaaagctaccacaagtactttgggctcatagaactaccgaaaagacagtaacaggacacactcccttctcgctaacatttggctcggaggcaatgttacatgtagaagtgaacatctcgactcataggcaagagtttatgatcaagaagaaaaccaagaactcctaaaattgtccttggatttgcttgatgaaaaatgaactgagtcgcaaatcactaatgcagtgtatcaactatgagttacaagatacatcaacaaaagagtcaagaaaacactattcaatgtcgaagacttggtacttaggcgagtatttacaaacacgagagatgcatatgcaggagtgttgaacccaaactgggagggtccatatgtaatcgaagcagtagtaggagttgaagtttacaaattggctcggctaaatggctcgctaataaagaactactgaaacgtggaacatttgcgaccctactacaaataaattagtgatgtaactcacattgttgatgtaatattttatcttcagttatgaataaagagaatcatttcttttatttaagtaattacaaagcttcactctttaaaattaccaaatgggcatttgtgtatgattaaccgggattcatctagaaatgcatgatataatgcaaacccataactttaaattttttttatgagtttttggtcaaacatttttgacgagaaggggatcaaaccatcataacttttttatttaaacctgtctgaagagaaaggaaaattaaaagttataacttgcgtacaaagctgaatattaatggttcgcgcaagataagaaagtattaaatgagacatgtcttgataaaagtacttaaacctagtgtatggatagataatattactattcatataagcaatcaaaaatgtacaaagtgataaaattattaaacgtatattcaagtttgcttaagacagattataactgtcattgcgaggtagaattgacaatttctcgtaaatcaaaaaatttggtagattactaagtacttaaatagaaaaattacgagcaatggaaagaccaatagtgctctgcatttgatcaaaatatagttttttacattgtgaataaaaatgcaagcaaacacaaatatattaagttcgaatgaaaagtacaatgcatttaagataagttggtttcaaacttgtccgtacaaaaatgccactaggggcaaactattaggctattttcccaaataaaaaactacaagattatttatagacgacaggagagctcgagaaagaccatatacgcatagcctgagaaagaccatctac

SEQ ID NO: 35341 - DNA, 1206 bp, Cannabis sativa
aaaaattacagttttacaaacatcaggtacttatgccacaaaaaaaatcattgagtttatgccgcttacaaactcaaacactaaaaattatgtattttctctcctactcacccataattcattgtatttttattgagcattgatattgatactctatttatacaataattatatattataattatttaaaatattttctaaatttgagaaattttaaataattcacaatacagtaaggtccgaatggtcttttagatgactattcccatttttattctttttagtttttttaagaagaaagacttattcccttcttctctttaatgttcatgaattatacaataaattaagtatactaaattaggaaaaatattataaattttagatagaaactagctaggtatagtttctttccagaaaataaataaataaatgtagctaattatagtactttgtcaaactttggttaagaagtctaatatttttttttttttgagaaaaaaagtctcatattattttttattgttgggcacctaaccttgaatcttataacatgtcatgttatatggcagttttaaaaaattatggtcaaccaaattaaaatggtaaatttgactttctttttccattaaaatttacttaacaaatttctctcttatctcatcttttttattattaaagtttaatccattttattttttttagagtaatttgcatcataaatatttaagtttaattctcagttgcaaataaataactagtaataatatctaaattataattttatttacacgtgacaattctaattggtccaagtcattaaacttttattaatttaaaaaaaatttattcaaatataccaatgagaaaatgacacgtagatataatggcttaacatttaacggttagatacctacagaatttcaaaaatataacttaggtattattaccgcaaaaaattaaacttaagtatttataccataaattactcaattttttattgaatacaagtggatgaaacaagaaccaaaattcaaataagcgcatatatattactattttaggtgtgcctcgaaggaataattatatgaaacactatttttataaagaaaattatatttttacgtttaaagatttttttttttacatttttacaattttttttataaaaacaacacgaaaacaaaaaaaaaaaaattacataaa

SEQ ID NO: 35342 - DNA, 1151 bp, Cannabis sativa
ataattgaatttttgtttttatttcgcaaataaataatttaaataataattgtaattgaataataaaaataaaataaaaaaacaaaaaaacaattaagattgattagaaatatagggcattcaatttcaattgcattaattttaaaatataatctaattaccatttaatttctgtgtgatagcaaattattaattcaatctatatttttattagaacatatagaatctaaatcatatgataaaatcctacacaattatgtggtaaattacacatataatcacattaaataaaaaaattctaattgttacacagaccatacatgttctttcatccaatatcaaaatctatgtctcactataacatagtgttggaaattgttgtgctccaatagaagatcaaaccatcaagattacaactctatgacaaataatacaaaggataaaatcatgaattaaatatgttacagcaaaacagactggagtgcgttgcttgaagagattcgagactcccctgcttttactcactgtattgcggtgcacagggcgacaaagcaatttggctgctcattctttggccaaattggccctttcttcaaattgtaatgagtttggttgggaaattatccctcttgtgcgtctgcctatataatggcggacttgcctaaacttttgtagttttctttgagttgaatatacatctttcaatatatatatatacacacacataaaatagagaatatagaaagaagagaagaattacaactcaaagcaataagctacacctaaaacacaatatataaatagtataaatataaaagagatgtgagagcaatctcaacactacatacaccacaagtgtataataggggaatcacaaaacttgaacaaggtcttacacttttgtccaaaagcttatttccccctatcacaagcacttagggaaaagaaaagaatagaaatagctttttagatttatcaagcatatagtatttctaacaatgtgctctcttgatagaaacttgttttctctcaaagtgaactcaagacctctatatttatagtgtttgaggatcacatttgaaaattaaatcctcttcaccacatggttgtgaccagcacattaattagtgtttaatagaataaaaacgttg

SEQ ID NO: 35343 - DNA, 1313 bp, Cannabis sativa
  modified_base (158)..(164): a, c, t, g, unknown or other
tgtaatatagtgctttaaaaaaattaagattgtagtggtatcattgtgtgggtagcaaagttaataatagtaattgattctcacattaagcttgttcgtaaaagtagtatggtaactatagcctacatgttaattatgtgttttggttaattcacgtnnnnnnnttatcacaatataatttatttatgtatgaaaatgtaaaatttatatttgtatatattttgtgaatataaaatatattttatgtatgtaaatttagaacatcttttaagaaatgggttggtttgggttatatagagttaaaatgtgtctaacccataaccaacccataattatatgacctatcacttttcaacccaatgagtcatgacctactcttaacataatcctttactacaaaaaaaataaattgggttggctgggctaaatagtttggttcatattttgtgcacccctagtttgaattggagcgatattttcaattttgatttgacaagaaagaccttttcttgtaggataaaattaaaattagtgtaaccacaaaataaaaatgaggtagtagtaatgtaggtaagctaaaccacaactagaaaagtgcacgtgtccgttggtggaggggacactttggcgacccgcaggtgagtccttgatgaccaaaattaatgaaattaataaagaaatgaaggcgttgatgtgtatatatgtgtgtcagagtagaaagtctaccttaattaataatttccaattttattttctaaaaagaaaagaaaaaaaggaaaggaatcaaaattaggaaagctcaactgccaaaagtgacaacccacacaccatttttgtttctctctctttctcttcttcttcttcttctcttctctgttcctctgagattgttgaagaggaaaagagaaagctgagtcgaagaagctggtccgaagggaaggggatgcagatgatctccagggcctcctcctgtgcaatggcctccttaccttgttcttctagggtctctctctattcccatatcttatatgattttctctgtttgcagaattgtggtttaccctagttttctttttcttggttgagaaataattggattttgattaaatgtaggttcaaatctaaacttttatcgtttaaaagtaaagttggttgctttcctcagccattttgatcttgttttttccttaccctgtgggtgtaccatatgattttctctgtcatattctggtgtataacataatttagtggcttttctctttctttattattattattattattattttaatgggttgaaaattattataagc

SEQ ID NO: 35344 - DNA, 3066 bp, Cannabis sativa
tcattaatgtcccctatctcttatgcatgacgaaattctcacatttataatttatacaataaagttatattattttatatatctagtcactactaaaaaatcccaaatttctgtcggttttacaatgtcaagtaaagaatgcccgacagtccataaaatcgtcgcctatacgagcatcgcgaataccaggtagaatagacgatagttaaaaacagtcgggaaaatagtatgggctacagtttaaaactgtcgcctatattgaacactataggcgacggtttaaaactgtggcttatactataggccacggtgtaaaatcgtagcctatactataggccacaattttaaattatcgcctatagtggtatatcattgataacaattcttggaaaatctttcataatctcaattttttctgtaattggatcaaaccaagttatcccaaactgggaagtagtactacctcgtcgaggaatttgaaaaaatactagtttctccctatctttcgacatcagcatttgttgtcctttgcgataatttggcggtaaaggtctccaattgaagtcaccaagtttaagaatttcataccctttttcagaacttatgacaaatttaacgtcagcaccagtgacccgatcaaaatagggctgaaattggataatcttttttgcccgtgagagaggaagatgatcaaatataatttcattgctcttttgatttcgatcacggcagtacgccccatcaagatgctctatctttaaggcatgtgggttctccagggaagagaatgtatatataattgtacctttcttctatatttgatcaacaaagtacatacattgaattacaagaaattgtatataataagcaaaaaatgatgatttcgattaataaaatatataatatgatcataatataaggaaagtaacaagaagagaaatatatatatgatgatacctttagttagattcttttagacaatttcttgatcacttgatgagtgtgaggaagaaattaaaagaatattattgtgtatatagctccaactccaaacttactgaattcaaatttgccctagcatcacgtacgtcggtctataatctgatctacgtgtttattacagtattgtctcaatatatagtactaattaattaattatatcacctatttataaataaatcattaatccctctcatttaatttattcttattattgcccaatatttttttttgaccaataacaatacaccattcggatatataattcggattactgtttatacataagtactattattactcctctacttgctaagctagcttataactacaactacaagtataaattaaatatttaatagttttggtttattcctgttgtttaattataattacattattattctttttttttttttcactagagaagatgaataattgtgaagtgagcttgtgtgaataacagaggctcaagattgatatttatatatatgagaaagagtacacttgagaagtaacagaaacggttacaagtacagctgttaacaactaacatttaacagtaaataactaaactaactgtcctgatacccccctaaagctatatgtttggtgctcaccaaatttagcttgttacatagaaattgaaacctcggagatgaccgtggtttagtaaaaaggtcagttgtttgatcttgtgtggggatgtaacaaacttcaatcctcttttctactatttgttctcgaatgtaatgcacatcaagttctatgtgctttgttctggtgtaacaggtggtgtcttttgaaggttgatgccgagttcaccaagaagggaacttatccacactgttttagttgcaacagaggctagagctcgatatccagattcagtgctggatgaagctacagctttttgttttcttgaactccagtctattaggtttccaccaagaaatagacagaatccacttgtggattttcgatcatcaaggctagatgcccaatcggcatctgaatatgcttccaaattgagtaatgtggatggcttgaagtgaaggcctaggtgagttgtgcctttgatataccgaagcattctcttgcaggcattccaatgatgaattgttggatttttcagatactgacttaacttgtttacagaataggcaagattaggtcgggtcattgtgaggtattgtaatgctcctatggtgttgcgatataattctggcttgtcaaaagtggggctgtcttgaagagtaagtttgttagctaggatcatgagggtgtcacattcttttgagtcttcaaactaagtcctggctaacaaatctacagcatattttagtagcaattcttttgtagtgtgtgtaatgaaaaaattataagaattaattaatcaaaaccatgtaaagaaaaatttgcaatatattttaactacgagtaataataagttcctttatttttcacagaaagaagtacatgcattcaacaatttattcaactaacaagttgttgatcaaaatgagtactaattctttgtcaaggaaatgaccaaattgacatacttccatttttcattggccatagactcattgaccttatcagcaaatctattaaacaattcatccattatagtctcttcaaattgtgtcaccaaaataggctctgcaacagctcttatgtaatcagacacatatttcccactgttatacttatcattagtactgatcatgaagcctgcatcccaatctatttcgaaagtattaagcttttgtagacacaaacttctttctttctcaatcacatctttcacttcctttgcacttggaaaatatgctggcacgttaaaattctctacacattttgcttcaattatattctgaattattaataaacaaaacaaattaatttaattcaaattaaataaaaatgtaataagaattattaatacatatatatatatacctctttgaccatgtcattcagtgttcttcccagtatttcataaatattgttaggagaatgactttgaatacttccaaggaatgttaatatcatgataccacc

SEQ ID NO: 35345 - DNA, 1733 bp, Cannabis sativa
  modified_base (307)..(314): a, c, t, g, unknown or other
  modified_base (646)..(672): a, c, t, g, unknown or other
atctaatgatctaaattaatcatagtccaattgtcaatagatcaaataaaaatttataatagataattttataatttttttttcatctgtgataaacctagtaacgtgatagggcccatccaaatcagtgtatatatatgagcctatatgtttgcttagatgcatataagaagcacatttattttggatatgtaaatgaactcgaattctaaaaataaaatatcactatgatagttttatttacgcctaattagtttgagcttatccaattaataataattatttaattaaaggttaaattcctctnnnnnnnnccttgtgtgagagttagggggctaatagtagtgagtacaacatactgaaccccagtcttccctcacataaactaccccaactgtaaagacctatttaccttatttaaataattgtattaagctaattatattatcttaacctattaaaaattaattagcaacatgattaatttttaaaataaatgaaattaattaatttttcattattattttcaaattaatttagaaaaacatatttagtttaatgaaataaatactagatagtaatttttagcagttaatttatattttataatatttaattaagttaaaaaatatatttaagttgaaannnnnnnnnnnnnnnnnnnnnnnnnnnttaaattagaatatttttcttggatataaactagaattaataattaagttgattttattcaagatacttcaaaagattaaatcaaataataaaatatatttaagttgaaatttaattttgattaattttagactaatttaaattaaaatattttggatactaaactagaattaataattaagttgatttgtttaagatattttattatttgtttctattttaatacatttaattaaataaaaagaaattatatttaagttggatttttttttttaatttcatatcaacttaaattagaataatttttaaagtatattttattttacgttaataatcactcgaggttaaatgaacttgctgcaataatttttactgttgtgtcttctgagcggtggatgaaacagaatacaagtgttcttaagcagggttgaccctaggctaatgcgggctaggcccgtgcctagggcccactcattttaggggcccaaataaaaaaataccttttaaaaaatatacatattatttttaataatttttaaaaataacatttatcttcatagtaagggtctagattttttttacctatgactcatttcaactcaggactcagctctgttcttaaggttaattgtgatgttgcaatcctttttatcttattttattttaattttttgtcaaatgatttgagaattataggactgattatttagctcgtttttctaattctagtcctagtcatatctccaatgaaaagatatcccgattggattattgtaaactattattttagttaattatcattaataaaattctattatttatttaaaaataaaaaaataaaaaggaaatatcatacctatcattgtttatataatctaagcatttgaatgtaattatttttatcacagtataaaattaaaacattattgaaaaaatatacaaagtgtgtgatttatgataggaattattacatagaaaatataaattgacattttatttacaaaaatactttcataaggtaaagataacatttataccttttatgtgattttaattactaa

SEQ ID NO: 35346 - DNA, 1531 bp, Cannabis sativa
  modified_base (1475)..(1492): a, c, t, g, unknown or other
aacgaacaaagaaggtccatatcgagatatacagaatacacaatataattgtttagaaagggtagataatgaataatctaaagagcttatagctcattgacccacgtactcgtgagtatgttgaaagactaaaagcaacaccttcaacatggtctaccacgcaattgtcagatggtgataatcgtatcgcttataccttacacgacatcaatgggagaacgagagaagtactacttaacatatacttaaacgctgatttatgataaagtgtctagaggaggattgttacattgcgagaagaaagaagcataatcaacataatttcctatagataaagttaaaaaaacgattatgaaaagttacttgtaattatcccatgtgtataaatataaaatgtggggattgtccacgtttcatgaacggttacaagtgataagatctcaaaggaataactgtcatcttagactcctataaatatggacgaccaattggagaaagaaagaaaattatatatgtcctctattttgtaaaataatttattgtattatgtatacaatttatcaatctctgaataagatagactcgtggactacaaagagttaacttcaaaatcacattaaaaattctcttgttatttatttatttatttattattattatttattactatccatttaattctcgaggatattaattataaaaaaaattatttattagttaacaaaaatttgtgttaactaataattttggactaggctttttgacaaataaagtcaaacatgaaatatggggtttagaatttaaattcacacaaatatggcatattaaatctcataaaaaacttaaaaataataaattatcataaaaaatatacaaacttaaaacttttatatttatcaaataaaattttaaaatctcataattgtaaatttctcaaaaatatgttagattaaaaataatatttttaaaaatagaaaataatattttaatattttctatttcttaattttttaaaattcagtttttaaaaaattacttttaaaaaatttggtgaaacacctcgtattagttgtgaaaagtttttttttaaaaattgaaaagttatgaaggctatcaccccatactagtttgtataaaattcgtttatataaaagaaagaatttttacaaaaatattgaattttggataaaaatttataattttattcacacggaatttttttataaaaatactatttttttataaaacaacttaaaataaccgtaaaacaacacaacaaaacaattaaaaacaacaatagaacaactaaaaaaaaccgtaaaaattgatcataacagtataaaacttacacatatttttttttaaaaaaaaatatgaaaaaaattctgccctataataataaaaaaaaaaaattaaaaatttcgtggtgtaaaaatcctaggagtgttcacaaagtatccgatccaatccaatcnnnnnnnnnnnnnnnnnnccaatccgcaaaatgcggatatccgtacttgtgcggatt

SEQ ID NO: 35347 - DNA, 1064 bp, Cannabis sativa
  modified_base (436)..(439): a, c, t, g, unknown or other
tgtaactataacgaatagcgctataaaaaaaaattgaaaaaaaatatttcagcatgtgatttcaaacgtggaggttgactaagacattgtaataggaggttgtatttagcattcatcttcaagtaatttcaacaatttgagtgcactatttaagatgacataaaagtaagggataatttaaaaaaagagaattctatttgtaccccataaaattatgaatacacccaattattaaaaaaaaaaaaatataaacttaaaacaacttttaaaaatcaattttaatatttctttaaattttttttcctcacattattttatgttaagttcaatacttattttgatttcatttttataattttttttaaatcgtgtgtatatatatatattttctaagaaaatttaatataattttttattttaattttttgtcataatnnnnaaaatataatttaattttgtttgagaagtatatttttttatgaatatgaattgaaagaaaaaagtttaaaaaattagtacaattaaagatataaattttatataaaataaaaaatattaaaatggggtgtctttaaaaatttttgggctgtaaataaaattttccttttataaaaaaatacaaaaataactaaaaattataaaaatatggtctgtacgaaaatttcaacatttttactactttttaggtttaatttacataaaatacaatcttttagtatatttttgtgttgtactcttgttattttgttaatttttttaattatatattattttaatgttatttttttattactttcatctattttttttgtttttgtttttatagaatactgtcaaaatatataaaaaaaaaaaaatagacgtaaaaatatgtaaattttttatataattagttttatgttattatcctagtaagggaaagcctagttcattagaggccggttcggcccatatttgttagatctggcccattaattgtgacagtgccaccaacctctcctcccatcactatcgaactacctgcagccgcataggctagcttcctctactctccactcttcttt

SEQ ID NO: 35348 - DNA, 1504 bp, Cannabis sativa
  modified_base (882)..(882): a, c, t, g, unknown or other
aaaaaaaaaattaaaacaaaaccaaaaaacatcacgaatcaaaaaaaaaaaaaacaacattatagataaaataaaccacaactatctgaaattcatttacaagaaacaaaatatataaaaccaataaaataaaaaaaaaaaaacataatatctatatatatataaaaaaacacacaataaacctatttaaaaaaaaaaaaaaaactaaatcaataccaaaatacatcaataataaaaaaatcaacaaaatagaaaagaaaaaaaacgaaatgcataacaaatccaaaaaaatgcaacatattataaaaaaaaataaagaaaaaatgaaaattaaaaaagttaaaatgaaagaaaaaaaccctaaccttgatattcactcaacacatttcaaaagttttgaaaaatgaaaggaaaaaggaaaacaagtgataccatcagtcctctaattgatgtgttgtagcttctcaggctaacgtcacgcgcgcacgcaaatatagaggagaggttttcaaaaaaaatgggccgaaaaagtagggaaacaagcccaatataaaagacgttaaaaaagaaaactaccacaaaaaaacggtaactataaatcgagaaaattaactaacgaaaatgacgttatttttgtaaatagtttccaaatttaggtggcccatgaaattttccctttatttaatggttaaattcctcacttttgggtgttgtgtaagagttaggggccattagtagtgggtacgacatactaaacccaaccctccctcacacgaaccaccccaattgtgatggctcattgaccttatttaaataattgtattatgttaattatattagtctaacataattaaaattgaattagcaacataattagttttnaaatatatgaaatttatttttattagattattttaaaattaattttagaaaacacttagttaatgagatatattgtagatagttatttctaagaattaattatattttttaatatttaattaattaaagaaatatatttaagttgaaaattaattattttaattaattttagatcaacttaaaatagaatattttttttagatatgaaattagaattaataattaacttgattttattcaagatacttaattatttgattttttttatttaatacatttaattaaatagaaaattaaatatttaagtagattttatctagacacataaatattagttattttcaagatatttaattagatagagaattatatttaagttagaaaattttaatttcaaaacaacttaatttagaataattttcaaaatatattttatattaatttattaatcatttttccacaatttcgaaattgcatttatttaatgaagataattttgaattttttcggtttttgaaaaatagattaaagttgaaaattaattattttaattaatttaagatcaacttaaatcaagtaaatttttcattaatgatttattataataaatagactaaaatat

SEQ ID NO: 35349 - DNA, 2076 bp, Cannabis sativa
aaagtgaaggaatccctagtgcaccagaaggtatccaaggttcttggagatgagaaactctttgccaaaaagaaactagaggaaattagcaaaaatggaggagacgacacactacacgatcatcatgtatctatcaaatagtgttcgaagaaaacttatcgcagagaagatgacaaagagagtttggaacaagttggaagaactatacttaaagccatcaatttctagcaacattaatttgctagaaaggttatacgagtttagaatgatttcttctctttctttagattatatattgatagatttaatgagattattgtaggattggataacataaatcacaaagttgatgaagaaagtcagaccatcattttgctgagatcactcccaattgcatattaagaagtaaaggttgttatcaagtatggcagagacgtgagtgcattggagaatgttcttgccacactaaaatagaaagatttcaaactacaattggaaaaagaatccaagaaagaagaagtgtacttggcaagaggaagatcacctaagaaaggaagtgaagagtaaacaccatcactctctatcaagatcgaagttgaaagagaaggaaacaaggaaatgtcacttctgtggaaggtcaggacacctccaaagattttgcaagaagtacaaggagcaacatggcttcaacaaatctcacaatggagataggaaggacaaccgacatcatcaccatgggaaggactgtgctacaatcgcggaggatagtgatgactgctccacgaatggagagttgttctctatctccgtatcctcaactaacagggagtgaattcttgactccagatgcacttatcacatgtgtccgagttgagagtcattttttgattataaattagttgatggaggtaaagttctgattggtaatgatcattcatgcaagatcattggaaccgagaaggtatccatcaaacagtatcatggttgaattaaaggtgctgacaaacgtaaggcacatcccagagcttagacaaaacctcatttccgtgggtgcgcttgaagatgaaggatagagatacaattccatgcgcggagcttgagaatcaccaaatttggttaaaatgaaaggtgaaaagatcaatgctttgtacgttctctaaggggagactgtcccactgaagaagcaagtatggttaaagggctaaaatcagatatgcaactgtgccatcatagacggacatatcagtgaataaggtctcaaaaaactgcacaaaaagggtataattgaaaaattaaattcttgtgctttaccatttcgtgaagcttatgttttaggaaaaaaacataaactgaactttactccggcaaggcacacaactaaaaagatacttgaatatgtgcacgctaatctttgggggccatacaaggtgcctactcactccgatatcaatattttctttcaatagtacttaatgactatagtaggtgtgtttggacctatttgctagcaactaaggatgagtgcctggaatagtttagaatttggaaaaatcatgtggaaaactaatcagatcttaaaattaagaacattaggacggataatggattggagtttattaactctgaattaatttgacaggttgtgtcaagaatttggaatcactaggcatagagccgtagtgaagaccccagagcaaaatagtgttgctgaaaggatgaaccgaaccctattaaacaaagatagatgtttactgttcagttctagattagaacaacctatttgggggaggctctagcaacaacaacctatcttataaatgaaagcccaaatagtgtgatagacttaaaaacaccttatgaaatgtggtacaatagaacccctaacctaagagatttaagaacatttgagtgtacaacatatgtacaccaatctattgataagttggaacctagatccgtgaaggaaaattttctaagttatgccttagaaaccaaggggtatagaatctacattttcaagaagggtaaaccaacaagtttattgaaaacgtaattaattaaaactttatttaatta

SEQ ID NO: 35350 - DNA, 2143 bp, Cannabis sativa
tgccattgttatgcctcgtttcaaagattgatagttagcaccattacgaactgtggagagcagaatgagtctagggtgatctgttgtgttgaggaataaggggatggatacatcttcatgagccaaacgatcgaaaatcgaagggcattgtgtaggaacaacaagttgagaattatcactaacaggaggatctggagaagagtgaactggtttgaggttgtcttcttctgtctgagatcgcaatcttgaagttggaactcatcgtggagccattgaagtgttgactgcaggtgcaaaagtagcatcaagattggactccaattggttgtgctcagttgtggatggaggaacaccatcttaagagcgtgtggatggccttgccattgttgcagtggccaaggtttttactgataccatattaggaaaatagagtgtagcggagagagaaaatcttgatgctttgttttattatcactttcatgaatattacatgtagggatatttatagagatacataggagctaagttagttggagagataactaacttagctcaaatcctaacttagatcaaaccaagataagcctaactaactgaactaagaatgtcattaactaattttaacagaattataactaatagtaaactcgtaatgagaagttactaatgggaagagttgtgttcagcaaagaggtcattgctaagttctttccaaacgtttctggtcgtatgtagaaatcaaaaattgattggaaatttaaaatagtcaagacagtgggagacaacacctttggggtggtgtgttattattagtggagtggctagattcttggtcttggaataactttgtcccttgttggattaaaatgaaaggcttccctacaaaaaaaaattaactcaaagcaatgttaaatgtcttggtgcgatggcaggggatgcccttgaactgcaatgaggttctaatcaataagttttccttaatggctatgttcagattcaaattggctttcctctgaataagagtattattgtagggaggttcataccgtctgatggtaagaaagtcttggtctagttttagttggaaagattatcattactatgttttacatgtagcatctggggtcatgatcaaaatgattactctaagacgttgttggtgaagatgaatacgaacgacgagaaatttcccaagtacagggtctagttaaatgataaagatccaatgccaaattgatttgttgcatttaatcagggacaagctaaaataaaaaaaataaaaaaaaaaagggaaatggcaaacaaataggggaagctagtagctttggttgcggacaaaggatagctaacctgcattcacctcatgataaggaatttgatagtactattacgatggagaagacaacagttacaaatgaacgatgttcgtgtgagaatccactaacccacgatcccagtgagttggttcatttgcaaccacttcgtcaaagtcaagtaagaaaagagggtgggaattcttgtgggtctgactcgggaaaatagagtttatatagaatgtaagttaatggaccacgtgactcctcaagctaagacaaaggagagggtcctgattttgataaaagaaatgggcctgaaattcatgattgtaatgactgcatattgactcataaaaattagtaactcataaatgatttatgtgaaaattaaatgaaatatgagattttatataaaaaaaaaaaaaaaattataaaaatatggcacttataagtttgtcactcttgtatggtatttttttttattatatttatttagtatttgatatgctatatttttgtaaaacctaatatccaaacccatatttcatatttttatttctagctaattggttttatctttttctttgatttattttgcatttgcattttaaggtttctttctatttgggacatttacaccaactaataattttttcttctgctgtgacttagttaaaaagaaaagaaagaaagaaatcaacattatagtttcagttgtttgtgttagggctggacatcgggcggattgatcgggttttgaattcacaagtttcgagttaaaaatcaacccgaccggtgaaattgttttgggtttgtggattttaggc

SEQ ID NO: 35351 - DNA, 2132 bp, Cannabis sativa
aagttgaaataattttgttggaaacaatttaaatagggagtcgggtagaaatagtttttttaaaaaatcagatcaagaatttttttttaaaagaaaaactaacctattcattttttagaaaggtaaaaaaaatgagatcatgcctagattataggaaaattaaaaataaataataaaaattctatgtgtgatacctcatgataatcaaataaactacaacaaattattaccattaaattaaaaatcaaaggtttaaaaaatatcctcatgagtgagagcaaaagtgatgctctcacgtaaaaattttcctatatatatttattataccattaattttaaaatacttttttttatttgtatttgttactttttgataattacataatatactaacttttgtaaaaaattttttttatatttttacggtattttgtaaaaacaacacaaaaaaattttaaaaaaaaaaattatataaaagtaatagaaaaataatatcaaaacaacaacaaaaaataatatataaataatagaaaatcaacacaaattaataagagtacaacataaaaatacaatacatcaaaatgtcgtattttttagaactaaaatcatgaaaattgtacaaatatttaaaatttcgtacaactatttttataagtttttttgttatttttgtgtatttgtgaaataattgtttttttctaactaacattttaatatcaatttttttttttcgtttcacttttcagagggctctctcactctttatttaatttcatttttttttaaatggactcactctttatttcattatataaaatttattgttgtcattgtatttctaattgtgtttggttgttctcaaaatattttatatttaaagccttacattagtgacttgaaggatactgattttgtatgtacttagtgaactagttactaatgttactattgtagttttgatctagtctacggttacagtttgttggatttttttaaaaaaataataattaaaaaaaattcacgctaaattttattcacttttagctttattgtatgtatttgaatttcttaatatccttttttttttctttttttaaataagcgtgcatttataaataaagggtaaacctcatggtcattacaaaagagtttaatcaagatggaagaaacaataaatccttcataccgtttgtgggtgaatgtctacttagctgtgtagcgaaattacaagttctactaatattagacaaaatacaacttacaaaagaggaaaataccttttacaaaatgaaacatagctgacaagcctccaacaagactccgtttcgtttagcgagttgacccagggccggcccaagcattgggcagcttatgtcattgcacaaagctcccatttttttattttaaaaagaggcctattttttttcctattatttatacataaataaaaaaaaattgattgaaaatttatgaaacaatttttttttttaaaaaaagctactaatagaattgtagttttaatgtacatgatttatttatttttttttctaaagggcccaatttaaaaatttcgcacaaggcccccaaaatgcttgggtcggccctggttgaccacaaccttggagtcgctctccacaattacaaactagtggtttttagcttttgcgacttccaaagccaaacaacaggtcgctgcttcaccacacaaagcatcagaaaaatccaaaagtttaatttgcacccgaaccacctcgccccgataattcctggccacgactgcaatcacatgctatctagtcaaactttaacatcacaatttagtttgagccactcctagggagggagccaaacatccaacaccgcagggacatggggttagttcttaatatctagatattgattattattattttcctttagttgcaattttttttttttttttttatagtttgataacaagtttatattactttattaaaaaataataacgatatttgtaaaatttttacaaaaaatagtgttttatataattatcttagattaattagattttgtttttttaaatttgtatggtgttttataaaacaacacgaaaaataacaaaaaaaattatagtgctaacaaaaaaaata

SEQ ID NO: 35352 - DNA, 1418 bp, Cannabis sativa
tttttttttttttatttttattgagaaaagtctatccattagatgaaatcagaatagtacaggatacaattacaattgtattttttttttttttttaatgtactttcatttcatgtagtattatgttttattactatttgaagtgtttatttatttattatttttttatagatgtgaagtggttattgaaatccacatcgaagaagagtgcaaatgtattaagaaagaatgaaagaacgaatgtaaatacccgttttcaaataagagtgcaaatgaaatatgaacttaaatttgattaatataaccaaagttttttattctttttaaaatagaagttgcaaactttatgaatgtaatcgttcaataaaacagacacaacaagatcaacaagatctaggacatcacagccgctaagaatatgatcaacataaaaacaaaaggtgctcaccaaataatgaacaactctaaccatttccggcaccaatagagttgcgaacaactatatgaatacaagacaatccaactcaaaaaccaccctatcccaattcatctatttatccaccttggtgcctccttcactcccataacctatgctaattcaagctttgctgcaccttttcgcccacagacagcttcaatcaaccaaccagaatcattacccgcgaccatccaaaaaccaaacttacacaagagacttgtagcatcaacattaatcacggtcttatcactaggaggcttagtccgtttctcactaccatctccctccaacaacaaacttagaatgagatgaagaactcgcctttgatcagacaaccattggtcaagattagagttagctaactctaaaacactactagtgaacattatttgttcattctagagtagcttgttacgagcttcccataagacccagcaaatcattccaatcgaacctaccctctctttagaaactgattttggtaccaccgcaagccaattgacaaaattattactaccgtcatttgggatcaacaacccctaatattaactcttttgcccgacaccaatctccacaacaaattcttaacctttggagtaacttttaattgccaaagtttgcaacaaaagctagaattgttgtcctctcatttatctcttgtaggcttgtagcaatttatactcactataacctccaaaaatctcaggagaccaatgccactaaccctcataatgtgataaactaacacgatattgaaaatgcaaataagtgataaaaagttaaaatataaaaaaatatatttttgtgtcaaaaggtgatgcaaatttaacacatagaaaatgttgtgtcaaatttagcacaacatttgttatggtgcaaattttgcatcaccatgagagcatctccaattgttgatctattgctaaaatatagctcattt

SEQ ID NO: 35353 - DNA, 1358 bp, Cannabis sativa
tactaaaagcatataaaatatgaaaaaaaaatgagaaatatagatatattcaacaaaaattaataatataaagtaaaaattctaaaaatatatattatttttatttgttaaaaaattataactaattgggtaagattaagttcattaatcatccatataaaaaataaattatactaactttgtgacaaacaaaaataaaaaaaaatattgatatatttaatgtaaaagtatatcacccacaataatctctaaaccatgtgggacttttgtaaagtgactctcatattactaaaagcataaaaaatatgaaaaaaaaaaatgagaaaataaagatatattcaacaaaaattaataatataaagtaaaaattcaaaaatatatattatttttatttgttaaaaaatttaatatttctttttaaaaaaatttaaatatttgacaaagattgaatagtgcaaacatatgtaaaaataaataatattaactttggaacaaataaaatatataacctataaatttaacatataattttaattatttaaatacattaaaaccaataattataagaaaatacttttttataggaaaaaatatctaaataatttttttataattattttaatttttttttttgataattattttaacttgataaagattgaaaaatacaaaaatataatgcattcacttgaaaaaaaaaaaactaattaggtaagaacaagttcatcaattacccacatagaaaataaattatgctaactttgtgacaaacaaaaataaaagaatattgatctatttaatgtaaaattatatcacccataatagtttctaaaccctgtgaaacttttgtgaaatgactctcaaattaataaaaacataaaaaaaaaatgtgaaaatgagaaaataaaaatatattcaacaaaattaataatgtaaaataaaaatataaaaataaatattatttttatttgttaaaaaacttaaggattttttttagatttaaatatttgacaaagattaaatagtgcaaaaatatgtaaaaataaataatattaattttgaaacaaatgaaatttatataacctataaatttaatattcacaatagtctcatctcaccaaaagtacatataaaaatatatagggatattggcggctaaactacctaaattttacggtttgtaacacttaaccacaaaaactgaatttttggcggctaaactacctaaaccctggtttcgttttgctctgcacacttccgtccacgtaaaccctagtgtaacgccctgtccaacagggacgccacgtgtgtgcactttatttaaaataccaataattatataagatgtaattatacta

SEQ ID NO: 35354 - DNA, 2742 bp, Cannabis sativa
  modified_base (26)..(50): a, c, t, g, unknown or other
  modified_base (1357)..(1361): a, c, t, g, unknown or other
gtcaaaaaagttcagggggcacgatnnnnnnnnnnnnnnnnnnnnnnnnnaaaaattactaattagcctaaaagttattctaccctttagaagtaaaattgcaataaaagttatttttctaattttttacgtaaatttttctaaaaaataataatttttgtatgttctcaataaaatattaaataattgtcaatataattaatattttttttcttattatattggagcacaattataaataataaatcaaatatagcataaacttattattatttttttttgctaaatttaacaaaaaatttagatcataaagggaaaatggtctaataattagcaatgctctattaataaatattgatccacgcctgcttcaagaatcaaagtgagaatttgtgtttttcacttagctactaataaagtattttgagttaaaagagaaaaaatggataaaaatactaatataagataataaattaaagacatataaaggacaaacaaaatggacggcttaagagaacaagcagaaacctccaacacctaaactaacaaagcattacaagtatcattagcaacaaaccaacaacattagtcttattccccagcctcaaccaacaactaatttgatacttatatatttacatgtttactgcacagcttattattttattataaaatataaataataataaaaaaatatgataactctatctgacattgtcatctatatatacccatatgaatataaatatttacagcaccctcctaataataatttgaagtcatggatgtgtttagtttggatgtttatgtagttgtgttatctagatggtaagtagtatattatactcttaccatggcctacacatgcctgtcttgtagctgccgctataaataaatcgtatttactaatgatctatagtatattaattagaaattcttgcaaacaaaaaaaataataataaaaaaaaattaatgtttttcgtgcgaatagatctaatatttatttgaagaaacacttaagactatattaaaatttgggataaaatgaataaggttcatttcaaaaccaattggtaatagaagaaatagctcattcatcttaaatatgacaatttaattatacacattaacaatgtggaactaattctaatagagctttaataggcccgttttagggatgttcataaaatacacaatttaattcaatctgtaaagtacggatattcacatttatgcggattggaaagtttaaatccacaattgtacagattgaatattaatttacgtataaaaagtaatcgatctaatctaatccacacatatttatatatatatattaaaaaaattatatatacannnnntattttaatataaaaaataataatttaaaaacttaatcatatgatataattaaataaatttcaaaacatagtacacatcttatttataagaaaaaaataagctaaaacaaaattaaatatttttttttatgcatacaactattttttttcttacttcaaatttgttattttttgttttatttattttaatttattggatacataaaataacaataatttattttattttattattagttatattaaaaaaaattaataaatattaaataaagtcaatattaaaaagtaaccaaattcacttgtttcttttttctcaaagtgtgataaagaaattgaaaagttgtgtcaaggcttcttatgggatttgaaagataatagaactaaaattcacttgacaaattaggaaaaggtgtgccttccgaaagtttacggtggtctcggtttcaaagacggctcaaaatgaaacaaagcttttcttgctagattcatatgggatttaatgaataaaaaagatcttctttgggttaaatggatcaactcgatatatatctcaaaggaaaggatttttggaactataatttacaggtggactcgagctggtattggaggaagttatgccaaataagaaaagattttagcgaggttgacttattaatggctgctggacaaggaggaatcttcagagctaataagctttataactcctctttacgccaggtcatggatcttactgctacaactgtttggagcagtctaaacatccctaaatagggatttatattgtggcaaacagttcatactaagctgctaacaagagatatgttagataggttcaacattcaagtgaataatctgaattgtgttgtctgtgatgctgaagcctagtcgcaccaacacttatttttttcattacaggctgtcggggttggtgctggaaggtatttttagatggctaggattttttggttggtcgtcgaacttcaacaggtggttctcttggttgtgctctgtcaagccgagctttattgagagagtttgtgtgttgtgtttgctgcaactatataccacatttggaggaatagaaataattgtttgttttctaacttctctagcacgattacttgtttagtgaacaaagttaaaaaaagatgtaaaatatagattgtatatgcttaaagatagaaaatgatccaaagtggaagtaaagttattacaaagattgatttgtaactaatgttggtaaggttgaggcttcttgttgtgagctgaagtgcttgagtttgtattttggttgttcgattaatgaagtttcttcttcttgataaaaaaaaaaaagtaaccaaatctaaaataatcgatccaatccgcacttttacgaatt

SEQ ID NO: 35355 - DNA, 4586 bp, Cannabis sativa
  modified_base (2510)..(2526): a, c, t, g, unknown or other
  modified_base (4273)..(4278): a, c, t, g, unknown or other
cattttaatatcaccaaaaacaaaattattccaaaattgagcttagaaagttattttggtagagctcaatatatcactttgatctattttgtaaaatataaaacccgaagtctcatttaacaaaaacaaatgctaaattagtctaattatattaatactctattttataggattcttatacgaattaatactattttgaattttatgttttataaaagttattgaatatactttctgttttgttatatgacaaaataaacctgatcttttttgaaatggattaaatagaaccatgatctcagttttcaatatttttttttttaatataaccaacttgaaaataattcataacacgaatagatgcagaaatatgtaacaagttttattataacacttttaaatcagactattagtaagttttattttaacaaaaaaactattttataatactatttagtactattttaaaaaatacaagttctatttgtcatttaataaaacaaataatcgaatcaataatttttacaaaacataagatccaaaatagtatcaacccttcatataatccaaaagttatgaaattacataagaaagctatttggtttgttatatcataatatcagcatgagaataggtaaaacaaattatctagttgaaaatcatagctgctttattttttattcatatcatttatctaacctttaaaatttgtaaatccatgtttaatccttaggactctaatgtagggttaagactttgtcttgtttaagaacaaatctcattatatacttaacatgatcttatacttaattaagcttactaacaacaacacaattgtattaagttttcacacaattatattctcttttcaattttaaactttcctaccaaacaaccaagtgggtcaatctatttcttaagaaaatattcaatcaatcaaatgaacatattagaagaagaagatgaatcagaagataagttctgaaatagtaattaatcatgtctacaacacaatatcatgtaaagccatatgaaaacacaaaacatattgttaaatgaacacaaagaaccaaagatataggcacgaatttcctgtttcatttggcattgttggctgatgatgataccaggtcaagcctcgggcagtctcatcaccacttcggatggtggtcgcaaggtacaaaccatttcttttgtctttccaaagtaaacctgtaaaatagcaaagaaaagcaccaacaatatttgacttcattaaaataggattactgggcgtattttgcccaacggttttagataacggctctaaagaaaatcagaaagaaaggaagtttcgtgttgttgtacctgatcaagagaattcctaagcttactctccatttcttctatcattcttcccatgttacaaagatggccttcttcaattgaaaggtccatgttcatctacaaaaaaggagaagtgaaaattgaaaacaattcatttcttaatttcacaaaatcattatgtaacaaaccaagaaaatgtagttctttgacaagttgacaaagaatgaagaaatcaaattatgaaaatatatgattattactctgttgttgttgtcattggatttttaatgatgccttaactttaatgaggggacattacaattttttggacaagggatctttattacttctctatctgcatctcatccattaatttcttcatttttttgtagcttttaattttcatatcttgaatattaagtccaaaaaaaagggtcagaaatcctaactctctacaccagtcacagttattttctcacttgtttccaaacaactttgcttttacataacttgtacttttgtttggtatttcatttatggcccttcatttatttatccttctgtttcttaagaaataaaactaacggtagtcaattattgtaacattacataatcaaagcataacaccgtttcaatattaattccccttatatcaaactcctataccgcttgagctaaagtctaaagaaacccgggatgagatggatggccatgccatgtaaactcttgtagtatatgtgttggtgcaaagagcacaaattcagaaacaaacattctttttgtacagctacaacttttaaaagaatgcttcaacaaagatgaaagatgaattcaaacacaagtacctctcgtctaatcgatccggacaaactgaatgttcctgatgcatcattatttgtagttaaggacagcatgacagtactggtcagacggtaatgagctgttccttcctcctctgggcccacctaaaaaggatattcagtgaagggtgttaaaatgagaaaggcagtaaagaagagattgttgttttttcataaatgttgttaaagtcatcttaatgaagttcacctcaataacatggatggcatcccatgccccttcctgtaaataacccctcctaccatctcctgtcttcgagccatcttttcatcataaattataagaaattagagagagagagagannnnnnnnnnnnnnnnnagagagagagagagagaaaccataaatcagtggctgcctgggctacagtaatgagcttacctttctttattaaaaagcaggcaacaaaaccttcattatcatcttcccacatgtaaactgatgaaatcccaccttcataatacctaccaatacattgttaaccaaactgctaagtaaatacgtataataattctagttttctttctttgaagattagaatggtaaaaagttacagaaatattcatcataaaagaaatcaatgctaataatgaggtaagtaaaggacctcactggtcacgataaatggtaaagatgtcgtttgcttcgatttcaagttttctcaactctgctgaaggtaaggccccatcctctaaagatggatggtatttgtttgaccatggtgatctatacaaacaaagaaacgtattaaaataacagaataaatatctaatgaaagctaattccgaatgaaaagagttataattgagagcaatggctacacctagtgaaaatttccactccaaaatttgaacctacttattctgtcaattcatatttactcaaatcaacaacagaagaaaaggcaaagcataaacagaccccaaaagcaactagaagaacagacatattatgtaattgtctctctaatttatgaaaaagacaacagtgtaaaaagtatccaggtaaaccaatatataggccaatttactcaaaaaaatccacgaactttgagaaagttaaccacttttcaggttggtgaacttcatactttaaacttatcaaagtagaaagagagagagaaatgattactttacctataagagtctgcatctcgattatattcacacaaaatgaattcctttccagaatccacatcacacaagacctgtttatcagtcaaagttttcaaagttcaggaaaaatttataaaagcaaaatattgcatttatcaaaatccactcaatcaattcctccaaattatatataacagagaaaattcaagtatttcattaattaaaaaatgggacaatagaatgccaatgattcacactacaataccattcacataaaattaaataaataaaaaatcccgaaaaatgaactaataacatgttttgtaagatcaccaactcacaaatataattacattatatatgtatgtatagatttaaaagcagtaaatgtatgtaatcatttcttatatccacatacataattaagctgccatgatagtaaatattaggctccaactcatagaagctaacaaaaatttaacaaatcgaaattaaaagtaacttagttataagaatttccactgtttgtgtctctgtaattgattttttaaattcaaattatttattaagtaatggagtcataataagatcaacgctaggtagttatgatgtattatcttcagaaacaaaacagaaaatttaggaggaaagaaaccctaaggaattgaaaagaagagagaaaaattgaaaaagtggacctggagaggctgatcgacttgagagaggagatcggaggagtgttgaggtaaaagagagagaagagcagagagagcggtctcagtgtgctttggaggaattctcctcatcagtcccattgctgcctccatattttctttctcactttctttcgaaccaaacagaaaaaacttgaatggagaaaagccgttgttatgaatatgatatgatgagatatgtgagaggaaggaataaaccttttttttttaaaaaaaaannnnnnaataataataattataatataaaaaattattattattttttggggacacaattctcctagtgagaagtaggtatgcacacgagtcggagaatttgcgaagaatacttttcatctcaatcaccgttaaggatgaaattatttgtgagaaagtctttcaatctatatatatatataatataaaggaaaggacaaaataaatttaggtagtattttagattttttttattctattttcaaaattttgtagtttttttctattttgtttagaaaacaactacaaaaatacttggaactaaatgtcccacatt

SEQ ID NO: 35356 - DNA, 1936 bp, Cannabis sativa
  modified_base (1883)..(1896): a, c, t, g, unknown or other
tgtatgtgttatatatatagagatatgtatatatatatatatatatatatatattaatatttatatcatatatataggttgagaattatatatagagagagctaatataataggtgttgtgggtttttacctaatgataggttaataatttatagtcattgatttaattaaattgcgccaattaattcttaaaaacttaaacatgataaataatttttttatttataattaattttaaatattatcaattagccctagctaattaacaaaattttacagctaactccaaacctatattttttttacttatttaccttatgactattataatattcaattaattactttttttactttggaatttatacattatttttaataattttattttcaacttaacacaataattatagcaggaaaaagtataaaatatttaagttgtttaatcttacaataatcaatacaaccaataatataatcatagtgtaagtggtaaaatcatcttatatcaagtataatgacatgagttaatcctttcaaaagacataatttttttaatttaaaattttaaattaatttaatatttttttaaacaataatttaaagattaattttattttattatgtattaattattgttaaaattctaatcatattgatagtgattctagtagcagttatataattatagatttcttatataaataagagaattaggccactgacaataatatatttgattaaagtatttcatttgctacatttattgttttagagcaatataagaaactaacaatatctatatctatatttatatatatatatctaaaattttgaaaaaataaatattataagtaacataaaataaaaatgaaaaaataaatcatgtctcaaatttattttatgtcactttagattcatagaataatattctatattataattttatatattataacaattaaactgaaataatgtgaaaaaaatcacattattattaataagtaattttttttttaacttcttaaaataaataaatatttttcttgtatttaacataatatatatacatataatattgtcttatatatatataaataatattatacattttaaagaggagatgatgaaataatgtttcttgacaattagagtcgccaacaaatatatatatatataaatattaatctttattttaattcttttttgttatctatattatcattttatatacataaatttattattttataatttgatacattgtgtttcattttttaaataaaaaatagtactgaatcgtagatatttactgaaatttttagaaaccaaatattttgagcttaagaaagaaataatatactaaataatagatacaagatttttatgtggttcagacgttaactatccttagtctacgagtctatttattagccacttcggcaggcaaataataatacaggttggtatacaatggactgaaactctttatacctcttattcatcttgaagaagaagaagcttaatagaaattttttatggagttgttacataagttgtatatagtgtttatgccttcggagaatttccatatcttattgtatgtagggatatttatgggctagcttcccttcacgtgattattaggctgatgttaggggtaaaatctggtcgttattgatttggtaggtggtcgattcatcacatggtattaaaaggtgtcagtgtgtactgtctaatttcctcacactagtcgccctagggccttcccttttgaattgcccttggcgatggtcgttggatcacccgagtcggtacaactaggcgtgtatgcttcatactacgacgtaacgtgggggaaaagtgttggaatttattttacnnnnnnnnnnnnnntactcacaagtatgttgtttaataccctaaatatgaactt

SEQ ID NO: 35357 - DNA, 964 bp, Cannabis sativa
tgtgactaaggaaaatctaatggtcgggtaggttgatgctgaatacagcctatcagatcctattacataatttatgccaaatactatatatgatcaaagacatcaagtatatgagaatatattaaaatgcactttagtattatattagagcatgtctgggagtatgttgggattttatgccctaaataaaacccaattcaatgtaatcatatttactttcaataaagataaaaaatcatagcacgacctagtcataagctttgttcacatattttacacgtgattatagatttaatatataagttctattaaatcccaaacatatagttattcacgatggcagtgatgtcatcacaatagaaaataattgtgattatatgattcaaattatttagtccacgatttattaatgcattagatttacactgacgtaattatcaacaatggggtttacttacacttggataagttaaatgtctttgttaggacattagtaaagtaaataacatctgatgtattttctatacatcaaactggaccgatatttatagcagaagagatatcgtaaacttaccgtaatatcttttctaggtaaatctctaatagttgatcttagatcaatgctcttaatcttgaaatggttaggttctagctttactgtcttattcttattctttgattagttcattcaaaacctgcctgtaggtttggctcaatacttacatcttgatagcagggtagtacaactgagtgggagtgctagtcatagatatggaatctatagcttttgtaagtagataaaagtgaaatgatagtttctttagagcttggctaaatacgtttaaatgattgaggtctcattttggtaatcataatagttttccaaaatattatttacatgtagttatgtattttaaggataaaatacattgaaaggtaaaacggtaatttagtccctattcaa

SEQ ID NO: 35358 - DNA, 3923 bp, Cannabis sativa
cataaaacccaacaatgtcgtcacccatgaagcaaaaagaagtccaagccttaacaggtagaagtgcagagcattaaacagatttatttcaaaatcaaccgataagtgtctaccattctttaatgttttacgaggcaacaaaaagtttgaatggacagaagaatgggaggaagcttttaaaggcataaagagacatttatcaacacctccagttttggccaagccaataactggagaaaatttatacctttacttagctgtttcgaaaagtgtaatcagtccagccttggtgcgagaagagggaaagcaccagcaacccatttactatgttagtaaaaggttactgggggctcaatcaaggtatcccctcttgaaaaacttgccctatgcctgattcatgcatctcataaactacggacttattcccaagcacatcccataaaagtcttgatggatcaaccattaagacaagttttatcaaaacctgatgcttcaggaagattgattaaatgatcaattgagctggggcaattcgatataacttatcacccgagaatattaatcaaaggtcaagctttggccaatttctcaattgaagggatagtctccgaagaagatccacttgtaaattacaatgcaaaaacatggaaattatatgtggatggagcgtcaaatgaaaatggctcgggtgcaagagtgataatgatctctccagacaactttaaatttcactacgcattaagattccaatttgacacttctaacaaagaggccgaatacgaagctttgttggctggtttaagaatggctgaagcgttaaaagtcaaaaatcttatatgctatagtgactcgcaattgattgtaaatcaagttctaggcgagtaccaggtgaagggtttaaagatggaaaaatatttggagaaagttcggaagaacttgcagaagtttaattatttcaagattgaacaaattccaagagaacataactcaaatgtcaatgcactaacaaagttggcctcacaaaatgagattgatcatttaaatttggtaccagtggaaattttgagcgatccaagtttatgtgaaaaggaagaagttgagatgatagatgccctgtctacatggatgacacccatattcaaatatatactcagtggagaacttcctacagacaaaaatgaggcacacaaactcttgtattcagtacctcgatatacaatagttgagggaaaattgtataggaggggctatttaatgcctctcctatggtgtgtattgccaacaaaagcaaatgagataatcaaggaaaatcacgaggcttttgtggagatcatgtaggttggcagagcttattaaagaaaattatctgtcaagaaaattattggccaacgataattaaagattcacatgaatctgtcaagatattattggggcattatcactctagtttccataacatgcaaaaagttctcgattttgttgtcaataacataatttgtaaatttggaatacccattaaaattgtatctgaaaatggaactcagtttgatggtgaattgttcactgagttctgtgaaaggaataaaattattaagagcttctcatcagttctaagaccccaagcaaatggacaagtagaagttgttaataaaaccttaaaggatactatcaagatgaagttagacactgcataagggagatgggtagatgaactaccataagtattttggtcccacagaacgacagagaaaacaacaacagggcacactccattctcgttggcattcgactcggaagcaatgctaccagtagaagttaacattgcaatccacagacgtgaattttacaatcaagaagaaaaccaagaactccttaagttatccttggatttacttgaagaaagatgtacttagtcgcaaattactaatacagcttatcaacatcgaatcacgaggtacttcaacaaaagagttaagaaaagactcttcaatgttggagatttggtgttaaaaaagagtatttgcaaacacacaagatgtgtctgctggagtgtttaacccaaacttggaaaatccttatgttatcgaggcagtagtaggaactgggatttataaattggctcgacttaatggcttgctaataaaaacccactagaacagtgaacatttgcgaccctattaccagtaaatttcaaatgtaatgttgtatttatctatgtaacatgtaaattcttattattttcttattatcaacaaagttaaagtttttccaagtaattacaaagttttctttaaaattacttaagagacatatatatgtgtatatcaaccggaatttatctagaaatacattatatattacaaacccacccattttaaaaaaaaaaaatcgagtaaggataattgattaaaattgtctatggacaatataaagtcaaaaaaattgaaccttttcttcagaaaggaaaattgaagtagcagttgtaaatgagattaactcataaaaagaacataaagctacatgtgaagctaaatatttaacggctcacattattcatgcatgtattataaacgaggcacagagatgtcttgaaaaaataatacttaacctaaaatatgaatagatggcttaattattcatataagcaatcaaaaaatgtacaaaatagttcataaagtgaattattcaaagtatgtttaagttttcttttaagttatatatggcagattgaaattgctcgcataatattggataaatagtgcactacacgcgtaacataaggcagactataactgctcacaaatcgaaaagcataagcagaatataacagctcgcacgcatacttagtagattaataactacttaaagaatatcaaaagaaaagcgagatcattggaaatgctttcttaaaatatcttaagttggatcaaagtataattgtttaggttgtgaataaaaatgcaaataaaaaaatgtatcaagttcaaacataagatacgagataataaaagtaaagatagatatataaaaaccaaatttggtcatccaacaatacaaaattgtatttgcaataaataaagctacaaggggcaaaccattgtctcggcgaaaaggccatttttctaatatgaaaaaaaaaacaagttaaaaaccaagtctacatagtgggagacgtggatggatcttcttggtctgcctcaacctcttcttcctcactgacctcttctattctggtcttctcgcagaaggcaagcatatcttcagctcctggacccaaaaagctgaagtccatgtcaggattggctgactaggtttgatatgtgcttctcctagaaatactgttgaccctatttttggtgtcaactttggcatcctcaagctttttgttagcctcggctggatggtcttgatggaatcctcaagctctttgatcattttctagtcatcttggcattgtttttcagcttcctcccttacacgagaaagttcaaactttgagtcattccacttcttggccattgtgtcccgatgctctctagtctggcgaagttcagtctcgagcattttaactcgctgaaaccctcgatgtgagcagcaaaggaaagaagagatgcttgcaagaaaaagatggacaataagaaagaggtataaagacaaaaaggaaaaagaaaaagagactaacctgatgcatgaggtcgtaacttctttacgcaagaccctcaaaattaccatttgtaagtagatcccagtcgctggacttaaaggtttgataacgccgccaaccgtttgtagcatgtagcgagcagagttgtgaaccttcagtcccaactttgagggccaaagggcaggagggcttgagaagaaccatctccaggcgagaaccagagaactttacttggtgtacttgttgggttttatgccct

SEQ ID NO: 35359 - DNA, 1728 bp, Cannabis sativa
tcaacttacaacatattgttgggtcatccagcactaattggactaggggcagtcagttcgatcaagcacctatctttaaagctttaagcactagatggcgtaggagtggtgcgtggtgaccatatgctggctcgcgattgccatcgcatagagttgtagcgtagaaaggtcagtcatcagctgatgatgatcttggcaggagaaaatgagaataaagatgaagatattcatccctgagttcaagatgaaagaaacctactaaaaccaattaaagaattggaggaggttattctcgatgtaggaaatcccaccaaatgtctgtatgttgggaagaatctagacgagcagctcaaatagcaattaataagctttttgaaggcaaaccaggaccaattcgcatggaatcatggagatattgtagggatcgaccctaggtttatttgtcatcacttaattattgatccaaactacccgtcgaagagactgaaaaggaggccctttgatttcgagaggcaatgggcactaaaacaggaagttgacaagttgttagttaaagattttatgcgcgaggtattttatccctcgcggatggccaattctattctcattctgaaacctaacgggacttggagaacttgtattgatttctcagatctgaataaggcatgcccaaaagattattttccacttcccaagatcgaccagttagtggatgcaactgctgggcacgagcttatgtcttttatggatacatattctagatataactagacaaaaatgtaggtcccagatcaagagcgtacaagctttgtcaccaacatgggactctattgttataaaatcattccattcggactaaagaatgctggggtaacgtattagcgactagtaaatgaaatgttcgcaaattaaatagggcaaaacaacgagatttacgtcaaagatatgttggtgaaatcgataaagagtaaggattgtacctcagacctcgcagaatgttttaaaatattaaaaaagtataacatgaagataaacccaaaaaaatgttcctttggagtctcctcggaaaattttttaggattcatagttaacacgagaggtatcgaggtaaatcttgaaaaagaaatccaggcattaatagacattccatccccgacaaagcctaaggaattacaaggcttgacaggaagaaaggcgacctttaatagattcatttcgaagtcaaatgataagtgtgtaccattcttcaacatattgcgaggcaacaaatggttcgagtggacaaaaaaatgcaaacaggcctttcagagcataaaaaggcatctcgcgacgcctccacttttggcaaaaccaataactggagagatgttatttctttatttatccatctcagaagatgcaattagtgcagctatagtgcgagaagagggaaagcaccaacaacctatttactaccaaagtaaaaggttactaggggcagaatcaaggtaacccccactagaaaaactcgcattatgctttgcaaactatagccatacttccaggctcaacccataaatgtgttaaccaattatctcttaagacaagttttatcaaaaccagatgcttctggaagattgataaaatggtcgattgaacttgggctgtttgacataacatttttgggttttgtgccctaaataaaacccatttcaatctaatcaaatttacaaattaataaagatcaga

SEQ ID NO: 35360 - DNA, 2391 bp, Cannabis sativa
tatttacaaaacttgttcttcttctaacattctgttgcttcaaaaagtaattgacaatccaagcacaagatacccaaccgcctttcgcttcatgcatcctctaaagtgagtgaagtcttttctcgatcgacctcaccacccaaataatactttagacgttgctcattcactttaaatttctttctgaattgcttattacaaacatccacaactccatggggataaactttagttctctcatgagaatcatgatttgttacaatatagcttataagctggttttgaatgaaaaatatatgatttgctaaataatttcacatgtggtatttgcttagatttatattccgtaatcaaagacaatgaacctttgctaccaatatctgaggttgaaattaacaaccacaacataaaattatagacgtacgaaaaagacgagagaaaaaattatatttttaaaattttgatttcaaattaaaaaaaaataaataaaaaacaagatttagttaccaaacatacttgtttttttaaaattttttttaccacacacttccaaaagatttccctagttttgattaaaaaaacaaaaattcaattttaaaaatactaatataactaacattgcatatatttgtatgtatactaacccattttaattgcatgcacaaacattatttaatcaattaaaatacaaaaaaaaaaaaaaaaatactcttataagtgagaaaaaaagtgatgctctcacctaatgagttctttataaatataaatcaaataaccaaactattttcacaaaaaaaaaaaacataaatttaatagttgagctattagctaaaatacgtgtattaatgggattttttcaaaaacatatataaaatattaaataattacaaaaattacttaacaaatctcaattacaataatatctttctacatcattaaaaaatatcttaattttaaaataatatgcctgaaaataaaactaatcccaatttttttttttaattttcctgcgtttcaaaagtaatctttcggttacttatgttgttgataagaaaccaatttgtaactttttcataaaaaaatctcacttttatattatgtaatgtgagatattttggttacatctaaaacttacgtgtatacactataataattattaattatttaagttaaattaatacatttgaacatgtttttcttcaaaaaaaaaaaaacatacatttgaataatttttaagtttattttaaaaaataatgagttatcatcaagtaagctactattttaataaattgtattcaaaatttaatatacaccaaatttaatcctacaatcgtcgttcacccagagacccatttgaaagaataatcggaggcccattcgaaagaagagaatagattagagtgttgcagttggagattttctgttgaggctaataatttgaatccatggaaatcaatcccagaagaatgttgagttgattgtgcgaagagtgttgagtgttgagttggtcggcgatggaaaagatgtgtggatcttcgacattgatgaaattttgttttctaatcttcctttttacgccgaccacgggtatggatttcgccagattccaggtggtttgagttcgtcgtcggttgccatcggtggttgcctaaatgaatagtggctgaagtggtagtccgcttttcttgcgtgatggcgatttggcgagaaactctctcttaattaataactgctttgattattattattattatttaattaattaaaatgccttcttgaatttattttatataatcttactatataattatttttatattttcgtaaaattttttaaattaaatattttttaaaaataaattaatatttatatacattacttttgttatgactactttataaaattctattatttcaatagtattagaattattgcattaattttttactcattttgatttactcatattgttaattaatttagaattcatattcatttaatgagttatattttggatggttttatttttcttatagtatatctacttaacaatttgtatttttttaaaactattttttcaccatattttattttattttattttatttcgtacttaaaagagagtgttatagtattctcacaagttctcagtttgttagtgttttttatcgtgttatgtttattgtttatttatttgttaaatgtatagatatatatttagagactctaaagatgattgcatcggtgaatatcatagataagtctttcttctcattttaattgctatattaaaattttggtttttaaatttagtttattttttataagttaaatccttacctcatttattttttttttggtgttttgtaggttgtttatctatacttcaa

SEQ ID NO: 35361 - DNA, 1526 bp, Cannabis sativa
gggcattgcaatacctatctctcacacgtctagatgtcgcatgcatagtcaataaactaagtcaattctaataggccctcacgatagtgcattgggacgcatgtaagagattatttagatatctaaaaggcaccatcaaagaaggcatttgtctcaaaccagttgctgcaacaactcttcttgcctactctgatgcagattgggcgagctgtctgaatgattgacgctccacaggaggattcttggtgcttctaggaggaaatttgataagttggtcagttaaaaaagcagcatgtagttgctcgctcaagcacagaaagtgagtttcgtgcactggaaaatactgcagttgaacttaagtgagttcagtctctgcttgctgaacttcaggttctcttagttcaatgtcctgtaatttgggttgacaaccaaagtgcaactgcacttgcagccaaccttgtgtttcatgccaggtccaaacacatagagattgatttgcacttcgtcgaagatcaaatcatggcaaaacaagtctcagtttgttatgttcctgctatagatcaagcaactgatatcctagctaagtctttaaccactgatcgatttgtttatctaaaatccaaactaaaaatagtttttacgtcatttagtttgagggaagatataaaagatgttagttagttaatattgtaattgtcaactaccagtttgttacttagtttttctgctttgcttgttatttttgctttggtcaaacatctcttttggcaattaataaaatttagccgttcataattttttttctcttttggttttcttcattcctctctctgctttgtgttctattacacaaaagttgtgtcaatttttactcgttaaaatttgtgtcaaatttaacacacaacaatatagcattatacatattttgcatgctcctaagtactactcttttttactgtacttttatacatcttttattgttttatttacacatttgtcactgatttatgatttctgctaattaaaaggtttttaacaatttaattattaattttaataattatttttatataaagtgacattagtaattaattagtcattttttgagctaactttacagttttacattttgtaacaagtatgttttgtaggtggagatggtcttaaaatttcataaaccagtataaacttcagattttaattcactaaccataatttgtagcaaatattaaaaaaaaaactttcatcaactattacaaaactttacattttatgtttaccatattaccaaaactgacaataaaaatataataattttagttcattctcataataagattaaatgacaataaataataattaaaaaaaaaactaaatatagcataatcttttttttttttgtcaaatttaacacaaaatttaaggggcaccattaaaattcaattttataaagatgtgacaaaaaatgcatgtgcaacatttttatagcactcgattagaatttagagatagagacgcttttagtg

SEQ ID NO: 35362 - DNA, 3494 bp, Cannabis sativa
ctaaaaacataatgaaaataaggaaagattatagaaaaatttatataattgaccaataatttgaaaaaatttacaaaaatacattacggaaaaattttcacttttacttttagatttatttacaaaaatacccctttagtaaaaaaatattttttttttagttgttttatagtttatttatagttgtcataagattattttgctggttgttttatagtttatttatagttatcgtgaggttgatttcttattattttttagttgttatttttactttttgccaaacaaagtgtacttttgtaattttaaaactttacaagaatattttcgtaattaaaaactttagaccgtaaaattataaataaaataataaaaaaaaactattattaaaaattccctattatataatataaaaagagaatgattaaaaaaaatcatatcgaattatccaatcttgtgcagatattaaagcttataatgtataaggatgaagcatgttacgatgaggagtcacatgtcttccacccgtactaaaagttgactcagaagcaactgtagaaactggaatagctaaaacatctctaacaacttgttgcaatattagatatttgaaaccatttatctttcaccaaatcaaaatacagggtcggtcctaaggtatatgggacctaagacgaagtcaaattttggggctcttatatatatagtttaactattacgaaaatgatagttacaatgcttagtgtaatggtaaagtttttaaaaactcttaaaagctccaaggttcaatatctcataactacacattaaatattttttttaaaaaaaaattaaaaagtagaggttgagaattaatcccatgatctcttagtttacagtaagaccttttaccactgcaccaaataatttttgttatattttcttcttatttaatattttatctatatattaatattttttttcacaatttcggggccctgagcgttcgggggcccaagtcgcatgcctagctcgcctactctcagggccggtcctgtcaaaatatcaaattctctatttcttgacaaatacattcctctaagtaatagtctagcagagattttttaatatctacatttgaagtgctactaacaaacaaatcaaaaccagccaaaaaatctacaaatttatcaatatccataccagcttcagaattatgcaataaggaatcaaaataaatttctttaccatcacttagtttgtatgctttcaccaaatcctaacacaactttgtaattctctcaatttgattcgaagagtcatcaccataaatttggagaaaataatattcaattaacttcatcttaaaccttggattcaaaataattgctatggataatattccatgtatgacagaccatcaatcttctcaatcatatttatagccatcatcttaatctctacataagaggatttaaggcattccctaagcaacaaatgaattacacaaatttaggggaaaaaaagattaggagtgggatatttggtccctaaaaatatctcagtcacattataaaataacttcaatttgtcacacatcaattttgctaaaatccaatctcgatcactaggtgtttgtttatagtttttctcattgtgtactaagcgattaaagacatccttatacacagtgggactcataagcatcaaatgaataaaattcttcctaattttacaattgagaactaattttctattacttaaaaatgttaatccatccttaacctccttaaatttttccactctcttaggtatagtccaaaatattacactctcaccaatagtttctatcccatcttgaattgcacctaaatcttgttgagcaatcaaattcaatatatgtgcacaacatttcatatgaagcaattttccttgcaacagtaaattattatttcttaatttttctttcatcctatctatcatggaaatattaacactacgattatcttaagtcaaagtagataacttacaatcaatagactatgcaaccaaacactctatcaactcttttgttagtatttttgcattatgtggggcagacacatataaacctataattatgataaaaattgctaattagtaatagtatacaagtaattaattataagtagtcaaaatacaaggtgtaccaataaactaaccttataatttgattgcgcaaaatccataagtgatcgatgtagtgtgcagttaccacaatgtagcctcttttttgattagtggttgtccacatattagttgtgactgcaattctaccttgattgttgctcaatgcttattttattttggtcttctcactcttagatatctttatgataccactcctaatggtaggtcgagatgcatgcttgaataatggttgaattgtgttcacaaaacttatatatccaacatgctccaccatattaagtggatactcatgcaaaatgatcattttggcaagctcttctcttgaaaattcttggacaaatgtgtgagcaccgagtgtagtaggtccatctttctcttattaggattcaagatggtttgctttatgtctcgatgctttcttaaaggacatctcttaaaatgttcatacaaatgtttagttatattttttcttgttcctcctatttcttttcacagtagtttcaaatagtcttttcaattccattgaccttttgtttttttaaagtgatttcaaactataaaagttagctttttattttttttctccccaacctcaccatttataattggtggggatgcagccattggaatagaagaattgagttctgtaaatttattattttctccaattttaagtagaatattttgtgtagcatcttgtggagaacattcagtttcagccattattagacttggactacaaagtacaaggatactggctaagttctacttcgagggaaggttagagatggattgaacatacttggagatgattccacttcaaaacctaaaaaagccttactttgtgaatttttttctgtttttagttctcaaacatccaacaatgatgtaataacacattgtacttcatttgacagtaataaaacatctccaaattctgcttatgtctctagcactacttctctttttcattctgcagttagtaaaaatgttaatacttggcattgtaaacttggtcatcccaatgaacaagtcatgagcaaattattaccacaccttcctcacacaagtcactttaaaatatctccatttttgtaaagcttgtcaacagggaaagaatccttcccttccctttcccttgtccaatactcgtgcatcccaaccacttactttgatccatacttacttgtggggtataagtattatgtctattttttggatgactatagcaagtatacatgtattatcccacttactctcaagggtcaagcctttgaagtaatcattaaatgaaaagctttagttgaaaaacagtttaatcttcc

SEQ ID NO: 35363 - DNA, 3931 bp, Cannabis sativa
tcataccttcagacaaaatttcgtaagctattttttgaagctcgtgagattaggattcgactgatttatcatcggtcatttaaaacttcaagtagcggttcacgatatttttttttgtttctgcctcctcggtatcatattttttctgtaatactttacatatttccttagtagatttatcagaattatagtaatcatacaaattatcagacaaaccattcaaaataaaattcttccacaaaaaaattattctctacccaagagtccctttccttaatctgtaattcatacttctcgactacatccttcttctcggcaggaagtggagtctcaaacacaactggttttaaaatagtcagtacttgggatagggccctaaggggtacccagttttgtgcgaatgtgtgaagacccacacacttgacccaccatacacacgcggcgttgtccgtctgtccaactgtgctgagctggcttgtgtggtatgacacttcattttttggagaaaaatatttattaaattattatttttatttaattgataaaacagtttttaaacgtgtttaataaattggtaaagagagagatgtgttcttctctttatttttagtatcgtttccacgatcccacttaatgttcccatgatcaatgtctttcttcccgtcactaccttctgtgcatttcctgtataatgtatcagaaccaacaagagaaatacatttttctcacactttaaaaatcacttacagtttattatttacgattatattatataagtagtccaagtagtagtttttggttgtggtgttttgacgattctattatgcagtagagcttcgatatagtggtattttgactgggctatttatcctaaggacaaccggcaatttctaactgcttctacattcttagacagtgttgcgaacgtcttaaagagaacaaccaaatccgtgactcaacctagaaatttcattcggtaatatcgttcctgttttatttttcagtaacagtgtgtataactactttcaggcgttcgttttactgtgaatagtgccaacgtttttctatgaatagagccaataattttttggttctattgttgacattaacaagccttttcattttgatgttttgtattttaaaagttagagacaaaagatgttattttttctgactatgaaaaaagttgtgtttgtgctggctgttttgaaaccagttgtatttgagactccacctcctgccgtgaagaaggatgaagtcgagaagtatgaattgcaggttaaggaaagagactcttgggtagggccccaaggggtacccagttttatgcaaatagctgaggacacacacacttataaaatacagaacatcaatatgaaaaggcttgttaatgtcagcaatagaaccagaaaatcatctgcactattcacatcaaaacgaacatcttaaagttgttatatagaatgtaactgaaaaataaaacatgaatgatattaccaaatgaaatttttcgctcaagtcacggactaggtcgttctctttaagacattcgcaacactgtctaagaatgtacaagcagttagaaattgctggttgtccttaggataaaacaccccagtcaaaataccattatatcgaagctctactgcgcaataaagaactgtcgtaaaacaccacacccaaaaactactgcttggactacttatataatataatcggaaataataaactgcaagtgatttttaaagtgtgagaaagatgtatttctctcgttagttctgatacattatacataaaatgcacagaagttagtaacgtgaagaaagacattcatcatgggaacattaagtgggatcgtggaaacgatgctgaaaataaggagaagaacacatctttgtctttaccaattaattaaatctgtttaaaaacagttttaatcaattaaataaaaataataatttaacaaataatttttctccaaaaaataaagtttcataccacacgagccagctcaacacggttggatagacggacgatgcacgcgtgtgtatggtgggttaagtgtatgcgtcctcacccattcgcacaaaactaggtacaccttggggccctatcccaagtgccaaagttgcactttatatactcctgtaaataagggctcatatcccatgtgggactcattctattatacacactaggacactctctcattttgttaaaattcattaactttgagaaaaaattctaactattgagatagttggtattaaggaggctttaagtttgataaaaaaaaaaaagattaataagatgttcagcttgagtcaagtgcttagttctatttttatgctttctctttttggataattggctagtgattgtcgtcttatattaaaattttaaagtctgttaggatttgttttgttaaacgttctgttaaaaaaggatgcctattgtgttgctcgcggctttgtttctatccagatcatgttttagtgagagtactgctccatttgaacttttatctattgtaatggcggaggctttttgttaataaaaagagtaatttgcggcataaatacttaagtttaactcccagttgtaaataaatacctaagtttaatttttggcgataataatgcctaagttataattttggaacttttgtaggtacttggctgttaagtgttaagtaaattgtcgcaattcttaattggtccaagttattaaatttttaaaaaattaatttaaatataccaataagaaaatgggcacgtggaaatgacttaatatttgatatttaaaaaccaaccgaaaaatataacttatgtattattattaccgtaaaaaattaaacttaggtatttaattctgttaaacttaggcaaattactctaataaaaataccattttttcatttgaaaaaaacaccaatagttatgattcttaattattatttttgataacaaccttttttatcttttctttaagggtaattatgactttttcaaaaacgaagaaaagaaaagaatggaaaagacatgaaatgaaatgaattgaattgaaatattacggtttcgccaccgaataaaatcgacccgctttattttcttctctctctccgacatcgaattctagagagagaaacgcctcttcttcccttcaatcaaattacctcttcaacaatggcgggttttagggtttctggggttttgtgatcgacgaatttgttagaatctcgatggaaatgcccggtaggagatcgaactactcacttttaagccaagtcgacgatgagcagttcgccgccggggttggtggtgcgaccgggacatcgttttacgagtcgacttcggcatcgggagagggaaagaataacaaaggaagggtcgaaaggggtttcgattgggagactggagctgatcacagagggaatcagcaggttaatcggatcgggaacgtgtattcgtcatcgatcggtttgcaaaggcagtcgagtggaagtagctatggtgaaagctcgctttcgggtgagtactacccgccgacgatgtccactgctgcggtcaatgagatcgacgcgatggggtatttgcatgatgatgtttttaagattagtggtggaggtggaagtgagttcggtgggaagggattggacggtgttgggggcaccggaggatcgtcttcggggaaaagctgggctcagcagacggaagagagttatcagttgcagctagctttggcgcttcggctgtcatctgatgcgacttgtgccgatgatcccaatttcttggatccagtgcccgatgaatccgctttaagggcctcatctccgatttcagttgaagcaatttcacataggttttgggtatgtgatgatgttatgctctttttctttcgtaggctttatctagttttctattgctacatt

SEQ ID NO: 35364 - DNA, 2147 bp, Cannabis sativa
aactatttatttaataattataattaattatttaaaaaaattgtcatttatctaatttattaattagactcaacaaagtcaaagatttctagaatttttcgaatatgttggttgggtcgaaaatcgcaaagtggtgaaagtaacccaacaaaggaaatgtgttggcttttataggccagaaggggtacaaggcaactgtgattagataccatcgtacattgggaatttgtattgattcaaattctgcgatccaatggatagggtgaacaggcgtaacgaggagaaaggacggttaaaacgtttgagtacctctctgacactgcattaatgaaaaggtctatcaatagacgggaagcgaatcgttgcctgcaaaagaaaataaaaatcaatgatgacaatcataaatacgacccacacgcctagggcacgtgccactgcatttattagagaccggaggccgcgtacaagtctcatttactagttactaaatgagacttggggggtaaatgttgcctttaatttttgaaatacgtggcctcgactgcgtatgacacgtggatcaaaatgacacctcactaaaaaattagctaagtcacatatagacgggcaagtgtacctcttggagtgagcccccggagaggcacataaatcatgtctttccccttcgagagctagaaatacaacaaagcatctccgagagaaggagaacctgttcgaacagtcacctcgcatttaatgaagcatggggaaaacgtcttggaacgcccataagaggacatgtcagacagtgtaagcctcgtttacggcgattacatgataatcaaaggggctagtgacagctccattataaagaatcacatcaatcaaggaaggataaagatttccctcacctaatccctatgatatctaccgcataagtcaagtatgccttattctatatctcttgggaacttgtgtacatacattgctggcactcaaagacaagtgctcccttttgagttgtccttaccaaactctataaatacccctgaacaaattgggaagggggatcgatcgatcaaaaaacaaaagagagagagaacaaaccaagaacattttctgtataagaactctcattaataccaaagactcatggactacggcttattaatgtccaaaccacgtaaaaattacctgcattaattattccaaatctctcatcattatctcatttaattggttgtcgaaaatctcggtcaacattaactaatataccaaaaatatgtttaatgatcaatattcattaataaatcccctatttctaattatattaattaaaatgctaaactctattttgatttttttttatactattttgaatttaaatgatgaattatttttttataaatttattgtcttatttttttagaaaaaaatttctatttgtgtgaatattattaaaattttaatttttctttgctataatatatatttaaaaatattaatttgcgtgctttttttgtttatataagaaattgtatgatgattaattttttttaaaattctttaaaattctctgtatcgatatataatttattaataaatacataataaaaaattatacataaaaataaaaataagtttgaaattatttcatacgattttattattcatttaatatatatatataatttaaaatttttacaaataattgtactagcctatttacttagttacccaaaaattttggtgaaaatgtgaaaaaacttttgaaactgaaaacatatctatatatcaatgaatatgcgaggaagcccatgtgatgttatgatttgagggattaagatggcaagtttttggtggaaaaccaaaagttcaaatggacaaggtatcatctggatttcttgggatcgcatggccgcacctaaggattctggaggtatgggttttcgacatctctatgattttaatcttgccatgttagccaagcaagattggagacttctttgttcatcattttctcttgctagtcaggtgtacaaagctaaatactacactcgcactgatttcctaaatgctaaattgggtaataatcctagttttgtctggcgtagcatttggagtgcacaacatttggttcggctaggggctagaatcactattggtac

SEQ ID NO: 35365 - DNA, 1260 bp, Cannabis sativa
ggagggcatgtgaggttatttgccccccacctcccttaattttttattcttataaattttgtatataatttttttattagtttatattttgattccataaaaataaatttttttcatttttgtccttacatatttatatattctcacatatatttaattttattctcataaaattcgcattttttttaataaaaattatatttttcttaaaatttctttgtttgcctccactaaaatattgctatttatcaatgtgaagtcatttattagtggactatataatataggaaaatttacaaaaatactggaatttgggttagcttttacaaaaatattgtcacacagaaatcttttcgaaaatactgtatttttaaaaaacactagtaaagcacaaagaagaaaaactcaaaacaacagtagaataactaaaaaacaccagtagaacaccagtgaaaacttaacacggtatactgcagtatgaaacttataaaaaaacacaataaaaaagtaaaattatcatctgccagtatttttgtaaaaaaaatgtcacaagttagtataccatgtaaatttccctataatatattctttgtacctaagaccttccattgggcccagatccgctcgcccaaagtgcatggcttcttataaataagacctcatccccaccatgctggcaaagggttcaaacattaggtttcacaagagaaaatactttgcaaaacattgtacaaactctattgttgcaagtagggatgcagaagagaaaataattagtcataaaataaataataatactcataatattaaatatgtgttacagctcaatagtaatttaattagtttaacaactaagagcattagagttcaaatcaacaacttctcactattttattgggttttaatttttatttttgcttaaggtttaaattaacatagagccgactctaattataatggtaagcctaagactagatgaaatactttagtcttttatgtacatagattggattgtcttagtattttaattctagtgatcctataagtgacctaagtctattttaaggctataatgcaacttcatttaaattagcttagaaatagaatcctctccaaagattgtattttaaagattttagcctctcgaaagcttagctgaatttgttgctacttttatcaataaattattttatttgaggaatttagttatttatgtaatagtcttattagtttgttgaatgaagaagcacttccctttca

SEQ ID NO: 35366 - DNA, 2027 bp, Cannabis sativa
  modified_base (224)..(225): a, c, t, g, unknown or other
aacgtacttaactacactccttgtgggatcgacctcactcctggtgagtttactacttataacgatacgtacacttgcgtgtgtaaaaatatcgcaacaataagatggtggtttcttatatagcatgcactacaagaaatgtcacttttatcagcgtatttcacaaactgtgctggcaaaaagatcaaaattttattagtgcacatttgcagtggctaaaatcnnacttttaccagcgcatttacgcgctgggaaaagtcatttttgccagcgatttttattttgtgctggtaaaagttctaataccaacgttgatctgctaaccctttttgccaacacattagaagtaaattttattttaccagcgcaatactaaatttttgccagcacatgacatttcttgtagtgtagtgtgacaaaaggagtggaggaattaagcataggagtgagcatatgcatttataatgagataaatgtcagattcaaatgcatatataagaccactagtggtgatttttgcgctctacacgcctatttcaggcaacgttgtgagaacaagaataagaaaaaccatgacaaatgtcaagattaattaccaaagaaagaattgagagggcgaattaaactcacctctaaatccatcagtttgagaatttgtgtatattctctatattaaattactgtatacttgggcatagatatgctatataaaaggaaacacaaaattcaatcaaatacatgtaagtaccacaaacaataaacaaagaattgtatcactattttccttaacaatttttgtcattttttttttcttatgtaatattactacaatttatttaccctttgtttggtagatcagtaataattgatggatggatgtgtgtggaattggataatccaaccctaattttatttgtttcatgataagaagaaaaacaagggaatgaaatggctatgaattgccaatcttttgggcctaccaaaaaggatatgaattgattacaatatatttgttaatttatttttaaataattaacatgttttaattttattattgtgttattttaaataataaaaaaagtagttatttctttccttctattacaccaaacaaatttgagatacacacccaaattcaatattccatccaactaattaccaaataaagtgttagtatttcacatgattggcatcttcccaatgccaataccgatatacatatacatacgtaggtaccaaaataacatagctttaacagtaaatttttaatgaaaaactatatatatataatatatttatatatgtacacgtacacatctaggttttgagaaaaacaacactcaaataatcatgacaaccattatatatatgggtatggagatggcttggaatatatagttacattctgcaccacatgatattatatcttcaatacatccaacccaacccaaaaatcaaagatgggcatgcgtcaaagtataaatatatatgtatatgtatgtatatgtatacaaattaattaagtacatgagtgtgaggaccaccatatccatatgcatacatatacataagcttaagcatcttccccatgtttcatgtaattggttttttcaataagaaaaataatccaaatatattcacatatgcatgcatcaaatatgtatatatgtgtaatttatgtaataactcaaattaaaaaaaatgattttggaaaaggtaaaaattgcacgcgcaatagtagttcagtggagaaaaaagtatatatacataagttgtatatattataaatatagggttgaattaaaaaagagtgtctatatatagagtgaggatatttgtgcataccagattcatcgagccatgccaacaaaatataagtcgacactctactatatatatatatataatttagatattttgattaattgacacctgcataatttatttatttttagtacctatatataaatatatagaatttaaaagtgattttttcataattaattaacaaaagaaaaattacaaaa

SEQ ID NO: 35367 - DNA, 1889 bp, Cannabis sativa
cagctaaagataaaaatagtacatacaaaattagcataactgaacatgcaattgcaagaccgagaaatatcatcgataaagggttccaaacagagcaatatccaagttaaagcaggtatcaaggatcaacttataatcagccacgaaaatatagaaattctcagcagcaaataaacaaatgttcttcataaaaaaattacataaaataaaagtgtttgcgtgtttaataggcgaagaataaaagcggggaaaaaaagagagagcggcaaagatgttatataccattaatggaacacttggaagcttcagaagttgcagataatagaacggagctaacaatgaagaagataaacaaaaccccacccatttttgtcacacactcgctctggttctggctacttccatagactcgaatactgttgtaattaaattgctttcagtctgagaaacttatttagtattataattatattttattatattttgtggaggtcctagaaactactcgtcgtttacatgaattttgtgagtgcaaatttattttaaaaatttattttagattctgtgtttttgaaagttattaattaaatattttattttgttaaatgataaaatagattttttattttttaaaatggtacaaataagaccccgaattgaatttttgtcaaaataaaatttaataataatccgatctagagatattttggtaaaaatagttacattttctgtatttgttctattatgaattatcttcaagttggttttattaaaaaaaataaaattgtcaaaaattaagctcatggtcctatttttactagtttggaaattacatggtccattttgccatttaacaaaacagagagtccaattagtaaattttgcaaaatacaaggtccaaaatagcatttactctaataataaagacattttttgtttggtaaaagtagatgaattctcattaaatcaaacaacaatattacatcactaatacaactaaagctcaagagaacactactgttcacaacattaacagtaggtttatctttagaggatattttccttgtgtctaaataaccaaatcaaatttttataccttgtttaatcatatcactagcatgttaaacagtaaataaacttatattaaaaaatgagttttttacgaccaaaccctctcaactatcattctacttgtaccgaagtctcggtttggggttttcatcttggggaaaagaattcgggtcggctcgattctacagttcagaaggtgaagaagaaaaagggaaagaaaaaaagaaaaagaaaaaaaaagatcaaaaaattagtttttttttatgatttttaaataatatattttgtattttaaaattattttaattaaagtataatttggaccaataaaattttaacatctggcatttttcaatgagtaacgactcagtttaaaaaaaaggactaacggacttacgaaaaatgtcaccttgaggattattgtcgctatttttaaacgttggagacttatttacatcaaattgaactttttagggacttttgccgcaaatttccctttttgaggagataactttgggccacacgcctcaattaagtatggaaactcaaatttctcttataatattcattagaggattgttattctgtaccagtgttacttagtactacctaaaagtagtgctttgcgattgattaacgatattccatacaaattattatattaagggccagtttgacacaattatgttgtgggaaaaagcagctgtagctgtgctgtaaggaaaagcagttgtgcagaactgtagaaaaaattgatctgaatgtttggtaaataataaattttaaagtgctaggaattgttaaaattctattataat

SEQ ID NO: 35368 - DNA, 1385 bp, Cannabis sativa
aaatgctatcactgcactactgatttcctctccagttgagctcctcccaattatcttggaaaagaagaagctacttgagagaacccaccatccggtccaggagatttatttccaggtatgctgaagtctgccttcttcacttcctcactagtaaatctttgagtaaggccaattatctgctcctttgttagtactggtcccctggctattattctaggatctactttccttctctgctccatttttgacccaagcaaccctttgtagtagtccaagaatgcctccgtgattagctctggttcatggactctgctaccatcaaatctttcaatggaaaggatactgttttgtctctgcctttgcttaatgcaagcatggaagagggctgtgttacaatcaccttgctgaatccaatcagctttagatttctgttgcaagaaggaggtgtaatcaccctgtattctggtcagtttttcccgagcttccttctcctgtatgtgcaaagcactatccatgggatgcatctgaatctgattttgtagcaattccaactctgccttagctcttataaccgaggcttggaggtctgagaaaccctccttgttgatctctttaagcctcattttaaactgtttcatcgtagacactacttggaacatttttgatccttctcctggctgtccccacacttcccttagttcagattcatacttcggatgtgatttttaaatcttgaagtatttaaaaggcttcttctcactgaccacattaggataaagagtcaaaatccttggtgtgtggtcgaataaaccttcattgaggaataccgcttcagcaagatcatacttattgatccatgattggttggacataattctatctatctatgaaaagattctatcttctccatgttgcttatttgaccaagtaaagaaattcccacttgctttgacatcttccatttgacaagcattgacacattgcaagaactctgtgtccggatgagttttaacctgatgccctattctctcctctttggcaagaatgtcattaaaatcccccattaacaaccaatgctcatttgttttcagctcacataaatccttccataggactcttctttcaaatctattgtttgatacataaaccacaatcaaaagaatattaaatccttcagttgttgtcaaccttaaatgcattagttgactagtgcatttaaggatgtcaacagtaaatctatcaggatttcaagcgataacaatcataccacctgcatgccatgctatgctggatgaaaaataccaatttacaaacacatttaagtataaggctccaagcttcgaagccttaactcttgtttcaaggagaccaacaaaatcaacttt

SEQ ID NO: 35369 - DNA, 2649 bp, Cannabis sativa
ttttaggacctcaacacccttaaccgaactcactaaaaagaatcagcgattttcatggacagacaagtgtgaagaaagcttacaagaacaaagattgattacaactcaagtattagttctaccatctgacatattgagatgcatctagacagagtctacagtgtgttttgatgcaagctgatcgattcatcgcctatgcctctcgtcaattaaaggaatatgaatagtgatacccaactcatcacttaggaatttctgcagtggttttggcattgaatgtttggcagcattatctgtacggagaaaagtgtgagatttatacagatcacaagagcctcaaatatttctttactcaaaagatttgaagatgaggcagacacgtttgttggatttggttaaagattatgactgtgaaatcctttatcatcctgggaaggccaatgttgtggatgatgtcctgagcagaaagtgtcctaggcaggtaactagtatgattaagatatcacctcagctagcagatgacaaggtcagatcaggtattctgtttgttgtaggaaaaaattcataattcgacattacaatttgattttttaaacagaattaaagatgctcagttaattgatcaagaactggtaaggatttgagaagaggttttaggttgttaagctatagattttacggtgtcaggtaacaggatgttgttatacaaaacaagagtttgtgttccagataatgcaaaacataggaatgagattctcaaggaagctcacaccactcaacattcactgcatcctggcactacctagatgtgtcaagatttaagacttttctactagtggtgcgggatgaagaaagatatggttgaatttgtatcctggtgtttaacttatcagtacattaaggttgaacatcaaagacctacagggttgttacaaccattgaatcttcctgaatggaaatgggaggatatcaccatggattttgtggttgggttacatagaaccacaagaatgtatgattctatttaagttgtgatagatttatttacgaagtcttcatatttactactagtgaaaacaacccttatagtggatcagtatgcagagttatacgtgaaggaaatagtaagattacatggggctccaaagtccattatatcagatagagattagaagttcacctcaaaacttttgcagagtctccaacgtgctatgggtaccagactgttacgtgcttgtgtgttggactttaaaggctcttggagcaagcacctgccactgatagtgttttcatacaacaacagttatcagagtactatagggatggctccctatgagattttgtatggtaggaagtgcagatatccaattcaatggaatgaaactggagaaaggaaatatctaggtctaaaataagtgcaacagactaatgaggctatagtaaagattaaggccagaatgcttgactctgagagtaggcaaagagttatgcagatccaaagcgtagaaatgtagaattttaggtaggagatcatgtattcctacaagtgtctccaatgaaggggatcacacgtttagggaaaaaggacaacttatgccctaggtttacaagaccttttgagattctttagaaggttagactggtggcatatcgtctagccatgcctccacatttttagctgtccataagctatttcatgtcactatgttacggaaatacgtttcaaatcccaatcacgtgttgagttacgaaaacctaaagcttcaaccaaatttatcgtatgaagaacaactagttcagatcttagacagaaaagataaagtccatcaaaacaagaccatagctttggtcaaggtgctctggagaaacagtaaggtggaggaagccacctgggagttggagtccaagatgagggctcaatatccagaaatgtttaggtcagatattgtggacaaaatccttttaacggggggtaattgaaaagaccgcttagttttaatacaaaaattagctttagggcttaattatgaaattatattactaattatgatttatgaattgacgaagatttatgtgaattcaatgtgtattaattatgctatatatgaatttttatatttttcatgtcttgtgccacgcaaaattggaacgcggcattaggccaatagaatcaaattttagtattttagtaatagtgggagaatatacttagacattgggaatgtaaggaatatcagaggttttggaaatgacaatattacccctaagtgacaagtgcacttttcgatgtgtgcaagggcaaaatggtctttttgccatttgggatttttgtcttttaatgacattaattgatttatgtagcttgattttattttattattttagttacataaacacttaacttaaccattatttcattttatccaatttagaaagaaaacaacgtaaaccctcttttctctctctttctttatcgaccactcaagcaacttgctagtgttggaagatttctagtttgattctgggtattttgacaagattagagtgtatccaactctaggtaaatgttctagcctctcccttggtgttttcttaagctcaaagttacgtttttgcatggttttgctaaggttagggttctaaggtatt

SEQ ID NO: 35370 - DNA, 2015 bp, Cannabis sativa
tttccataagcctcagcgtgaagggaggatagcaatatacgaggatctgttgaaattgagtacgatcagtctccatgccagtcacaaagtagtactcgttaacgaaatgccctattttgctaacttctgaatccacaatgcccttcaaccacttttcatccaactcagagaagtagaagtaccctgacctgctttgctttagtgtagacttcaaatcaaagagctagttggtattgtgcagagacggctcatcccatctttgaatagcgtataggatgaaaaggacggataaatacttgattcccttgggtgtgaactgggttggacaaagatgatagtagtccgcaatccctttgaagtacaagagcaaaggagcatcgccccttgttttgtgtgcgcacttgaccaagcacagtatccttccctcggacttgttgcccggtgatttggagtagggaggaaacactcaactctgcccagatacccaaccttctccaagtcttttaaatgatcctcagtcacgatggacagaggacacacccatctggccctcatggcaccttgcctcctatgagggaccgcctcgacatactcttgggtgacgtaatcttccccctcaaccaagacatcaccgagctcagataccagctctccagcctcattgtagcctccaaagtgcagaagaccgagcaactccctcctccttagcctcggaaggactatcaagacggttgtcatcctggtcttccacctcctacacttcaatgtccccctcatagtcctcttcctcagcaacgggcaggttttgttcggcacttggcaatgtgaaatgtcgggccatgtgagggtcagttgcattaatctttcgcatcgtctattttgtgcgggccatcatcctcctcctggacggatattggtgtgtgtgccgtgcaacatgcacggttacgtcaggagcagcgattggaatgccaaaggcaccagaacttggacggcctacgggaatagtgtcagcaatacctggtcggacgatatatgtctagttagatggaagatagcatctccaccccttcctaagctccaaaacaaatcgtccgcaaccttctcctatgatctgctcggagtaaaaatggtgttgcacttcaggttctggagtaggtgaactttcactactcacctcccaatcttcaaaactcgagttagaaattctgtcactcgaagaggacgaactagcgcaaagacggggttggtcctcgtataagagctgaagaagatcctagtcgatatagtgtttgcctccccaaaactcacagggttcatctacaaaagataatacacgagatgagtatttggccaggatatcaaacaaaacaaaaaatataccgaccaggtctaatcgacatatcaaaaagatgaaaaatttcatgaagggtaagttcgtaacccagaatttcaaaaattttgaattaagggttgatcttcactaaacccggaacgggcaaagtgaagaccaaacattgcgaagttaaagtcaaaatgtcacaacaacgaagtcgtatgatctattacagtcgaagtttcaagcctagattttctatatttttcctaaaacaagtcaagaacaatcaaattttctacaatggaaactcagaaaattgaagattcaagaataaaggagaaaaagatgagaaacttactcactgttcaaagctttgatgttgttcggacgaagctgatcggtcctttttactaaattccacgacaaattcgagagaaaaaattacttttgctctgagattacttagcaagaaaaatggtaaagtagtttatgaggatttttttaccctatttataagcaaatcagtgaaagagtgtaatcaattaaaatctcaaacgcttcgatttccccccaaagtaaatattaggaaattaaaaacaattaagtacctagagaagagtaaccgtcaaaagcgtgtgagtgaaaggcgcgtcttgacgtacaatttaattagagcatt

SEQ ID NO: 35371 - DNA, 2807 bp, Cannabis sativa
aaaaaagccatatttctcaatatttataaaataaaatataacgatacactgagtccaattgtaattaaatatttttactctaatcttaaactttttctttctaacccttattaacaattgtcacctgatttctaatctatcttaattgtaattgttttcactaataatgagcttatgacattattatatttcatgttacaaaacatagggtctaaattatcatttaacaatggtcatagatataggttagtaatactacacttacactgaaaaagaagatgcgtctcaagttcaaatacagattttgggataaattaaaatggtaggagaaaagatttatttatagtgtatatgtaatgtcccactatactttctaaataatatgggattatcacaaaaagtaaattgaataatcatgttttcttagtacattaatacaataccctttaaaaattagaaaaatgtgttttttttttttttttttatagaaagtcacctacattcttgtgtgctttcctttatattagtatatagaaatgatgtgaaaaataatataaaattctaacaaaattaaaaaataagatgaaaaatatattttatttttatataaaatttaaaatgtatattattgtaatagactatagaatagataatatttttttaaaaaaaaaataactaattaaatgaataaactaattaatcaattaatcaaggagaaaaatacatattttgaaacaaattaaaaaaaaaattataattaactaattgaataagactaatttaatcaattagttaaggaagaaaatacatatttttcggaaaaattaaaatgctatgagaaaaaaaattatgtatagtatatatgcaatgtcctactatattttctaaaaatgtgagattattacaaaaagtaaacttagttgaataatcatattttcttagtacattaacatggtactctcaaaaaattaaaaaaatattaagaaaaaattatagaaaactacctatatccttatgtgctttcctttatattaatatatagatatagatattaatgattgattgattttttaatatttaacataaacattgaattattcgcaaaattatacatattgtgttacattttatgtttgatttttttaaaaaatatattttatttaaaaattaaaaacaccatttaattaaatatttaactttaaattatgtgacattaaaataaaattactaaagagatattatatgaataaaaaatataatatttaaacaacataaaaaaatataaaaatatatagctaattggataagactaattttattaattaataaaaaaaaataacatactaagaaaatatttatttgctataatactttttacactatagtaaataataatgattggactaatgaaagttgcaaagaaaagcttattaatagtttggatatagaaaaccacaatactttctaaacaaaatgtgagatttttttacaaagttcgtagactttttttcattggacaaaacttgaagctctcacaaaataataaaaatattatgaaaaaaatatgagatgctacatcatcacttttaaattctcctttatataaatatattgataagggttttattattagactatagttcaaaggccacatgccttgaatggccctcgaataagtaattaaaaaaatagtaaatactattttggatcttgtattttgggaaaattattaattggaccttttttttttgttaaatgacaaaatggactctgtattttctaaaattatacaaataagattttgaactgattttttgtcaaaataaaacttaataataatctgatctagagatattatgataaaactggttatatattttgtatatgttcgtgttagaaattatcttaaagtaggttatattaaaaaacaaaatcattaaaaattgagctcagggtcctatatttactattttgaaaaatataggattcattttgtcatttaacaaaacagaaagtctaattggtaacttatacaaaacacaggatccaaaataatatttacccttaaaaaaataagaatgttgtaataatctaataaaattaagaacgatcatttcttaaaaattttatgttcaactttgcagtagatacttaaaaaactacaatatatgtattaactatatatgcaaatttcatttcttcttcatcatcttaaaacatcaaaagaatgcctccaatcggaaccatggatatgcaacttctagcaatcatgacaagcataatatatattaaagtaccaattgtattttactttttatattttacatatttaaagtttttaggactaattaataaatcattgagttattatttatgataatatataataaattgggatggtaaaattgtaacaatttttattgatctatacactttgtagaagacaaataaaatttatgtaggttaggactctaacagatataaccaactgaattgaacatgtaactaacctcctaacagactaaggagaactaactaactctaataatttataatactgcaaaattaatatatattacatacataaattatgatatatagatcgacatcacatatgataaaatattataaataattcttaaactctattaaattatgtttggtttgcatgaacttaattacagtataaaacaatagaatcgatatattgttagattctatatcactcataaaatatgcaacaacaaaattcaattctatagataaacatattacatataattataagtgtataactatagatctaa

SEQ ID NO: 35372 - DNA, 891 bp, Cannabis sativa
  modified_base (815)..(816): a, c, t, g, unknown or other
tctggtaaaatatttccaacaaattgctgtacctaaaattcgactgttatttcagaaagtgacacgtgccaatctcagagaatatgaaccaccaaatataatagcaattatattaaatgaaataactcattaagtacagaattagtggagtatatctataactcgctaactgcatagtcttgagcgagacaatattgttatgggatttgaaatcaaatgtaattaactaacaacctatgttattataaataggggtagattatacagagaaaaaggaccaaaaaacttttataggaaaaaaggagaacagactgtttgtgaaagaaccctagttctgtatcagaaaattctgaataagattgactcgtggactatgtagagttaactgcaaaatcacgtaaaaacatgatgttctttctatttctataattcttagatcacttatattttctgtgcaaaatctatttcgaaaataggctcataatcgttaacgaaaatctgtgttagcaaatgtaataaaagaaaatgcaaccaagtattaatggtgataattaatttggtgatttggacatccatatataatatttcataacaaagatataaatttttctacaattttatttttttgagaataaataaaaatttagtagaatccttattcttataattattaaaaaatatatatattaaaattattaatatttgaaatttaatgtagttttatgatttaataatctatatataaaatagaggaatagagtggtgacatgacactctataatctctacatagctatttttctcttctctccttanntctctcatttttaatattttattaaagcatgaatctacaaagtaatatttaaatattattttaataaatattttt

SEQ ID NO: 35373 - DNA, 1538 bp, Cannabis sativa
caaatgagagattaatgcagttcagaaagatacaaacattaatctttagcaccataggctcggtcatattagtgcaaaaggacttcaaactcttgctagaaagaaattcttaccaaatttgtaaggtatggctcttaaaacttgtgatcattgcttagctagaaaaacacatagagtttcttttcatacacatccaccgtctagaagatctaatgttattgacctgattcacattgatgtttgtactatgaaaactagaactcttggaggtgagctttattttgttacttttattgatgaccattctagaaaagtttgagtttttactttgaaatctaaaacctaggtgcttgatgctttcaaagaacttcatgccaaaattgaaagagaaaccggaagaaagttgaagtgttttcgagtagataatggtggtgagtataggggtccatttgaatactattgtagactccatagaatcaagcttgagaagtcagttccaaaaacttctcaacataatggtattgcagaaagaatgaatagaacaattgaagaaataattaagtgtatgctttcccatgccaagctacctaagtccttttgggaggaggctatgagaattgtagttgttttgattaacctttctccttcagttcctctaaatggtgatgtgcctgagagagtatagagagggaaagatgtctcatatggtcatttgagagtctttgggtacaaaacattttttcatattcttaaagatgagagatctaagcttgatgataaggcaaaaccatgtattttcttggggtacggtcatgaagagtttgggtacaaattatgggatccagtgaataagaagattataagaagcagggatgtggtgtttcttgaagatcaaatgtttgaagacagtgacgaagtttagaagcaaaagtcccatgttaatgttcttgtgagttctagttcagttccttcacccatagtgcatgatgatcatgggggagatgaacaggaaaaccatgaagagcatgcatgtcaatgaagaagtagatgaacaagaagatcatggtaagaatattaatgatgttgttcatacaattaatgatgatgatgagccaactgaatgagatcaagaagcacctccaccatcactagttgagactccagtaaggagatccacaagagagcgtaaactaacttcaatatacaatcctcatgagtatgtaatgctcactgatggaggagagctagaaacttaacaagaagccattttacatgagcataaaaatgagtaggatggagccatgcaaaaagagattggatccttgcatgagaatcacacatatgacttggtgaagttgcctaaagggaagaaagctctaaaaaacaaatgggtttataggcataagactgaaaataatagctcacaatggtacaaggcacgatttgttgtgaaaggattcagttagaagaaaggtattgactttgaagaaattttttctcctattgtgaaaatgtcctctattagagttgttcttggt

SEQ ID NO: 35374 - DNA, 1749 bp, Cannabis sativa
ctgactctgctcttcctccggtgcttgaccaactagtgaccccaggaaggtcttcttctagcgcccctctaggccaaatcgtctagattgatgaggacggaaagatcgaggaggaggaggaagagggtgagatcctagctcccttggaccgaaaatgcaaaggcaaaatggtggaggcagagtcttccaaaaaggtaaagagggtgaacactccggccgtcagctttgattcggggatcccgcctgaagcagaagaatacattgttcctcccagtatcatccttactcccgtccccgcagatgaggaaaggcagcaactccggatagccaagcattactatgctatggccgagtacacaagggggaatgccgaggtggaagccctgaaaaaggtcctacgggaggctcagcaaaattccttacgcgaggaggcctttaggaaagcttgggacttgaacatggatcctctgacgaactggttcaaccgcttcgtcggtcctacccttgctcctttcgcctccgagttaacgagccattttatctccaacctgacccaactcccggccaaacgatacgcagcctacgcttccacgaactccatctatcagtgctgctatgaccgcggtaagtctttgttaatggttttttcttttcttttgtgtttcactctgtggcatctgatctctcatacttaactctttttcttattttgccagattgctgcagagacatgtcgcctctcaaagactttgattgatcacgggtacatcatgtgcgagttcgtgggcatggactaggccatgaagagtctaagagatctggcagctgagaggaagacgttcagggaggaagcccaacagcgggaggctcaggcagagaggaggcatcaggaggcattacaggccaaggcagaggagctgaagacccgggatgaggtcgtggctaaggcgaggcgcgagctgagggaggccaaggaggcagttgaagatctgactgtcaggctgaagtccatgaaggagctgcatcaggctaacttgcagtcgacggccaacttgaccgttgaggtgaaggagctcagggatttcaaagatcaggccctgaagaaggtggaaagggatgagctcctggcccctgttgtctgcaagcattgcaccaagcgctttgatgatggcgtctttatggcctggtagactaatggccaaaacctcaagctcgactactatccaaagactgaggaggttctcgtccgcttctgggagaagaagaagatacttgatgccctgctggaggagcgcagggggcctcatcttccaccccgcattgattaagccaactgttaaccattactgctattatcactatctcttctttttctttattttatttacatttacagtccatttccccctccctaagacaatttatattttttgttaaggggagacaatttaaggcccgtccccaggcccttaatatttttttagagctttttgctgggtttgaacacttaaatacatactttgctttttaacttcgttaaatttttggtctgttttacatttgtccgtgtcgtatgccttactaccccctgagtgtcatgaaaattgtttttaaggcactcagctttacaaatattaatttagaggttgcacatacttgtccgatacaaatttactttacagagcataaatttatatttttttgactattggtaatactttcggaggtgatcagcattccaggccctag

SEQ ID NO: 35375 - DNA, 1626 bp, Cannabis sativa
  modified_base (186)..(191): a, c, t, g, unknown or other
tgtagtatgttatctaagtgaaggagctgtgtataatagaaattatattgacatggaccgatatgtaattaagttatctttgtcaaacatgtcatttactataaagacctaattcatatcacaatgatgatcaatagtagattggcctgaatcctgagtaatcatgaactcatgttcatgttattnnnnnntttgattcactcgttaaagtttctcagtgaagatgattcttacaacttctattttgtgaagctaataatgtggatgacttggaacttgatttacaatcatggaatcttgactttccaaacggatcgaatgttagtttttttagtgttaattctataattgaaaagttctgtagcaaatttatactggatctaaattatacgtcactggtgaattaacaatattaaaggataaagaagtaattagaaaggtaaaaagataatttgatcaaaactaattacgaaccgacacaaggagggtaatcactaaaattaattatatcaatggacactctaataaactcagtaaatataattctataattattaagagtttagttccatatttatagtgtagtaatcatggatttaataaatataaatacttggttgaaaagattcaataaataatctaatttaatggagcttagtattataggtccatggtctccgaattgtcatcttataacaatctcaatggtatggataaaactaaataatgatgtttgaaaaatttattttaaattagcaaaatagtaattatttattatgaaataaataatttattttaaatttattatttaaataaattagggagacaaattgttttcaggacaaacaccaccatgtaattattataaggtagtgcctagcattgtgtttctccacaatggtaggcacctactacatatggtgggcccaactggatttattttttgcttaattaattgattcaaaagataaatatttatataaatttgttttttttttaaatgttacaaatgtaccaacgagtgccttcgccctttacttctaattcaagcacgagaaaacctaggagcaccaccctcagacctcacgattcctccttcagacccatcgagactgttggattttcaggtagagattaatggacttatagctcatgcttgcgagattcggtctagagttgcttgcctcaattagattcttgttgccgtgccatcgctacgaccaccacacgatgtttgaattccttccccaaggtcttcaccgtctccaaattcattgtcttccctaaatcccccacctccatcatgtaagtatcttatactcttttggaattttaaaatatatttgagatttagggtagagcaaacaacttggttgaaaatgtgtctggccgactttgattgcttgcatgtttactgtaaaagatagtgaataggatttaggctttcaaggttgtcttgaacacccttgaaactaaaatgttgattttcctgtatcttggttgaagacagtattaggtttcttgaaactctttctttttagtggtttttttgctgaaaaccaaacttaccaaaaagatgttgaccatggctgagtttaattctctgttcgggaccattatggtttt

SEQ ID NO: 35376 - DNA, 2097 bp, Cannabis sativa
aagccctaaagacaaccctaccatccacctacacgtcttcaagctataacggaatgccaatgctacagtaatggaagcagtcgaatcaccaactgatgactaagtcgcaaacctaacaataataccatttgtgttacaaactaccttcctaagtctgattcttagtttaacttcaacaaactagtaggggatggaataatcttaaataaactcttttaattttgttgagtgactattattatgaacaatgttatagtgtaaatttctcgcctaaaatataagagcagtctcgcataaaattgacatgtggacccagcttttaaggaaaaaatgacgtgttaactaatgactctcatagagttggcattatttgatctaaacttgcgagatgatgcgactgtgacagtgtctagtcgcatactatgcatcgcatagtcacagtaagtaggatcaagaggatttgatactagtcgcacatacattgattatatgcgacgaccaaataaacctctcctgcaaccaacaaagattgctattatacataagattggtctgaatgactaaagtgttcgacaacttgttgggaactcgcatgttctatgttgtcaatgcataagatgtcaatgtatgcaattaatgatgaatgcataaatctaaataaatggcccgaaggccaccgtgcaaatataaacacctcagagtctacgagctcgtgtgttagaatatgaacgggcaactcgcggcttactaagtcgcatatattgttgtacttaatacaagaacggattaaaatattcttcatttattctttgaacattcactttaattaatatttgttatttaatgtgttctgaaatcaatcagttatgtaaatttaaaggatattgctttttatataaaggagtgatttaaattaaattaatcaagctaaaatctttgcaacaatggactaggaaaccaaactctgactgaatcactataatttgagtactcactactctaagtaagtacttgtttttaattaagtatttttaaattcattgaatactcacacatttttttagtgttctctaaattcatccaacaacaaacactagtatgcaacttgataaaattattttgatggaatttattacctaaatgtttcaattaataagatacaagataatgaaaatcaagcataaccacctactaaattgtctactaagacaattctcccttaattttcattgcatattggacacatttcaattataaataaatcatcatgctcctccctccaaaaaaaaaaatcactaagttagtgttgactatcatttccatgatcatttttctccaaagtttgttggaaaataaaaaaaaaaaagtcaatatataataaattatagagtagtcattcaacaaaggtcaaaataaaacaaagtgttatattatccattatacttgccttggtgggtccatgttaaggccatgccttagggccaatttgtgaaataatgaaatggacatgacctaaagttggggatattttgtactcaataaaaataaacacttataaagattattgctatttttatgaaatgattttttttttctataaagacatgatttttcatgtcaataatgccaaataattcttcttagatttatgggtgagtggtgacttatgtatattataatttttatgataagataagataccaaaaatattgacaatcattttggacacaagttgtagtggattgtagtgtgaagaaatgagaaatgctataagtgtgaaattgaaatccattcacaaccatgtaacaaaagtaaagataagctttattcatttgttatattttgttttgtttcactccaaaaatctttcatggtttttcttcacattttagcaaaaatgattatctgatatttactcaaatttagatatgtataccatgattatggtcaatttagccaacaaaataataataatgaattatgataacttgtcatcttaaattaataataatccaagtttgtaattatatggtggatatgtaatcttcaaaataattcttgtgtatatgtttatataaatttatatatgtcataaat

SEQ ID NO: 35377 - DNA, 999 bp, Cannabis sativa
tccctaaagtatagggggtatatggcctactttgtactattgatttgcctactgtgtactatcgatttcttataataaaagtaattgatcgacgtttcaaaaacttttttgccttagcattttttttattacaccaagctgtaattggaaaaacaaactacgattaagattgtagaatacgcgagtacccatgtaccgcggaaagcatacataatagcataaataagtatcctcgaagggatatgtgctgttcgaaatacaaaaaaaaagtaaagtaaaatttgtccaagtacaaaacgcgaggacccatgtaccgcttaaaaagtttgaaagttaaagaaataagaattaaataagtcaagcgtttggagcgatgggagcagttggagtaatagacccatctgcgaccttgctagcagcctcatcagcgacctcttcagtattcgtagcctctgcgtcctcaggaaaaagattcccccgcacccttgagcctaagtgggcgacatagcacgaaatgcttccgccatctcggccgcctttgctccaaggattgcgaagttgaaatctggtatcttggaaagagtcctatatatatatatagtcggagactgctttgttgtattgcttttttccattctccttctcagcctccaaatcgcgagacaaatcctcgaccttcgattgagaaagtttggttgcaagttccacctgctctttggacttccggaggttcccgagttcgttgtccttggcatttgcatcctgcttcagcttcttgttgctttcttgaagctatacaatcagtttcttcagaagatcaaattctttggaacctgcgacgaatgccctcgaaaacacggtcataaatggcgtggccagctccgccccaagcgacatcgcttccactttcgacatgaactcatcgctcacaaacttgctctgcatagtcacaaaatcgcgggccttgacaacccagtcaatcatgaccttcttcccctt

SEQ ID NO: 35378 - DNA, 2875 bp, Cannabis sativa
actgttccatcattagctggagttgcagcagcttcaacccatttcgatacataatcatcagccattaaaatgtacaaattgttgaatgaagatggaaaaggaaagaacaaagaagtggcacgaccaaaccttagtcaggaaagagtttcaacccgggcaacaagtcctactttttaattccaagttgaaactgtttcctggtaagttgaagtcaagatggtctgggtcgttcacagtggtgaaggcattcccctatggagctgtagaactaaaaggcgagagcccagagacttttaaggttaatgggcagcgattgaagctctacttgggaggtcatattggcaaagccaagtctgccaggattctggcacccctttgaagaaaacaatcaacgtccgactatatgacgataaagacagcgctcttgggaggcaacccaagatttaatggcatttttagttgaacattcctaatttttttttttttactttctcttagtttttgttcatttaatttgtaaactcaatttttagttcatcatttttcattccttttcaaaaaaaaaaaaattgggcactgcccagttgccgcggcaagatagggctttcgccgcgccgagatacttaggcagagagggcttattttttttgccatctcgccgcggcgagaccaactttggtcgcggcaagatggcccaggcataaataaaaggaggaatttcgtccaacacacccaaaaacacccattcttcaaccctaaatcctcttctccgaattcttcatccccatcaccaaaaaccttcattctcatctcacaaaaaccacttttcttcatttgtttcttaatcattcatcgctaatcccttcaaaaccctatttctctcatcaatccatctcttcctttgaaaaccacactcaaaattcctaattttcacacaatttcaaaaaatccactatttatcaccttctacctcaagaatttacaatgccttcatcaatggaggtagagtgaaggagattctcatcaatgtaagtaattttttcatgattatctatgaattttttggataattttgaatttttgagactcttctaagggatcagtgtgttttagttattgtcatgcatattgttgtggagatattgtttgtgattgaaagattgagtgattattgattgggtgttcacctgggaaagagaaaatttaaggggaagtgctagcgaaatttttcttgagtgttaggagaattgattgagaatgggacctaagagatcaagagtgagtgagtgaggtgcttcatcatccaacccaccaaggtcatcgagacgatcaaatgtagatatggcaaggttcgtaagtgtcgaggcccaagaacgctatttagaattgaaaaatagagcattcattgatgataggggtattgatatttgtgacactagagctcctagaataggcattcatccaatgtttgtgccaataagggaacaggttgaaaaatggggatgggtaaaatttgtgattgttgatgagagagtcaaccaaaccttagccctagaatttttgctaactagcccgaaaggaagaatgacatagtgaaggttaggggtgttgatgtttgggtactaagctatccatgccatctttgacctgcaaacttttgcctgtgaagagaaacgcctaaaaatgcttgaagaagaaggggagttggattatgttgatatgggtaagactttgggtttccccgaattcatgtttcatgaatataatgagaaaccctatcagttgtacggttgtgagttgaacccgatggctgaagcttggttgtattttgtgagtgctaggttgatacccaacaagcaattttctgatgctcaattggatagactaaaatatgtctatgccattatgaagggatttattttgaatgtgggggatattattaggcatagctttaacttgatgattgaaggagcctgcggaggtgggcttggtctagctgatattgtcactcatatgtgtgaggcatatggggtgccgcaatattcctatgatacgaagattcctccacagcgcatgactgatgttggaacggtgtttagaattaaagctccacatccacatggccagccacctcttccaccacagcaaggagtcacaaggcctcctcctgaaaacgaagatgagcatgttgaaaagttaccacaacgtattgctggccctcttgatccagccacacagtaaacacatgaccagctaaattatcttattcagcaaaacattcacatgcaaacttacatggcgcaaatgagtgtctttgatgaaaattaagtgcagcagctgaattcacttatcaccaggatgaatgtcgagattgaagagcctaattacttggcgaatccaccctgtttttatccttttgatcagcaatctccacaaaaccccttctgatgggggtttacgttagtctctctcaccttgaatattatatcacattgggcacaatgtgcatctttactttagggggagggatttaaaatttttatgtctatgtttttgtttagtttagttacctgactttgactgctttctgatcgctggtcaatgaaaaccccggatccttagccctatcctttgctggttggtttagtttttgtttaattttcatgtgttgataattgacccaatatattgattgaactgctgttgttaatatgtgcaatggattgaaattttaaccgtgtgcttaattcataaattctttagattgagttggatgccttgaaaaaaaaaaactctttcatatagatgtgaattataaatctttggatagtatcacttttgttctacttgggtttgtggaatgtttgcttgacat

SEQ ID NO: 35379 - DNA, 1251 bp, Cannabis sativa
tatatatcaaaaataaaaaatataatcaaccactataaaaattaattataatagaagtaactcaatactattaattaaataaatacaagtagatagtaattagtgatagtcttttcatttcataactatatatattccgaatgtatatgtatatatatatgcatgtattattattattatacttttaatattctcatatttcacatgtaatttattgaagaaaaaaaagtgaaaagtttattatatatttctcattaattaaaagatatattaattattattgttgttgttattattaatagtattatatttatatatattcgttaattattttttttattttatattatttattaaataatataataataatatattattttattttttatttttgaagaagggcaaaaaaaattgatttaagtttaagtatttataaaaatttattgaaatgaattttacttatatacttctataatgatactttcacatatcctctccatatatatcttatgtggagtatatgtatcttcctttttaccaaaaaagtatatgtattctttttgtttatttagaaaaaaaaaattagttagtgttattgttaaattttattattaattatttgtaaaattcaaacaaaaccaaaaatttgatggcaaaaaatgagaaattaactatagaatttatatatatatatatatatatatatagatttaatcatattaacgtagtatttatttaataatataaataattcttaactatataaattataaaaagtaaccatatataaaaaataattattggctatataaatttgaacataaaattaattattatttaagtatgtgtcttctaattattaatgatcactaaataattatataataaaacataaaatgtaaaattgatatattatcatccaaacaaaaattaaatttatattatgacactactttttttaacaaattctattgcactatatgattaattataaacttgatgaataatttgttaatggttttatgcactgttatatatttattaatttataagaaatatttattagataaatataaatgttattttaattaatggtttctaataataatattaatcatcatttatatataggtttaaaaactttgtgaagcgtgatgatctgttctttaatattatattaaattatattttataaaatatttttaattatgtgttgtatatgttgtaaagggaaatttgaattttcat

SEQ ID NO: 35380 - DNA, 3209 bp, Cannabis sativa
attgtgccaataaatccgttgtcacatgggaatttcatgcataaattcttgatggaagttactaccccaaagtctactagggttgtctgccttagtactgcattatacgtggtagggaaatcaaccaccaaaaaggttgagtgcttaaaagcataaaaacacttgcattgttctcccgtttgagggtgataggcaactgaattttacccatcagcattacaacatctctgttgaagccttccaatttgataggacatatagttaggtccgctttagtaagccatatgacctggaatgtaaatttgaatccgatgctaactgagcttccattgtccaccaggaccctaaaaactcatttgttgggaatctatgcgtcaatcactagaggatcattatgggggaaaggcacatttttggcatcatccctaatttcatgacataggttaatttataatttgtcatcgcataggaggaagaagaatagctaattagtgttaacaattgtgtaatcaaagcaattgaaatcatatccctaatctcacatctattgttaaatcttttatttgtttgttttatttaatttttcttagtatatttagattcaaaaatttatttattcgattgccaattataaataagaatttaattgattggtacttaactacagtcctcgtgcaaacgatctcacttatttgagtattacatgttaaaatgatacgtatacttgagtgttggatttatcacaacattatacttacactgcaatgatagaagctctcttgagcaaactttgccaaaagtggcctgcctcaacaaccattaccataaccaggcatgaccagaagcctagcgagtgttgacgatactgatggtctcctctcagccaccaccataataggatcagtttctgatcaacttcacggctcagtaaaaaggcaggggaagtagccattggcaatggatgtttccctcgtgtcagcaccaacactggattcctgagctggatagaatcgttatacttgacgacccttcgtgagttagtcactgtaaccgcatcgggtcttagcttcttcgcctggcttaatgcctgttgcacctcactgtgcctacttagttatgccttaatggaaggcggggaactcaagcctgaggatgccactgatcgatcatccttcggagagtgagttggctagacctgagctttaggggcgagtgtgagtacgacgagtctttcaagagcatatgcgttcatcttctatgccttcttcgagtgttcgaggatgtaggcttttagatttagcaatacttctgaccaagaccctcctgacctctggccaaaccctaataggcagtcaggcaaccttccttcttttttttttgcacaggttatccttttgatgggttgcgtctatagccaccatgcatatatcattcttcagctctcattgaaagcaccaaaatatttaccgagttttttggaaactaaatattttttagagcttaagaaagtgataacaaaataaatagcaagataacaactaagagatttgtacctggttcaagcgttaactatccttagtccatgagtctattttattaggctcatgggccgataattatttatagaaatagatacaaaatggactgtaactcctttataccatgtttctcttggagaagagaaagcttagtaggaatattctagagatggttgtagggttacaaaaatgtgttattctaggatgaagaatgagtcttctctcccaaaaaaaggtccttctctctcctggtttcttagcggtatttataggccaatcttttttgcatgtcctgccttagatggatcatctttggagcaaaattcgactgttggattcgtaggtggaatttttcccacatggcatttatgggtgtcagatcgtacaggctgggtttcagatgcgtgtcatgccagggttctccattttgaatttcccttatccctagtcgttggatcatttggtcaggtacacaaggacacacatgctctttacgatagtgtgtcttaggagacaacctctgacgtcgtacatgcaaaagcctagttactgggtctgtagtctgacatgtataggcgaggcttccgtgggctaaaggcgtagcccagtgtagcatgtctcaaaatgcattggtccctctggcaaaatccatactcctctcgagagaagatggctttggttccaagaatagatggagactttagctaatgaataccctctgtgttgctagcagacagggaactccctatcacgtaagctctttctgaaaagttggtgcctttatcttcctggagcatcaaatgaggaggttgggcagctaataacttcttagcctttcttgattgaaatttgcgtgtcatgattacgaaaatgcagataacactggtatttacaacaaggcgatatgaccattggtaggtaaggagcctcatcatcgtgttgtgttaggtcgtggcaatccaatttgtgggactaaggacacatatagtccgaaggtttcaccttgcaaagttggtatctagacaagtagttggagaaagaggagctacaaagcacgtacgtgcactaccacagtgtgacgcaggggacaatatttgatttgatgtcaaaagatatacaactgtcacctttagcgctagatacgacacacttggctaggttccaggaacatctggctaaggctttcccggactagactaacttgctaacatcctggatcactcttcacttctgatccttcttcattgtattttgattaatgagaatcccggagtcctttcctccttcactaatatgatgagccactaggaggcttctaatatataacaccttccgtgacattgacagacggagggaatatactagacatggataatctgatgtggcacccctttgcgattgccacgtacatttcatctgggaatacgaataacagaaacaaataaagttacactgataactcattttaagagactttattgtaaaaatttccaataagttttccttatatagtaaaattataaataatttaaggagataatatatagatatactgagcactattatgtgtcagaacataataaaattatagggacacgattttgtcctgtgatgtacttttacggaatgtattccgtggtacattagatgggtctcagggtacgttaccat

SEQ ID NO: 35381 - DNA, 1235 bp, Cannabis sativa
  modified_base (563)..(564): a, c, t, g, unknown or other
  modified_base (1181)..(1186): a, c, t, g, unknown or other
attgtcaaaagtgatagttagaattgagtttaacatcaattccttttcatgaacaatatttataataatcttatttctcccccaaactcaacatcctcaaaattattaaaatttctcgtctcaaaatttaaccatagtgtgggactacacaatttgtagctttttaattactagagtatacagtaaagtatagttccttacttttttggagtccatattctttttatgaggcttataagacctcatcttaatcgaacatccacaaatagaatatctatgtgttagactattggtccaactacaaccttagtgtataaagagttttaacttatactttacttgatacacagttcagaatttatgttgcattcttaagtgtttcttcccaaaatgagtttcatgaagaagaatgaataatcacacttctagtcatgtccttcgataaatattaattacatctctcaaatatccttcatgttaggtttgcctagcattttgtattggaagatgaaattacatttctttagtatttgtgcaaaataatcttagacgttactcacttnnttcgtcatacctcccatggtagtgttaaggatcatagttagtttcaatgactttaattttcttgtctagttgttttgtcaactatggtttgaaaatttaaaagaaacaacgtctaaagattaacaccttatgaaaaaaatatgtttcattagtctgaagacaagacactattattgatcattccatgaaactatgaggaattagatccaccgaaacatagcataaattcttagattatgaaactttattttgtcacttgatttttttatgtttgtttgttacccctttaccaaatctaaaatttattaaatcaaggggtctagaatactattaaaaataagtctttctattttccgtttgggagatataatcttaatacttataccaaagtataatagaattctcatgattcaatttatgttttgtaccagaagagaaattataaggtttctttatatgaggcaaatttcaataaatttataaattaaaaaactagtagaaccaatattaaatattggaaaaagactaatttttcaaattctaaatgaatgagaatgacataattattcaaaatggaattcaaaactaaaactcatctaggtgatgatactgtatannnnnnttccaaatccaaaataactagtctttaatcatagttgaatatccttata

SEQ ID NO: 35382 - DNA, 1602 bp, Cannabis sativa
tgtgtacatcttccaggtcagcatcttgaactttaggggtagctcaaggatgttgatctcgggggtgaagggtgatctgtgtgctcggtctacctggagatcagtgagttttgggccggtcaggccttgaaccatatttttcaattgatctaactgtgcttgcatagatggattaatagtaagacaatgatgaagaaagaatgcaaccattatggttggtgttccaattatctcaatatactaacttctaagattgatcaagtccaagcaatgcttgaacttgttaactgttaagatcttagtcctaacatcagcatgattatctttagatctggcattttctaattcaatcaatcattcctctatcttctctctaatccagtagagtcttatacctatatgtttgctcttttcaagataaactagatttttacaaagatagatggatgattagctatatgaatacatagtcatcccccttgatttgtttcataaagaactccaaaaagccataaagcttccttaaaagcttccatagtcgccatgaattctacttctgtggtgaaaagagcgaccacagactgtaactgggccttccagcatatacacttctaatttgtcatgaaatagaagaagtggttgattttctcaatatctctatttaaagcatagtccgcatccataaaccctttcaattctagttctcctttagctttcccatagggtccaaaataatccccaagtgtccttcaagtaccttaataaccatttgagagccttccaatgttcaatgcccagatcaaacatgaaccggcttaggatgcttagagcatgagctatcctggtcttgtgctcaccatcacatacattaaacatcctaagaacatagcatagggtacatcttttatttcctctgtctccttcgaatttttcagacactattctttcgacaaagcaaattatccccctaacggaaaggatgtactttttgtgtcttccatgttgaacttttgaatgactttcttgatgtacccatactgcttaagataatagtcccttccttccgattccttaaaacttcaataccaagtatcttttgaactggtccaagctccttcatctcaaattctcttttgagcttggatttgatacttttgatcatagatttatctttgctcataatgagcatatcatccacatagagcaataagaacacgactatccattgctctagattcttgaaatataaagtaatcatatgcagattgtttgaactcgatctattgtatatacgtatctattaatattttattacaatagaagaaaatcaagatacattacaactctatcgtaaaattatacaaggactaaactaagagattaattaaatatatattacaatacacatatatacactatatatattgcatatatatatataaggtagaagaaaaagaatacaacacatataatataatacatagtaacaagagatatatatatttatatataatacactcactcacaatcttgtgtgtagattagtgaggatcaccatgacttgaataaggtataacacttttgtccaaaagcttatttccc

SEQ ID NO: 35383 - DNA, 2133 bp, Cannabis sativa
atttgaatgttagcttctaactcgtcaagattgtaagtcttactgacagatgtctgaagttaactggtgaaggttacaggaatgggccttcctatagcgtgataggcatctcgcttattatgtctcgagtccactcaaccgtcgtaattagttagtgcattttacacagtcgatatgcgtcgctttcgtcttcccagatgtaacggagtcgatgtctcgccttatacatccaatgacatatggtttctcattaatatactgagcaacagtttgtatatcttttcctcgcataagaccttacagtcagcgagttgcaaatatactttgctacctacacaattaatgagttattccattaaaagtgatttcatcgatccatattctctttatcttgacatgtgtcctccactgagatggtagccgaattttgggtgtaacaggtggttacaagaagggtgtctacacatttggtaccctgtgttttatctaaatacaagttaggtaccttgtgtttttgttatctctattgccggatgatttgcacgtggcaatcacggaagggtgccacgtcggatgacatgttgttattttatgtcttcctcttactagggttatggaagacactataaaacttggggaaacgaaccctgttattttagggaaggaaacgaaagttgcacacgctccaggatggtagcgaatcagttggtccaggaaggtcttagacaaaccttcaaggaactcaataatacctaatctggagctaaacccgactgttacatatcttctaacaccaaattagatcttgtcccctgcgtcataccttggtagtgcgcgtatgtgctctatagctcctttttgcccaatagtttgcttatacactaacttttcaaggtgaaacctttgggcgacaagtgtagtaagtcctacaaatttggatgtcacagctatgcaccgcacgattaggaggttcactagccactgatggtcagattgccaggttgtaatcactagctaaagaaaacgtgttgagtacggaaccctaggttggtgaagggtatgccctcacccacgcatgtgcctataaatacccctatttttcatgtacaaaggatgaacatttttcttatttacaaaaattctgccaaaatttctagagagtttccattttctataagagaaacaaaatggaatacagagttatcattgtaaacacttgtaatactcaaatacttgtcgataaggctaattcaatatactcgtggactagggattattaacgcccaaactacgtaaaaaactatttgtctattatttattgtttttcattttccttaagctataattaatcgatgtttgaaaatctcaataaatattttagtgctttcattgagagatgagggaagtttactgaccatggtgaatacccaaaaggacacaagcaacaaaactccattggatagtgtaatggaggaagcatactcccttgcctccgacctccaaacaggcagtgttagagaagaaggcacgacccgtgtcgagaattgagtggaggatgctgagaacgtgttcaacggccttgacaatgacccgaatccttaagatggggatgaagaaggtgatgaggatgactacgtaaaagacgggtactacaaggataattattactatgaccacgagccaaacttattgtgagtgaacaaagagtttgaagctactaagatagagttagcagaacaaaggaagctcaccgcaaaaatcaagagaatgatggaacaccttctaaacaagtttgaagacttggcagagttcgacgatgaaccttcggtggaagtaatggtcgaagaacgcacccacaaataaattgaagcaaaatccttgaatcctcgaaaggataaaggtaagggcaaggtgggtgagcccccacaaaaacccactcctaagcctcctcaagaggatacaaatccagtcggccagccctcaagtatcaaaggccactagtgctttcgagcctagaagcccttatgatcctagaggcaaaactgtgccacagggacaaagtgcaaaggtacctaagcctaaagggcgaaggaaccaccccagtgattcagttaatcaggatggaaggacaat

SEQ ID NO: 35384 - DNA, 1900 bp, Cannabis sativa
  modified_base (1868)..(1874): a, c, t, g, unknown or other
aaaacagagggtccaattagtaacttttgtaaaacacagggtctaaaatagtatttaccctatactataatacaatataatacgaattaatgtggcataccaaacaagtctggtgtaaatacagactagaattattgacactacacgaccaggcatgaaaaaaaatatggacttgtacataatacaacacaatattacaaattgacacaacaaacctgaaagacacaatttgtaagcacaaatataatttagctaaaagcacgaaatgttaaaatccttataatttgaaaatagtaataataataatttaaatatttattagtagatatacaaaatttaataaattttatatgattttctataaaatattgttgataaattatataaaagtaattgaaactaaatgtgaaacaatagagtataagaaaatgaattaactcgaataaaatactacacgaatctgaacacaatataaaaatatatcgggcctacgaatcatgctgagcctaccatttaaaaaatgttagcacgatacgaccactactacaaaaaggcttattcccgtcggttttcaaatcgattttttttcgaggattgttgctaataatgttaagtgactgtttaaaactatcggaaatactccactattcccaacggttttaaacaattgttttagaatccctgaatgtgcaaaacagtcacaattttaaatttcaaaacgagttataacggtagctctaacggtttaaaattgttggttatactatagccgacgattaaagaaccattagcaataatagtatatccgacagttttaaaccatcgaggatagcattttaaacatataaaaacccgaaaaaaattgtcttgttcaaacattttagatctcgcgcctctcccgtatctccctctcatcttcaaactcacaatggaacccccaccaccatggagctctttctctctctcaacacgatagcagatcttgagggttggtggcacctcctcctcgtcggtgaccgtaggtttataaaataattaatctctattatttttattttgggatatatgtattattgagatttttgtgtttcgtagatcttcaggtatcttgggggttgtggttattttggcagagccgtggcccgaatctcactcccattttgagtgctcgtcggagaagacgaatgaccattcttttattgttatgtttatgtatagatttgttgtgtatataggtgtggggtttttgtatttgtattgtgcatttcatattgtaaagatctgaagattttttttcctatgtagttgattgtgcaaaattatcgataataataatatatatatatagctgacggtttcgcataatcacctatactataggcgacaatgcaaaactttcgcttataatataggcgactgttatagacaatcggctataatgctcagtatgggttttgcatagttgggaaaaaaaattctcatcacaattttgcattgttgcctattctgttcagttacccgacggccgaatacgtgatggtcttagagactgacaagaatactttacacgactgtctaaaacaatcgaaaaaatgaaattttataatagtggacacaatttatattttttatagcattacatgatccatgttttaaaaaacacaaataaatataagtcggaacaactcgacatgcacttgtctacaacactaatcatatatatatagcgagatcaattttatttctcattcgctaataatgttaagtatagccttttaatttgtttatttttgtagcagtcaactactagcttttattattttactgtcatatataagggatacgattttgtcccgtgatgtactttnnnnnnntgtattccgtggtacattagatgggt

SEQ ID NO: 35385 - DNA, 1121 bp, Cannabis sativa
cccattttggattcatcatttttttgatgtattattctgtgtttttttttgagtaaatgggtattggaaaatgatagaggattaaaaatgggacaaaacgcctcaaacagcatagaatttggtggtcggatgtgggagttatggccgggtcacgaaccgggtcgcgccgatccgggtttcagacccacggacccgtgtgagcaattttgggtgatagggacgactgaaaaatgacatgtcatttgcctctatcgggcaaaacgacatgtcgttcgcccttttggttcaacccccaaccgagaaaatgacaggtcattttttttgacccttttggatgttgttcggggaaaacaacatgtcgtttccttaaaacgacatgtcgtacgcacaatgactcagcccccctttagcgcgaatgacgggtcattttttggatcctctggcttgtcgtgcttctaccaaacatgtcgtttttccaaaatgacatgtcatacgatcagttataaaaaaaaatgaagaaaagagcgtgtgggggcgcgtccaggggtgtttttgggccattttcccaccattttcatgttttttaattctctattattttttggtgtgcacaatactaattgcatgagttttattcatatttggttgatcattttagtattgtgacataaattttgtgatttatttcaacaattagtgtttattttcttgcctatcgtaagattaagcatggaaaattatttggttatgagaaacacttaaatattaatttatttaagtattgtattttcctccaaataacattaagatctttataagtatttaattatcctatcgatgatggttgcttattaaagatgtttcatatggtgaagaaaattattaaatattatgaatcacaatttatctatcctttcgatagggaattaatgtatttgattataatatttaatagattgttcttacctgtgtatgagtttcatcttgttaatttgtctgagaactctagcattcataatgatcatttattattttgcgatcatttatttatgagaaaagagcagaaatgacatgattatgttataacatgcatttaatagttattgctcttgtttctcatt

SEQ ID NO: 35386 - DNA, 1593 bp, Cannabis sativa
tctatgatgctaataaaatagctagctccaccaagagttttgactctagaaggcccccacaaatccgagtgaatgtaggctaatttctccttagtagtgtgttgactagtatcaaattttactgcagcttttcccataaacacactcctcacaaaaactaagtttcccatttaaaccaccttgaaatagcccctgtttgtcgagttcattgagccctctctcactaacatgtcctagcctcaaatgccatagttgaacatcattatttgcattgtttattgctggtgttgcagaccctattacagcagaaccaaccatgtaataaagaccatttttgagtcttcctctatctaccacaagtgacccttttgagatgttaagagtgccctggtcgattttgacagtgtaaccttgattgtcaaacaggcctatggataacaagttccttttaagatcaggaacatatcttactttctgaactgacctgataatgccatcatgcattttcatattaacagtgccaaccccaatgattttacaagctttgttgttgcctaaaaggacagtacctgctgcattttcctcaaaatcagtgaacaagttcttgtttggggtcatgtggaaggaacaacccgaatcaagaatccattctacaccagaatcttcactagatgcaacaagaacatcagctgaatcgtatcctaatgcaacatcagctgaatcgtatcctgatgcaacatcagcttcacccctttccttgctcttgtcccttttgagcttgttctttaatagataacaatcatccctaaagtggccttctttcttgcaataataacacttctttcccactgcatttctgttcttggaattggacttgtgtccattctttgatttcttgaaatctcttctttctggccttcctcgaacaaacagaccttccccaccagtttcagttctgtcatcaactttcttttgtatttctttagagttaagggcagctttaacttcagagatggtaagagtatccttaccataaagtattgtgtccacaaaatgttcataattcttaggcacggagcagagtaaaagaatggcttgatcttcctcatcaatcttgactccaatgttgttcaaatccaagatcagtttgttgaagtcatcaagatgccttctcagttctttagtttcctccatcttcatggtgtaaagtcttttcttcaagtatagtttgttggctaaagactttttcatatagattgtacctagtttattccataaaccaagagcagattcttcttctgcaacttctcgaagcacctcatcacccaaacagagcaatattgcactgtgtgccttcatctcgatttcttgagagactttctttacatcttctccatctttggaagtaggttcaagaatagcattgacaatgccctgctgcacaaggagtgccatcatcttgatgcgccatagaccaaaatcattcaccccaatgaatttgtcaatttcgaatcttgcagtcgccattgttgttcttcaagcttgatcttcagggttcttgaatcctccaatgcaacctgtgctctgatacca

SEQ ID NO: 35387 - DNA, 1644 bp, Cannabis sativa
  modified_base (255)..(258): a, c, t, g, unknown or other
ggggggagccactagtattggcctcaccattggctcttgggatattgcctaagagacgtgcaggagggtaacaactaaactcaccctctcgcactgacctaacttggcatgcttgccccagttagattccacaggtcttcagtatatcacctgtgtagcctgagatagatcgcaccttcgattctattaactcagtttcaaaggtgacgctgggatcctggggagtctttgatgtacgtggcttgggagacattnnnnaaagtccaagtcacctggttcaaaagcaatcgtgactttgggtaaaaataaaggctttgccaaaggaataaaggacatactggtaggttctggccaggccgcatctcacaagaaacggcgtttgcctttgatgatttcttgtaagaagcgcctgtggcaactagcattatcttcctggtgggtcttcactaaatgttccctaaccctagcatcattcaactctaatttggaggtggttttaggattgggtttatacaggacgattgattctgtaggaaattcaggttctatatcttctggatgataaattcaagaaccagagcgggacattgctgcaagaagaaagcagtctcgatacctaaaaagaattttatcaaacctgaaggtggtaagttgaaggttctgaaaaaacctacgtattccctgaaccctaatgttgacccaaatacagttcaaccctaaaaactactaaaaccaaatgagatggcaacaatacaaataatgtagcaagcatataagatattaagaagagaagttacttactatttgaagtcgggacttgggatgatgtacagctcttcggcatgtgaacctttgaaggcagtaaagatctcttcgaaagtatgaagtcggaggaaactcgtagaaaaaaaaatgtcaaggacaggatggcatgcaaaatctcgagcaaactcaatgttgtttcttaacaaagaagcttaatagtttatcaagatttctaaaatggaggaaatggtggaaaggtagttaccttttcttactttatactcttgatattagcttcgtcggatccaaaagatgtttgatcctacggacataatttgaagtggaagtagaaaagatggtcatttaatgttgatgtacctcgaaactgcaaaactgccaaaatcagagaacatatgggattatgacaaaaataccctttgtaatcattaaaaagcactttttattaaaaatgaactttttaaggggcaattgttatacccgaaattcggctagcacatcagaggaagacacgtgtcagactgggaagaatatgaactcagacacgtaatcaaaattatatctaaggaggaataactcgttaaaagcataattaacaaaatatatttacaactcagctcactaaatagtcttatgcgagacaaaaatatacaaactgttgccttgcgcatcaacgagaaaccatgtaacttcaggtgtataagacgaggcactaacctcgattatgtggatgagatacattgtctgtgaagacacttagcatataatgtacagtatacaaactaagtacagcagatgggtgaactagagcaagttatagcgaggcatccacctcgccataggaagacatgcacgcaaaaa

SEQ ID NO: 35388 - DNA, 1104 bp, Cannabis sativa
ggactatgcagaattttaactacaaaatcacgtaaaaaaccttcgtgttcattcttttctttttatttctttactgttttcatttttctgtgcatgcttatcactgtttaggctcaaaattggttaacgaaaatctacgttaacagtttggtgctttcactgagagccttcgtgaaaaagctaagaaaaaatcctccttacataaaaaataataattctctttatggctgacaacgaagaaaataattctcacgaagaaacaactcatcgtcctagaaaagagccaatgagtctccaaggatctttcgacttatcatttgaacggaccacaaactccgggaaaacacacaatctaagaactagacttgaagggcctagaatgaacaatggtaggtctcttccccatctagttgatgaggatggcgcatatgatccaacaaagtatataccagttgtcgaattagaaaaccaccatctcaggcgtcgattggaaggcaaactggcgtaatgctaaattagagcttgaggcagctgcagtccgggcaataagggaaatctggggacacaaacaggagtacatgggtcatctttaagagatcgccaacgttctttccaaacttataagaaagaagcttgcacaaatctcaatagggggaagagacgaatcatacccaagagaggagagcggggcgtgaagaggaaagtgttaccacgaggcacacaataactcatagttgatcaatgcatggaggagagaatactcgttgcaacaatgatcaagaaggcagaatacggtctataggtggaacgagatctgccagccgtcatggccaatcggacctacgagaatgcttgaaccagaaaaaacctgatcttcgccaacaacttttttcaaagcaaggggatttgatccatttgcgaaatagacgagttggagaataagttcaggaggcatcgaatcggggagctaagaaatcaatcaggatgtgtgttggctttgcttttagccaacgacaatgagtctattttataagcgataaatgatttataataacagatatatgataaagcaataaaaagacataggaattttatagaggttca

SEQ ID NO: 35389 - DNA, 1422 bp, Cannabis sativa
cttgcgtagtgtttataattttcgtaacaccacccacttcaagaacaacacgttcaagaagaaaccaacgtggtcatgatcaaaacccaaaaattagcaatgaggaagccaatgctaacactagttatgtacctagaagtgaggatgcctatgatcccactaggtatgtaccgttagttgaattggaaaattgccaactttggcaatatctggccgagtttaaccaataaaacgctgagttggaaagagaggtagccgcagccagagcaactcaagaaaataatgcacataactaacttgaacctggagtaagaaggccacgaggtagacctcgaggttcgagaaccaggaggcaggagacaaatcaggaaaatccccagaacacctaggaggagcaacctagggaaactagggatgctccagaaagcgaacaacaaaacgatcaagcgcctcatcgaaaagtacctcaaagaccccatggatttacgaatcaagggaatgaaaataatgacttgccagagtcttctcgtagaaacgagaacataaggcagcccaaaactagggaataggagatccctcgtgataacgagagaaatcttaggactaaacctaggacaagcgggttatcatcgagaaaccctcaacgtccttctcgaactgatagggaagaggcatacacataccccagtaggggcatgtatctaacctttctcgaaggagaaggcctgtgcatgacgaggcaagttctagctcgggacgttcgagatcctgagaacacaatcagtcagaaaggcacacgtgaggaggagatagacctcgccgtgatgatgatcgagaaagtatgagcactacagggagctatcaatctgagagttactcaggtgcaaggtccacgagcaactatgatcgaagacagccagatcttcgtgaatgtttgaatcgaagacattccaatttatgcgagcgcttaaattagaatgcacctgatttacgacaacaactcaatgctaatcgaaaggaagaggatccaatctaattgtgaatccatgagttggaagataaatttaggagataccaagatggggaatatgagaaactggttatgactcggatgaggaacccgagcctttccatcctgacattatgaactctaaatttccccagggatttaaaaaccttcacatctcacaatacgattgggacttcggacccagttgctcaactcaacaatttcaataccataatgcgagccagtaatatctcgaataattaatgttgtattttattccccacctcactgactagagcagcgagtagttggttcaataatataaagattaattagtaattttccccctgaactttgacatgtactaaatcgtgccccatgaacttttttggccgttaaaaattccccccgaa

SEQ ID NO: 35390 - DNA, 1094 bp, Cannabis sativa
gtaaagcacgaacaacaacaacaacaatagatttttaaagtaaattgagtaatttcctgtataattacttaagtttaattttttaccgtaataaataaatgttaagctattaaatccacgtgttattttcttattagtatatttgaactaattttttttaatgacttggaccgattagggattgtcacgtgacaatttacttaaccagatacttataaaagttctaaaattataacttatgtattattactgcaaaaaattaaatttatatatttatttacaattaaaatttaaacttaagtattgatgctgcaaattaatcaagtaaatttcataagagaaagggacaccttctatttctagagaattatacaataacttttccttgacattcaagattggccatgatatataacaaagaaatatgagaggccacgtgtcctgttactataatttaatatcaatttctacacattttaaatttaataaatataatgtaaaactgatttaacaaatttgatattaatttgtttacacaaagaagaaattgatattaatttgtttaaaccgattaatcatattaataaatacttttctaatcaaaggagcacaaaatttagaaaaatattaatttgtttacaaacataaagtctttcaactttgggaatatatccttttatatatagaaattagaaaaacaccacaatttgtattagttcacatttcaaggtcggctttaagtttaacatgttaaagtaaactataaatttaaatgtttcatgtttgattcaacgaaatttaatagggttatttatgtatatgttaagataatatgaatataacaagcaaattaataatcaaaatatatataaatgagagaatgacataagggaatgtagccctcttaaaacaggtgtattatattttaatatgttagagtaccaaatgttgttataatacaatttctaacatgagtcatagattgaccaaatttcgtttgtgtcacgtttagtgttctttatacatattataaacttatacacttatatatacgtgtactatatacaactaactatatattatattgtatgggg

SEQ ID NO: 35391 - DNA, 1952 bp, Cannabis sativa
aaaagtgctagttcaatcttaggattttatattgcctcagaatgtaacatggtactttacatttgaataagattgtggttgttgtgttggaaagaaatatgttattttaaatttcttataaagtaacttgttaaatgattttcattttttatttttgcttcaagaagtgacctggtacttgtaattttcttggagaataaattttattaaagcattaattcattatggaggagagtggaatcaaagtaactgctactcaatttacaaagtgtctggtgtacatattccaaaaaattgttcattatttgatctgggaaatttgatcaaaaatgaaataaacactaattgggacaatgttgagatctcataccaaggtactacttgttgtacctttggacttgccaaaaaatttattcaaccttcctgaatatgaagttattatattctgcaaatggtcaagaaaaaacagattagaattcttcaagacaagaaggttctaacatcaagccatttcataaaggaaaagaaaaaaccaattcaaacatacagcaaaaagaactaaaggacaagtttttttcacctagcaaagtagaagagaatattgcaaattcaactattcaagggataaagacaaaacattaatcaactgtagaacaaatcgaggaaccaaaagaatgaacttcttaacaggggaacaaaacaaaaagatgggattaaaagtaggaatctacaagagaacctgcaaaagaatggtgagaagtcgttatatgtaataaattggagttagggcgaatccgaaaaatgtttgctaaatcaactcattaaaaaggaaaaaaataagtaaataaaatgattaaatggcaatgaaagcaaccctttaatccctctcaaaaggagtgaataaaacaagtaaagatataaaacgtttgaaccccgtaacacaccaagctataaatgagagaaaagaaacccaccccagcacaaagagagaggatattggataagcagcttcacagcctcattgagcagctggcttcgaaacaggcacaagcagaaggcttggtaagtgaaattcatataaaagggatggaactagaaaatttgaatggtgtgtggaggcagcttgaaactagcagtgtagaagtgaatgcaacaagaaatcggtttgtacgaagtgcatcagagaaggggtctgcttcttctgattacattgttgaacctaattaattacaagaacccttattctcctggtggccgaaatgaaagtcagcaaaggcttatgttgctcagatcaggttttgtgctttacattttagttttgcacatcttagtcttcatcaaaatttcattttggtaatatgatatatgtatttttatataaaaaatatatatggagatgctgagactgattcactacgttattttattcttggttttatgcctctaatatagaatggagtatactaggaaaaaaaggagattatcttaagaactcttgcgtgtatgaattatagttgtgtatatacaatgtaatgttttatctatactgtcaagatcatgttgtagtaaattcgtcattaatgagagaaaagaaacaaaacagaatgctttggtactcggttcagtttgtgaaaacgacgacagacaacatctaagaaaaagctatggttatcactcaccatgatccacatcaatgctatacaggtgtgaaattaatgatttcagagaaggaaaaaatcataagacatggaaaaagttttagagaaattattagagcatgtaaaaaagtatgacaccataaaaaagttaccaaaaaaaatcaatgttcattgttcattgttcatttacttgcatcacaaattagagcctgagaattggcacaaacatccaaacattctaatttttcaagaaatatgataattaaaataagcccaccttgatggaaagaacta

SEQ ID NO: 35392 - DNA, 1090 bp, Cannabis sativa
  modified_base (295)..(297): a, c, t, g, unknown or other
aaattttcgcagaacctacttcacgaagggacacaagttagaaactttccattatcaccgcaacacaattaatatcaaaacatgttttactatggatgaatatttaggatattataactcctctatcattggtataatattaattaacagaaaaaaaaaattaatatgcacacgtacctcttctaatttaaaatgatcacgttaactttgtaatgatccttgctagtaaccaaaacactaataataacattgaaaaaaactattaagataggtaatagaaatgacaatcatcatnnncaagctaataataataataaaaaataaagtatagtttgctttgcttattattatctttcttatgtttgagatttgaaaatgccactagaaaattattattctccaataaagtaatgatctaagagagtagacagcatagtattaaaaaaaagtttcatgtaaactttgactatcaaaaaaagtcaaaactttattagcttttctattattgtattaaaactaaaattataatttatactatttgttttttaacatatttttatcatgctaaaaactattttaattttcatatttagattaaagctctagatacaaaatagagtatacccaaattttaattaattttttgctcttccaatttttttgaacttttttactgaggctctcaatgaaagcaccaaacttttaacacagattttcgttaacaaaatttgagcctcacggtaataattccacgcagtaaaaataaaagctgtaaaaaatgaagatatgaacacaggattttttacgtggttttgcagttaaatttctgcatagtcaacgagtcaatattatttagatttctgattgtttttaagggcctctcttgtatgagttttttcgtcaattttttgattacatatcacgtagtgtaaatgcggtttatgattggaaaatcatataactgtgattttctcacttttaccgagtcaaaacaatcgtgtattaagcacgttgttgtcgagcaaaattcgcaacaccaaaaatatatgataatactaataataagaagaaaattgtatgaagaacaaat

SEQ ID NO: 35393 - DNA, 3622 bp, Cannabis sativa
acgagatttagtaatggaatgagagacaaatttctacttagaggaggaccaatagatgagattcatactgagaaaaatacaatatgcgatgctacttcgacgatcatcaggacaagatgcccaatagacatcggtgaagcaatgaatatgtaaagaagggtttgggtgaataagaagaccaacttgagcagagcctttgaggtaacaaagaacttgtttggctacttgatgatgtttggaagcatgcataaactgacaaagtttgttaacaataaaggtaatgttagggcgagtaaacgtgcagtattgcaaagcaccaactaaaccttgatattcagttgcatggactaaggaagtgtcatcatgaagtgacaaaagagtgagtgcaagtggaatggtgactagtttagagtccaacaaccctatttttgtaagtaagtcatggacatacttggtctgagacatgtgtaaatcggcaactgaacgagaaacttgaacaaggaaaaactaaagagcttcaaggtccttaacaacaaacttggtatttagatattggagaagagtggcaatagtagtggaacaagactctgtaactatgatatcatcgacatatactaggagaattaacatggcagtgggagacttgtagacaaacatagagcaatctgctttagaagcttaaaaaaccccactcgagaatagtggtactgagcttgtggaaccaggtgcgaggtgaacttggaaagcttgcacacatgagaaggaaacttgagattaacaaacccttgtggctgagacatttacacggtttcggtcgagtcaccatgtaagaaaacattttgattgtctaattgtttgataggccagttataagaaattataagagagagaatcacccgaattgttgtaagcttaatgacgggactaaaagtttcatgaaaatcatctcggggtttgatgaaaacccttggcaaacagatgggccttgaatcgatcaatcgaaccatcgacattgagtttgatgcaataaatccatttgcaaccaataactttgcaatctgaagggagaggaacaagtatccatgtcttttaagattcaagggcagtaaacttttgttgcatagcacagaatcaagcctgaaactgagcagcctctttgaacaaagatggtataactaagacatctgaattcacactataaacaaaagagccttgtaaatgcctaatttagcatgagtaaccataagatgtaaattaacaggggtagctagtgacatgttcatgttggtcgtgaaattctactgctaagggtgtggtaggggtgattttggtgtataaatggaggtagaaggaggttgtatttcaggtagggaagaagaagactaggtcataaatagagtaggaagattagaggtgatatgagctgtttgagacattggaagagtataagtaggagaagatgatgtaggtgatggaggagacaaagagggagtaggagacaaatgtaaaacaaatggaagataagtaactactgtgtgaggtttatggaaaggaggtgaagggagacttgaggaagtaaaggggaagtaatattcattgaaaataacatggcaagtgatatagactctaccagtggaaggaagtaaacaaagataacccttatgttgacttttttaagccataaaaacacaagagaacacaagaggaagagtaaaatttgagtttgtgagaattgtaaggacataagaaagaaaatcattcacaactaaaaacataaaaatgagaataagatgatagattgttgtaaagggcttaataagtattacggttgtgcaaaacttgagtgggaaggcgatcttggtttcttatggtccatgttagagttagaaaaacgcaagtcaatttgataaaaatgttttatccaatatgaactataagtccaaagatctcagcataatatatatatgttaaatctaaactaataaaagacaatacctcttgtagcctattaagggatcctccctatcttttagtataattgcgatcacccaatttaagaactttgctgaagaattcacaccgtaatctttcaacccatcctcaacactcaggaatagagtgaactattagattctataggatgaacaaatttatgtattgcagtgtattatcaactcatgagatactgtaattgagataggattgatcccaatctcacaccatactatacagtgtggcgtgtgagattgaggaaagagagagtggtgtgtagaagagaaagaataggagtgaaaaatatttcttcaaacttattacgttattttctggctatctcaggttattctaagttattagtttataataatatatatcatatataaatgttataaataaacttttttaattaatcatttaaaataaaaaacatctaatttgatttaaatttataactaacagaaatcagttaaatctttttattttaattattatctttttaattaaataaattattcataataatttttaattcaataattgaaaaataattaattattttaatttaaattattttaactaataagataatcaaacaaaattaacttagcatctttatatatcaccttacacgacatgtgggccatattttaaagtccaaaattaatttcttaattttaccataaataaaatttattatttattctatcaataaacaataattgattaattcttattatctcttattttacaaggattgatttaaatattattttctctaaaataatatatttctctttttaatattatttaagaataatattagatttaactaattaatatagttttatctaataaaactaaatagttaaaaatactattaattatacaactcataattgttataattattcaaaataataattttataaattactattttgtcctaaaaaatttacttctcataaaaattaatacacactaaatcacatacactagaagtacagtgtatagtaaatcatacttaatagttctatatcaaagatttttattactttaatatactaccgacttgttttatttttatcgtataatcttaattctcttatatatctatacaagattataccttctcgatatgaataccttctcgatatgaatacgaaatttttagatatttattatttatactattataattaatgtatcatttatcttataattgtatttatatattctctgatgcattctctattaattactaaaggcatagatgagtgagctaaaagagtgaggccagcgacaacatagaaatttttatgttcaacaggaccatctttttgaggtgtgcgagcacaagaaagcttatggagtatgctatgttgttgaaaaaatgtggagagggagcaaaactcaccgccccaatcagatctaacatgttttatggagccattaaattgggtgaaaatcatatttctaaatttgataaaagccaaaaaggcttcatccttagtattaagtgaatatatccgagagaaacaagtgaaataatgaataaacaaaataaaataacaaacaccagtagcatgaacggggaagcatgtaacgtccccgcttcaagcctcca

SEQ ID NO: 35394 - DNA, 1282 bp, Cannabis sativa
ttatagaacgttcatccattagggatgagccatgagttgcaacactataagggcttgcatcttcagttggctgatcaatacactaagtcggggaccactcacaaatccaaccaacacattattgtttacttaatgaaattatgtggcaaaaatcaatccatgggccatacttaactcaaataaaaaattattttgaaacagacatgtcacacgtagactacaaaatgatgcccaagtcgtcccgagaccaaactctccagttcacaccatctcgacatgtacaatcattccctgagctttgaactcactgttgttcaactttagccattcctttacctacacacaaaaataatatctgtgaatcaacaaactctgtaagaaaaacatataacatacaatatataatacagacttgtatctaggcacccatacacctatccataaggcaacttttaggtttgagtctaagtcccaaaaagagatttagtaagtcacttaccaatttatgtaaattgtgacttagggccttaaatcattcagcaacagtttctactcaggttgactaaaacacttgaattcagtatcaaggtaagattagtatagagatatacatgcatacatatttagcatacatgttagtttgttggctagagtacttaatttatttgccagagtaccaagtatattggccagagtaccgagaacattggctagagtaccaaagatatcaattaagtatcgagaatatcagctatggtactgagaaaggattgtgttcgggtgtatgggcacttggttacggttagggtacatgtttatgcttaaaattttcttactgagtctgtcaactcacaaatattgtctaaatgtgtaacgacctaaaaattaggcacattacagtgactttccaattacaatgcaaacaaatattttttgctaatcaaaggattttctcggaaataaatcgtgataaataaattaattaaattttttatttaactttaaacctttaaaaacatatacatatattcacataaaactgagatcccatttttaaactttacattcaaaacaacgtggattcataaatggttaaaacttgagaaaaggtcttagttggaaaagttaaggaattctcagtgtcagacaatgggatgttactttataaaatcgagtttacattactggtaatgttaagcttagaaatgagatccttgatgaagtacataacacttcctattcattacctcttggtaccaccaagatgcatcaagatttgaaa

SEQ ID NO: 35395 - DNA, 4618 bp, Cannabis sativa
atttgtattctttgtagatagatgggtaggtatgtaaaaaaatttaaacaaaattttaattagagaataatgaaaattatgtgaaaaaatttaaacaaaattttaattagagaattgaaaattatcgtgaagtaatagaagtaaaattggttataaaaaatgaaaaaaataggtaaagataatataatttaaaaaagagggtaaaaattaaagacataagttagaggaggtttaaatagaaacatcaatttgttaaaaaaaatagaaacatcaattaaaagcgagtgagaggagggctcagtgacactgccctcgcacaaaacaatataacataacaatttcgtgcttatgatctaccatgttttagtgtgtatctgatttgttgtgatgagaaagcatatttaagctgcagtttttgaattttcagactcttgctgttgtttccattgctctggcgtgagagctttcttaattgaaagggcatgaatgtccttcatctcttctgccaaagcaccattgacaagtctatgtctttccagtaacctcttcccttcaaattgttctgagacaatttcaacagcaaagcttgcaccgcatctgattaacatattcattcaataaaagttaccacggaagaaaaaggataattctttaacaatattagaagagaaatggataactttactagaaatctaaacataagcatatatctttgtgaataagagcataccctcccgatgtatcgattacttcctgaaaacaacaaaaatacagagaagagaataaatttcaaatgaaaaaaggttacaattgaataaaggcacagggatttacataggagaagtaatcacccatatgaaaagaaagcatcaagaataaaaattattctttaagatgatagatctctaccgaaaaaaggaaggaacaaaaaccatactcaaaagaaaaagggaaacttttctatcatggactcattcttagcaacaagtattgatgctacattcttatttctatcatcaacttattgctagtaacaagagagccatcaccaataagccaacatgttattcaaattttaatcaagaagttataatgacattcgcttcctatttgtaatttataaatgtcttttagttgaagaacagtgttgtgatacccatttataataccaaatttaggcagccaagtgataagttgatttgtcatatcttaattgggtctcaattgaatgttatagctattgctgcataacttagtaatcaaaaaataagttactagccccaagaggggtagctcaaatggtcaggcaaggcatgtaatttgctcccacaagatctgacatttgagtcccacctggtacctatatagaaatagcaatttctatagttttctagtccccaaatattataaggggttagacacacttggtacctacatagtaatttttatagttttcttgtcccaaaatattataagcttagactgagatcctagtttcaaagaaaaaaaataagtcaataggtttggactaatggtgaggggaattgggaattgagatgagatcaaggtttgaaccttatctcttggtgttgagactcttagtctcaattaagcaccaagtgtgccaatgatcacttggtaattcaaaaaaataacaaatcacctattacctcaaaccaaagttgagaagctttatgcaatgatagtatgtttagatagatttctaaataacactaccttgggagtgtgagtgcttagcgaacaactattcgatagctacaaaacaatataagagacaagactcaatctgaaagtgatacaattctggcaactaatcaatggacgagccatggacaaatcaatatgtaatcttgcttaattcatttcaaaactcataccttactgtctctctatcctataaggtgatgctaatgccagtaagctctcttgcctattctcgttttagttagtgaagatgtgtcatatctatttacacaattggcaatcaatatattcagtcattcacatttttcatcattcctgtgaagtcattcttcttataaaatcaattattaaatattttaacaaacacataaataatttgtcaattaaaatttgaaggagacaaaaaactgaatagatctattacctaacctctttacatattaattttaataataactagtttttacatgattacatctctatttgcttgtttcaagaaggcggaaagtaaaacacatgtcttagtcttcttacttaaagaaaagggggcaagtgaagtgagtttaacactcctttcaatattttccaaatcttctacttctaagagtacaaccttcacattattgctactataaatagttgatcaaaaaaaaaaagaaaaaatattgatcgataaaatatgtaagacttgaatattcttttggcaacttcgtttatgccttgcaattttacttagaacaaattcagccataatctttacgggcatcagaaaattaatgcttttcttcataaattttaccatatgcaattgggtaagtggtagggtggtaggagaaaagtaaaatgagtcaaccacgcataaaagtacaacggtactcataaatgaatacacaattaaagtcctaaacgaggacataaaaaccctaactaagatattacatacctaaacattcaaatttttcaataattgagcagaatccaatccaaatttatagaaatgtcgaattcaaaacttaggacgagaacaaaacagtatcgagatgagactaaagatgaaaacggtagttctgataagcagaaaataaatttaaagttaagaagcttacaagatgtatagggctcaatttggaggtcaaagtagagtgaacttgttcctttgtaacacccatttctcagcaaatgaattcctgttcctgagctgagagagtctttcaaaattcgatgtatttttattttattttgtttatatttttgttgtattctttttatagaaagaaaataaaaataattaaaaaaaaaaaagattcgacttctgtggaccaagcccattatcatcgacaataacacaaaactagggaattttatttcacaaataaacgcaaaaatatatatatatatatatttctatataaaatgtagctagctgaaagaatttttggtttaacgattttttttaacgtttttgtttctttttaataataactaacagagttaacggagtgtgatagcaattcttattttctctctcaaacccaaaccttatactgtgattgacttatattcaaattctacgagaaaatagtttatcgtcattcttcaacctcaaacacaaacccatattgccattgaactgtatttgaattatcgactcgagtttgagcgagctcaggttgtataatcctcttaggtttgtaatctacgagcaatttcacatcttaatttttttgaaactgtatcttcttgtctctcaagtcgtaagtgtgttgttattgttttggattttggtttagattttcaattggaaatgagagaataatggcggtgaagagtaggaggaggaaatgatcgagtgcggtgtgttatgttacgccattctctattcagaatcttcaatggatctccacaatttcttctgtgtaactttctctccgtctctttttgtatatgtgtatgtataatgccacgtttcagctcgatatctttgttgtatttgaattatcgacttgagtttgagcaagctcaggttgtataatcctcttaggtttgtaatctacgagcaatttcatatctattttttttttttttgaaactgtatcttcttgtctctcaattcgtaactgtgttgttattgttttggattttagttcagattttccattagaaacaagagaataatggcggtgaagaataggaggaggaggggatttggtgcggtgtgttatgttgcgacactctctgttgggaatctttaatggatctccacaattttttttgtgtaattttctgtagttagtgggatttgaacctttaccctctaacctgtttaccaactaccttaaccattacaccaaggttactattatgtatataaatatcatcttttaatacaaatatatgttttaactaattaaaatacatatacatttttttctcgattttttttttcaggggtcgctacaatgtgggtccgcccgtatatgtatatacaatgccatgtttcagctcgatttttttttgtggttttagattttttgtttttgttttcgatgattaagtggtgattgttttgttttccattcaattgtctcaaacttactaaaattaatatttctatatttgggtgggaatcattatatatttaagaatcaggatctttgggctcaagaaaaattggtcattcatttgaaaggttttttatttgttaattagtgattggatacctaggttaatgacattttgatgatttattgcccgtaaattatcgtcatctttgtaaatttatacatttgcttgatttcatttattgatcgttgagtgagtattcattggtctgatgttattgtttcaggttgagaactgaataagaaaacgtgggcaaaagcgtacagaaaca

SEQ ID NO: 35396 - DNA, 3349 bp, Cannabis sativa
gccctggatgcagtgcagtttgagcagtttataatattatcattatcaaacattataactaaaattttaaaatcaatccaataaagttttaacaatataaaaaaaaaaaatcttattaacgttttaatatcataatatatatactaatcatcaatttattatattaaattgtctctaaaaaataatgtaatatacacatatagtacatatatttttctttatataaaaaaataaaataaaaatcatattgtaaaaattggtaactttgtaatatatagtgctatgtgtttgaaccataattattagattcaaaaccgcaaatcgtactgcactgagcagtttgacaaaaatacaaaccataatcgcactgcaaaagatttcaaaccgtaatttttatgcagtgtggtgcggtgtgggcggtttgatgaacactctttatttttctttctttttttttttcaatttttcttttcctttttttgtttgaaaatttcatccctgattgaaaggaagttagaaaaggttgctaaattttggactacattccacctagatttagttatttccttttcaaaaatcattttgcctctctttttctcctctttatttgatcattgttaccttataaatagttgtccgacctatcaatgggtgtgactcgttcttgctcttcttccccaatcgtaaaaaaatctcgtaaagctcctcaaaaaacttttaagaggtcgacaatggataagaaaggtattgctaagaagaaaaattataatgatgatccccttagccctacatcccctatttctttcaaaagaaagttagtaagtgattctatggaaatgaggaaatccaaatgttctaaagctatcattgaagtttcagactctgattttgagcaagaagatgaacattttgagttaaagaaggttataaaggtatttatctctactttttttgcgggtgggtgggtaatggaacttttttaatcatcatgatgttgcttatgtattttgttgtgtgtgttttcaatctagtttttgcatttgtgaaatatgttgttttatttttgttttagggtttttgttcgtagattgtccctaacagtttttaatttttgattttgttaatcactctcgaatttttaataattttattattttgttatttagtacttattatttggtgtttggtattatatacttgattttttatgctttctacagttgttttgttgttgatataagtttgtttttaaaattttttagggtaaggggaaattttctaagtcgaaggttccctccgacaatgatattgaagtgtctattgacatattgaagttcccaatatcttgaatgaaaacaccagataaattagctactatagtatcatttggttcattttccatctcactttatggagaaataacagtagtaacatttgatgttgttactgttggtgaatttattgtcgagaaggatgattgtccaagagatgatggagtgaaattcggaagagaaacaatccctgtatccattgtcgactgttgaacttcttgctgttggttagaagattcaccatgtaataggggcctaggatgagaaaaaggccttgactgtagttgcggaatggtagcagatagcgaagttcttaccaagcgagtcaggagaggccacacatttcctttggacaagtctgttctatcgcaatcataactagaagttggtagagcagatcttttgagactaggtccataagccaattaagattcaataccattatccatattttcaagatgcacttgacatttgttaaagacatgcccaattttaccatattccatacaataatctagtagacattcataacaaaattcatccttgatttttggaaaagtaatcatgccgacacaaagcaaaggcttccttatgtccattcgaacacgaaaaatgaagaaatggaccccaaccctcaaaaaaagagtcttcaaacacttctataaactccctaataatatttcctaaagccttagccagtgtttacgaaaaatgaagaaatggaccccaaccctcaaaaaaagagccttcaaacacttctataaactccccaataatatttcctgaagccttagccagtgaacgagacttactaaagaatgggagtctatagggttgaacccaaaaaggagaaaaaaccattgtgtccggtgtgatattctgcagaacagtttggagggtgaagaacaatgtgatgattttggaagtgtcaagattctttctccagagctcttatttttatcaccaatgcatccaaaggttatcaagaacaactcagaatgatgcttagaaatgatggccttgaaacgacgatcccaatattaagtcatttgtctttgtaaagttgatagcaaaactttccgtggagatagaatacaaacaaccaagacaagttcgagccgctcattcgagttaggggcaccaccatcaacgatggcaaccacgaagcgctctgtttttgttaaagatacagcgaattttatccaatcaagtagaggatccatagaaataagaaatgaagttgaagaaacaaagggaaaatagaaaaaaactgtcacaaagcacaaaaaagagcagtccaaaagattatgaaaattcaccaaaagtgaccaaaagcaacataccatattatatgttgccaattctcatttagctaacaagtgtgtaaatattatttatttgcatgcatgtaacacgtgcttacaaatttataaaacttatcaacaaatatgtaataatttcttacaaatttgtaactgttgtttacaaaaataaaattattaatattcaaaacaaaatttatgggtgcgtttggcagggccggcctaggcataggtgggctaggactgcgcctagggcttatttatttttggggcctaaataaaaaaaaaatactttttaaaaatatacatattttaataatttttaaaaataccatttatctttatagtaggggcctaatttttttttgccaataacccatttcaacttagggtcagccctcgcgtttggtaatatttttttaattaaaaaactgaaaatatttttcaaaaacatgttctataaaattattttcagttttaattttttaattgagaatcaatatttaaaaattttgaaaacaaaaaaaaaatcactttcacaaattttttaaacagttttttttttctcaattaatattttggacttcgacccaaacttggaccttaggacccggactctgaccccagccccagtcccaggctcgaaccacaaccacgaccccgactcagacccgaacctagacccgacttaaataa

SEQ ID NO: 35397 - DNA, 4145 bp, Cannabis sativa
cctttggagatgaaataagtgttttcttttttctactaattgtggccattgcaaattgcaaagccagtaagtgttgaaatttttaacttcacaatacttgtgttgatacaggattattgcatacaaaataatcagagaatgaactctttttcattggatacacaattgaaaccaagtatgcctctggtttatgactgggagggaggcattgatgaaaaaaaaaaatttatggtatcacacacacatacacacatgtattagtagttaaataacttttgtgaatagatttactttatttttttccactttaaagactagatgacatttttttcttgcttggcaaaccccatgtatacttgtttcatttttctgaaagaaaatagtaaagtatcattattctatggtgatcatgtattagaataataactatgactatgagctaggagcttgtgtcctttgataccacattacattattctaatctcctaaaagccagctttttgagggagtcagccactaatttcactaacagatacaaattttacttctttgatacacttggaagaataactttgacaaattgctgagtctagtcttgtaacatttctagaagaaaatccttttagtattatacaagtaatttatccttaagactcaactagagagaagcaaaagcttttcaaaatggataaatgtattgactcctatgtttctctcgttttaacatgaattgccttaccaagcttgagaatctgagttacctattacagttttcagacatataaagtaaataaagaaatagctccaaatggactgaattcatttgggaccactcataatattagtaggacacacttcacgtgctcatcagaagggtctgtcctagaaatagtctagtgcactactacaaacatatggtgtaacaatatgcacagaacatgtcatttaactctatttttcatttgccttaactttctttgtgatgacattttcaatgctttgctggcttttatgtttttgagttttcatgttcttcttttatatagagttgtgttcaatacttgtccaaattcatcaaagagtgtgattatgttagttactcaataattgtatcagtagtagtagtagtagtagtagtagtagtagtagtaaattcaaataatcaatacatcattaaatatctaattatttcagccacttaaaatgaaccagagacttctattataaacttacttttataatgcgtttggatccatgtagattttgaagacatggacaacacatacaaagcctcaattaataccaagttattaccaaaacttgtaagacaataccatgtgatgcatacaagtttatgcttcttctattcattttaagccaccaaatttcctctgtattacccacttgttccatattttggtgtatttcacttctcacccccctttacattctctttctataaatacacaaacatacaatcatccaaaccaaaaaaaacctcacttttctcttctttctcttaaatcactagtgaactttcaaccacttcctcactctacatatactcaaatggctattaaattaggttccattatgcaaaccaagaaaaacaacaacaaatcaactaatatcccaaaagggtatatggcagtgtatgttggagaagagcaaaagaagaggtttttggtacctgtatcatttctaaaagagcctgcatttcaagagttgttggctatggcagaagaggagtttggatacaaccacccaatgggtggtctcaccattccttgcccagaaaagatcttcatcaacctcacttctcagctaaattggtcttagtttccatgtcagcaccattgaaaagtcaaacccagctgagaaagaagtacatgcaaacagcttctgaaaaaacctttaagaacaagatgaccatgcacactcatttttttggttctctgaggcccctaacggctatatcaatatatctctatctcaggatgaaaagttttcttcaactttgttgatgtttcatttttttttttaactatctttctgaggatatgaaagagaagaagcccttttgatgtttttttctctcttgaagtgtagatgagatttgtaatggcaatggctgccattgcagtgcctatgaagcttgaaagcttgtggttatttttttatttgccaaagttttgtaactcttcaataaaataattgaagtccaagctttttttaacaatgtaaaatctaagtacgtttcaatagtaatgctttgcatttcatgcgaaagtaacaatcttgagttgtctattttggtttgtttttttttttttttggcaccaaaacaaaatttagagcgtattgttttctatttttttttttcaaaaaaataattttaaaaaatgagaacaaaaaataatttttaaaatttttaattacaaatcacgtttggttattgtctcttaaaaataatattgaccaaaagtgaattattttttaatacaaacaatatttgattgttttcaaaatatttgtttttttgtaactttattttctgaaaactgttttcaaaaaacaaggccaaacaaatttatttgttttcaaaaacaaaaaacaattttttaattatgatgccaagcatacacttaaattttaacataaaagaaaaatagtttagtttagtgtcaaaatgaaaaaagccattggaacattttttttttttgttaagtgaactatattttaacttaatattacttatttggagatgctcttactggttgactaaaaactttcaagtgtcactaaaaaaattcttttttaataaatattttatggtataaatatcgaagtttaacttctaattacaaataaatacttaagtttaaaatctaacgataataatataattttaaaaattttgtaagtacttagttcttgagtattaagtaaattgctacgtagcaattcttgattgatccagatcattaaatttttattttttaaaaaacaaaaatagtttaaacataccaataagaaaataacacgtgaattatgacttcacatttaatgctcagatacctacggagtttcataaatataacttaaatatcattactgttaaaaattaaacttaattattttttacaaccgaaaattaaacttaactatttataccgcaaattattatcgttttaatttaaatgttgtcataatagttgttaccctctaaattaagaacattagagaacaatgtagcatatcttgtaaaggaaatggcatataaacttcatttgctactatttttttaaaaccaaagatttagctgtaaaacatttctgaaaagaaagtaggcatcctggtcagatcacagttggtccatatgaccctatatattagatacaaataaagtctgtcccctgcttagaaattagaatggccagccacataatattattgttgaccatttatctaacagaagagaaaaaccattgtcaatttttacaaaattaggtagtatttggcattaatatattataagcttcaataaatcacaaactacattggggtgagtttcatcagaatagacagtcccatatgatgttttaggtgctgatgtttccctccacataatgacataaataatatcactgtacaaaataataataataataataataataatgtatgtgcacagaaactacaccaaatcaatatatacatttatggcaagttttttaactagtttaaagtaacttgacaggaattgtaatgataatcaaaatgctcattaccttgtttgctttaactttttaagttatgtaatctattatggttaagaaaaaaaaaaaaacaatgcaatgatcattataattacaccccattacaaaactaatataatattatcctaaaaatataacaaaagaaactcacaagtccattctatctttcatttaaatattttataattttataattataaaaataaaagtaatagagatattttgatcaatatacattgtattccgttacattaccacaccaaactaaacacaataattttgaccacaatactcattccaacaccaaaccaaatattataatcaattctaattacgattcttatttccattaccattattattacc

SEQ ID NO: 35398 - DNA, 1278 bp, Cannabis sativa
tgatacaagtggttttgtcactttaataaataccacaaatgttgagggcagctcaaaaaacgttcaaaaggtgggtgctggtgtccaggcccaccaatcatcatgaatacactaagttggaattgtcgtgggcttgggaacccacgggcccaacaattcctggtagacatttgttgtcaaagaaacccaaatttgtatttttgtgtgaaactctttgctctaaagaagtggtggaccgaatgaaaaataaattaggctttgaatcttgttttactgttgaagcaattggaagctctggtgggctggcatttttttggaaaattgctgaggaagcctgtcttcttggatattctcagaatcacgttgattttgaaatcacggttactggtacgacttcttggcgcctcaccggattctatggtgaacccaaccgttccttacgacgtcagacttggactctcctacgcactcttttctccgaatcgcaacttccatggtgtgtcatcagtgactttaataacattggtaatcaagctgaaaaacgaggaggacgtgcttatcccactgctcttattgctggattccaatctgttctgagcgactgttctttacatgatatggagctccgtggatatccctacaccttggaacgaggccatgcgtctggaaacttggtcgagataaggcttgacaaagccttagtttctcaacgatggcttgataactttcatcaggtaactctgtctaaccaccctatctcctcttcggatcacactcttatattgttggaatttcatgacagcccccatagagataatgtttatcatttttgttttgaaaactcctggtgccgtgaacctatgtgtgctcagattgtgaaatcttgttgggaaaataatagtcacctttctctgcttgataagattaaagtgtgtagttctcaattggatagctgggggaaaagtcttactggtaactttaagaatcagattgctaaaagtaagaaaaagatgactgctatgaaacatttaggctttgacaactgctatcaagattatataactgagaaaaataattattttgagattcttgctcagcaaaaatctattggaagtagagatccaagcagttttggttaaatgcatgagacaagaacagcaaatattttcatgccactgccagctctcgtaaacgaaacaatcaaatttttcagttgcaaaagctgaatggggattggtcaggttgggataccgatctaaatgaggtgatttctgatta

SEQ ID NO: 35399 - DNA, 1615 bp, Cannabis sativa
tatttgtataattttttttttatttggattgtatatttgtttatttggccagctagaagtatttttataatattgttacattttttttggttaaaattgaagaaatccctttaattaaagggtttttaaactactataaatagaagcctaatttgagaaatcagaatactccttttgacatatatattttcaaaatatagagagaaaaagaaagaaagaatttttctctcaattattcttgctcatatattgagaactcaacaagaacaaacctatacactttgtcctaatagcccacactatttcttgtgtgtaggggatcgatttgaaagatattgatctgagtttaattgcatcatcctcatcaactagattaagggatccaacatacgagaagttttgaggataccctgatagtattcaagaggtatatgtttctaaactagtattttatattttgatttaatgtacacacatatggatatctattgggaaattgtacaattataatcaaataataagaaacttttccattgcgtatctgatttagtaccataaaaccaacaatacgttgtacggagacttcacgtccaccactatgaatgtggctatgatggtcgtcggccttgggatagtgtcgactatggtagtttagtcataccacatggagctatacccgctccgctaaagccatgcattagttgtttgcatggctctaagtctttgagtgacaaacccatccgtattaggatttgcttaaataagatgttcaaggatgatccatcattgatcatcacccttgccaccatcatgttagttatttgttactcaacaactaaggtatcattatgagggtagctgacatgatatcagtcaaagtctctgaatgtgattggatcatactcgtagcgttgagatttcggaggacattttacaacctccaatacttctgctcttggctcatattgtaaagaccttgcgtatctttgtaaggcctttctcgagttcccagctaggtgggggcctccaatcacaatcttgagcttgcctactataggtgcaagctggagaggtgcattgccctcgactagagatttaggtcgtacatatcgctaaggagcagcatgcttttgtctgtttagaaactttatctcatcttgtaatcgattacactcacttgtatcatgatcgtagttgttgtgatatcaatagaatttattcatgtctcttttccctgactctttgaagggatgaggtttgcggtatgacaccattgactgggtggctgtatagatctcttctcttgggactaggagaatagagtaggttgtgaaatgaggttcatactcctgaaggggcttgcttccagttttggctttctttatgccaagggagctaccttgttttcctacgttgttagctctctttcctccatttaaacctcctcccccccattgccctgcatcccagtgttagggttggagagtttggcaatttcttctttttattttttgagccctttgctcaagtgacagcttcttcgagcttgataaagtcatttggtctatcaagaaagtcattcatagtgtgaactaacttgagacaaaggttgaac

SEQ ID NO: 35400 - DNA, 2129 bp, Cannabis sativa
atatatataatataataccgtttggacgaagtagaagaagtcatattgtacaagttcaggaggaggaggaggaggatcagcatcatcaaaagaagcaataatgattgttggtgatgatgatagatgccccagttgtagaagcttcaccaaaataatcaaaatcaaactaatactactcttcatgatgcttatcttgatttttatatatatagtagttttgtgagatcataagtactatatatgtatatgattttgtgcttgagttttagttctatttatagccagaaaaataaatgatcattgtgaaattgtaattagaggtttcacactaagttgttattgatgtaatttaattactataaaaatttttaggataatgcttcaataatagaggtattgaaaatgattttatatagagtcatttgttttttaataggtgtcattgttttattttatgtccatatttaattttaattttttgtttattttttttataattatttgacaaaaatattcatatccacagaaaaaaaaaaattattttttggtggatatggtatgtaacatttttttttttgtatttttttttactttgccattagagaatttttgagtcttaacttctatttctcttttaaaaggaaaaaatatcaaacttcttagttttgattataatttagttctttgataagtaatttttaagaactttttttaaaagaagagggaggagaagaagagcgaagtgaatgatagttttttttaaagagaatgatagtgtttttaacaaataattataaatgtaacaaaaaaataaggaaataatatttaatggacataaaacaaaataattacacatattgaaaaaaaaaatattaaatctacataaagtcgtttttaatacccctactaaagcattatccaaaactttattatatggtgtaaattgataattgaattataattaaaggagatttacatcaggagacgtttgtattcatttaatttcaatattaacgcggctcttaattttatgccgttttaatttaaattagtcttctttttggttcatgtgttgtaggagacgtcagccatcacatcaatcatgtcccccacatctataatctcttatgcttgcttacatttctttatataatttaaattatggctctttattttatagacatttcaatatactacataggattataatatgagagtgagagtttatttttaaatttattcataagtttagagtgaatttttttagagagatttcaaatttgctcaaaaaaaattttaaaacaatgaattttatttaatcgaatgttattttgatactttatactttagggattttttttattattctgtttgttgaatgtgattttgattctgtatggttaatatttttctttctttatttttctaggattttatgatgtttgttagaatgtgttttcgatattgtataccttaattttttttttttatatgattttatagtgtatactatattattttttttatatatgatttaatttattgatcatatatttagtgattaaaataaacttgaaggttaacacaatgtatcttaaacataaattatatgagtaacacttaataaaataaactacatgaataactaaaaaagatatattaatatgtaatatgcttaatagtaacctctctaaatttttatattttaattattaattttttgaaaaaaaattgtgcttaaataatttattttatataatttacattttaaatttattttatataattggtatcttatcgagatcataattaattggtccaaaaaatgtgtcttattagtaatgatttaaaagttaatgtaatttcattctttatttaaataattaaaatgcatgtattaatttatatttaaaaaaatatgggtgacttaaacatttatgatatatttttttaaaaaatacagtttactaaaacgatagcttactagatgacaactcatttatgatatatttttataaaaaatacagttcacctgtcacgtgtctagaacacccactatcaaagtaccacatgttagtagcaatagttttaaagcaagaagaacctaccaagcatttatttttgacaac

SEQ ID NO: 35401 - DNA, 1796 bp, Cannabis sativa
caaactaagtatattatgtaaatttccaataatttattaattttttggcccattaattttgtcttgtattatacatttagctggtatttagtgagaaaaaatgaaaataggaatggataatgaaaataagaataaaatttaaaaggattaatactattttggaccctaaatgtcgcaacagttatcaactgaactctctattttgttaaataaaaaatttgatatgatattttccaaaatggtataaatagtaccctattttcgatattctttttaatataaccaactcgaaaatatttcctagcaagagtagaagtagaaagcataaccaaatttgtcataacacttctagatcgagttgttattaagttttattttgattaaaaaaaatcagtttaagggtactatttagtattattttataaaatacaagatccaattcgttatttaacaaaatagaaggttcaattggtaatttttaaaaacacaacatccaaaatagtatttacccaatttaaattattaaattattaaattttttcttattttgtattggaataatctttccttctaatttaaaatgtaataattattctactaaaatagtgaaatggtcattgacattccattttgttaagaacattgctatgaagcactagatgaagtatcaccttataattagttagtaataaagtgagacctaatattaaactataccagtaataaaattacacctcacaaaaatagtgtcgggtacccttttaacatttctctttggttaaatatgcccatcatattagagcatgtgatagttgttggttatacaatttaaaagcttatcattaaatagaactttgactatttataacaaatcaaaacttgaaaaataaaagctaaatcaaaactcatatcatatttatctctttccaaagaaaagaaagaaaaactaatggagactacaaaagattcatcaacatcatcaattgtggttgtaatggttccattcctagctcaaagccatttgaatcagctccttcaatttgcccatgtcgtttcatcctcatacgacatcccagtccactacattagctcaactcttcacaactcacaagtcaaatatcgagcctcaaacccacttaaccaattaaccaaaatccatttccatgattacccacttccaatttcatcaccaatttcccaacaaaaatccatgtttttttgaatccaagttcgttaaaaatgctatccctttattcgaagcctccacccaccttcgtcaacctgtttgtgatcttctcaaatcactatctccatccacaaaacgacttgtcgtaatttatgatgttgttatggtttcggtgattcaagatgtcgtttgtatcccaaacggagaagcctattcattcaattgcggttctatttttgttggcttttcgttaatgtgtgaagcgttgggacgaaacgacatcgttccaatgtataacaatatgccccctttgaaatcgtgtttctctaattttatacttgattttatgaaaaggcaacaacttggggtggtgaattttcaatctggagagatttacaatagttgtagagctattgaaggaaatattcttgaaagtcttgtaaacgacattggtggggagaagaacaaggtttgggctgttgggcctttacaccaaacgacagtgagtaatagagagctaaggagagaccaagttcaagacaagtggttattggagtggttggataaacaagagtcaaatagtgtcatgtatatctcttttggaaccaca

SEQ ID NO: 35402 - DNA, 2512 bp, Cannabis sativa
gatgggacttggtatttaccatttatttagtttttaagaatacaataacgcaatcagatttgaagaactttgagaattagtatatattgataaccatatatttatagagaaaaaatcatatatgatcttggtagaaagctaaaagcttagaatgcttcttaaagggggagaacttggtgtaagctctccaccaacgccaggcaccttggtgctaagtgagctactactaatcaacgagactagtaggtgagacatatgagaactacgaggggactcatatgtcttcatgagttggcgtactcatgtaactcatagacattatctggtcgacccagtagtgcgtttagagatgctgccagaggttagctggtacgtttccattagcttgttcttatgctgcttgcatggaacatggcctaaacctctgaaagacattgtggcgtgccttggccatgagtctcaacatgagatgacgcaggtactcattcgtgagctagttggcatatgcgcatgggatggatgcaccatgctagaaagagacagaggtctggtggcttgtctcgagggcctaccgacatgtgtggagacatggtgccttgaggattggaccaacgacatatgagagtccttgggccatgagagagattgtttggatggtatcaaatggggtatgactagaggcattggcacgtcaatttggtgttgacatattgccacacatgctaccttggtcgtgactaagtgaatgacagtgttgggattttgccttaccatagtaagaacctatggacagtgcaagtatcttggctagagagtctcgatgcatgaatgcactcgtggatacttgcgaacatgactcggcgggagttattcgagaggtgaaaatgtacacgagacacacggtcgcgtgaaaaataaaccaattattactcgaatggttgaaagactaaccttagcttagagaagtcaaggtgacgcaataagaaagagaagtttctaagaagcactaaatcactcagctcaagtatcatcatcttaataaaaaaaaaaagcatgctcaatatactagaatttcaaactagaaaatattataatgaatcctctttgcatcatacttatgaataatttttaagtaccttagaagtgatgtcacgatcacgtaaattagagcccaccagagataactgcagcaagaatttggaatgaatcaacaaaatgacaaaaatgttataaaatgctgaaagtactaccattagagcatctctaatggtagcacccttaaaggatgctaaaaatttacacatcatttaaaaatataatattttattttatctttcttccacattatttttgacactcttactctaaaaacactccaatgtatagtacactttaaaatgctataattataatctcacacattattaattaatatatatgctcttaggtgtcatactaataacagctaatttgcattattggtgcttaatagtaatgtactttttttttaatacaaaattattcacaataaaacttttattaaatacattagagcttcaacaacacggctaatccttaaaataatattaaatttcagaatgttgtaatggcatgggcatagcacaaaactataattaaatgcttcgtcaacccttgtaaaaggcaactcgatattagaggtcaaagtaaacatgtgtcgtgtgcattggggagtcacacatcaacgtcaccaaagttcaccccaaatgagatacacgtcacaaacaatgtgtcgtgtgaaataaagtaatcacgttacaaacaaagtcaattaactttttttttttttttgaaaaacaggaagaggctcccccgatatatgtctaaggcagtgcctcttgctgattttagaaaaaaaaaataataataagcactttgtttgtaacgtgattgctttatttcaccagtatttggtttgtatcgtcattactttatttcacaaagtcaattaacttattatattgcctaacaaactaaactcaacaaccaaattgaggagttttccaatacggcatccaacataatcaacattagaaatccaaaatacgcaagaaagaaatgcaataccaacataaaaaattcttttttagtttttgcaagaggacgatggtggggaagttaattttgtggttttgcttgcatatgtcaatacaatacaataagactacaactaattataccaatacaatcaggtatttggtaaaaaataagtgatggaatctgtataatatctaaaattaagtacaaaaaaaataggatttatgtttgaacaaatttcagcctaaccatggaatattgaccaactctcaccaccacttacttatttattttttatttttttgaaacagactctcaccaccacttaacttgacagtttttggctctatattttttttttttttttagcaatggccctatatttttatttggaccctacaccacaattactaaataaaatataaaagatgttttt

SEQ ID NO: 35403 - DNA, 1911 bp, Cannabis sativa
  modified_base (1606)..(1608): a, c, t, g, unknown or other
  modified_base (1881)..(1885): a, c, t, g, unknown or other
ccgcctctttcttctgcgagctacgccacgcgccgacgcgtggaggcacatgtgatggagatttcgacaaaaaatcttctccgattcgtttttagctcctctcaaacctactcgcgtttgtcttaggttgtagtttggtttttttctccctactttgtatttgggtgttctttatttgttcttcgttgttcgactttgtcttatctcttccaatatttgtttttcaagttataggtagagacaaaatcaaatccaaaaccactagttgtttctgatgtggttcccgtgatgtctaaaatcacagaccataaattggttggttcgaagtatttggaatggagtaagacaatttgactgtatctgagaagtattgacaaagatgatcacttgactaatgatcctcacaaataaaaaggagattcaagaaaaaacgactccttgaggatgctcgcttgttccttcaaattcgaaattctatcaaatatgaggtaattagtttgattaatcattgtgaattggttaaagaactaatagattattttgagtttttgtattatgacaaagacaacatatatcgcttacatgatgtttgcaaagtcttttatcgtgtagagaaacaagatcagtctcttatgagttactttatggcatttagaaaaacatatctgtggcacttggagcacattttgaatactagagaattggtactccttttagagaggtgtccctctcaaagtcgtatttgattcctctttccttttaatattttaagggagatgatggttttgtgaagcgattcaacattttgttttcgatattttaagggagatgatggttctatgaaccaactcgaccttttgcttattttattttaagggagatgatggttctgtgaaccgactcgaccttttacacttagcttttatttgtttccctgtgtgcgcttcaagacttatttgtattttgaggagcttctccttcgttattgcgagtgctctttcttgtggagttatatttaggctttcactctttttttggaccgttaggggtagccaacccttgtagtcctaagggttctctctctttctttttttcttttttttttttgcttcattcactttgacaatttcaattgacaagtatagtgagttgttgggttttgtgccctaaataaaacttatttttatataatcatatttactaattaataaaagatcagaaattattttaagttgcatagttcacgattatatgtttaatgtataaattttattaaatccagaatatatagttaatcaggattatagtatcgtcaacacagtggaatataatcataattatatgtttcaaagtttaagtcccataatttgttagtacactggatttacacttacatgataatcatcgatcgagcttacttacaccttagataagtgttatgtcattttcaagacattgacaaagtatgctaggatcgaatgtatagagtatacatcggactggatcaatattgaacttggataagatatcataaacttacctttatatccatctaagtcaatatcagttagctaatcttaggtcaatagatcttaatcctgatatnnntaggttcgatctcaattgtattatctatgttcttagagttgttcattaaagcttgaacgacctaatacttacatcttgggaacatgatagtataattgagtgagagtgctaatcataaattggaatctatagcttctataaattccagaagtgaaacgatgatttccttcaagcttgacttaatagagataaataattgaggtctaatttctgtaagtatattagtttactgaaatataactttataggcagctaagtgttttaagaataaannnnnttgaagggtagaacgataaatttgtc

SEQ ID NO: 35404 - DNA, 1109 bp, Cannabis sativa
tcacaaaattgagaaacttatggcacagttttggtggggctcttttgggaatcgttctaaagctcattggaagtcttggtcttctctttaccaatcaaagttctttggggggctgggttttcgatccttagttcatcataaccaagcgttactggccaagcaagcttggagggtcctaaccacccctgactccattgcctctcaaatccttaaggccaggtactttcgatattcctcctttcttgaagctagtaaaggtcactctccctccttttcctggtctagtcttctctggggtagggatcttctcaaggatgggcttatttggaaagtgagaaatggtcagaatattcgtactctgcagaattcctggatccctgatcttagaactcttaggtttaagggtgactcctctcctccttctgacaaagtcagcttttttattaactctaatggctcttgggatttaaaccggttggctatttactttgatcatgacatagttgttaatattgttaaagttcccattggaggtcatgagaaagctgattgccttatttggaaaggagatccttctggtcttctcactgtcaaatctgcctatcatctcatcaatacttccactttaccaccatcttcttctaatacaacctttataatcgatggtggaaattcttctggcatcaaggtattcctcctaaagttaaaaattttggctggcaaaccttttaccacatttcgcctactgcatttaatctttttaggaggaaagttgttccctctccttcttgctccttctgtggttgctctctagaaactgtaacacatgcacttttagactgttccagggcgagagaggtttggaaactttctcctttatatcatttttatcttttgcataggaattctgatgttaaagatttaatgttatctgcacatactgatttgacaagtgatgatttctctttacttatgtgcacactctggtctatttgggagtttagaaacaaaaaacttttcagaaatgctaacccagatgaaggtgatgtagtccaatggatcagcacttttttgtctcaatacaaggaagcacaggtcaagaggattga

SEQ ID NO: 35405 - DNA, 1240 bp, Cannabis sativa
aaaattataatttttagctaaaaatttgaaggaaacaactatgtataattatttttatgactttttagcacataaataataatgtaaattattaaaatatatataaattttaaataaggaaattattttaaagtttaaatttttaactaaaaattttaagaaaaaaaaatgcatcattaatcttcaaaataatttgacaaaaagaaaaagcatttaataaataaacaaataaaattttacaaaaaaaaaaattatatatatgttatatgcctaattgtatctacatattaattatatttttcaaaaaaagcagatgcaatagcggctatttgcacgtccagtcttgaaaaatcataataaaaaaataacttttatcttctctaaaaatgtgactgaaaagttaaaaaattaaaaaaaaaaatgaaaaaaaagattaagaaaaagaattgaacaaaaaaaaaaaataaaacacttatatatgttaatggggagagagagagataataacccatgaattttaaaacacataaaaaacctacaaaaaaaggataaatagaagagagatggatcaaatacaatgaaaaataataaaaaaaagtcatgaagaaacaaaaataaatagaggagataaaatgtgaaataagatgacaaacacaatgaaaaagtgtatgagatggtttctcagcttttaatcatcaattttaattaataaaaaagttatcacaaaagtgacatgaataatcataacaacacttttacaaagtttaaaaaactaaaaaaaggttataataaactttagctgacacatatcaattagatggaacaaaattttttttataacaaactcaatagataatatatattaaggcagtaaaaacataataataagtacataacagtaaaaatataataaaaatgggaaatacaatactcactgtattcgtttttattatgtaatacaatggccatgcttactatatatatcaataaaattatggaccatttttctccaaacaaaattcaaagtaaataattaaaagagaagtttgcatatgttgtttttttttttttcgcttattattattttttcatttttgaataattttatttacgttataaatttagacagatatgagtaataatacttgtattcttttctgctctccactttgctctcaattctttatcaaacttacacatatatataggagaatacatgcatgtatatgtatataatcat

SEQ ID NO: 35406 - DNA, 1536 bp, Cannabis sativa
ttatacgcttgataaaaaactgtttaagtctaacacattcttcattttaatacattaaaggctcgtttaaaatgtcgtattaggtcttatgctaaaatgttatgctaaatcttcaaaggtctcgtgttgaagaagaaataaacttcaaaaattttcaaaggtctactgcttttatttatgcatttatgattttttttcttaattacctatgactaaaataatatctctaaattgattagcaatgaaaattatgataggagaagacttagaaattatatttgttcttgatattattttattggataacaaaaaaaaaacaattgagaagattttaaaatgattagacaaagaaaaagagacatacagttctagtggaagaagaagttctagacaaaactaaaaaaaaaaaagagtaataaaatcaacaactttttttaaaatatttctctggtagaatgaaaacattacagatcaatcacaaatcatatctattgttttttttaatagaaatttagtgatattgaggtagatgaatatatgaatagtatatgtaaaatctttttttttttcactttgggaaaaatgaaaattataaaataataaaaacaaagaaactaaaagagattttttttaattaataagttcgtgcaacttctttaatcaaccaatcaaaatgtagaaaaaaaaatgataaacaggaaaattctttataaatatatatgcatttaaggcataaattttatattaaattacatgaaaaataaactgaaaagaataaaaacattacaagaaaaattgcataaaaatagagataaacataaacacacaagcgataaatagacaaaaatatatatccataattttcttatccattaacgtaacaatatatggtttctctcattagaaaaaagaaaaaacaatatacatatagtttctttaatttggctagtaattaaattaactatatgcattaatatgctgtcttattcatatcagtttaaacaatccctatccctagctaatattagtatactcaattcatatataaacacacaaacatacatgtgtgtacataataaataaactaacaacacctataattaatacaaaaattagtagagcaaaagaaagaaagaacaaaaaggaaaatggggaatatgtatttgtcgaaaggagtgattgttgttttttgcataataagcttaattgcatgcatgagtgttgagttgattgatggaagatacattagctatggagcaattagaatagatgatattcctggatgtagcgtcaagcatccagagaattgcatgaaaaaacgtcatcccgacaacccttatgaaagagattgtttggaagaagatcattgtcgagttcgtgatccatctaaacctaaacctggacccggacctatataaaacaacaacaaaagaaaagtgataatacaagaatattattacatattactttcacttgtatgattattatatatatatacaataaatttatgtgtaaatatacttttttttttttttt

SEQ ID NO: 35407 - DNA, 1813 bp, Cannabis sativa
cttataaaactttaattaagattaattatattataaaattaaattaattataattattaattaattttttataatatatactaaataaggaaggatcttttatcttttagtattttttttttttttttttttgcccttaaattattaaaatttttatagcaaaactctttataatttaaaattatacacataattttataattgaaattttattacacttataaccttaatttaaaattattacacttaataatttagtttgtttttatttaaataggttgaatgtattttacaaaaaaaagggctaaactcctccctccttttttttggataaggagtcacttattgaaaaaaccaattcaaagtcaaaaaaacaaagccaagctctcccagaaaacgaagcaacctcaaactcgaaaagaaaaactcctccctccttgcttcgacttgttttgcacaaaattgaagggccctttcacttgaagacccttcgctagtaatctactattttgatttagttttcaaaaaaatctgagagcaatttctacttttaaagaaacaaaagtcaaacatcaaaaatagagaaacctagcttcgtcgatctcttctccccatcgctttctctgattttcgtcgctatctttgatttctcaacaacacaataaatctcagtagtcttattagccatggcaggtaaggtactctaaccctcactctatgtatcataataactttgatttctttttattttttatgtcactctttctcgtaattaacgtaaattttttgtaaattttgcattgcaataatagcaatagtggtctagaagtatctcaactcttaagttttatcccttgctttgaattgaatactaaagcttgaaatttatgccaatactataacgagagaaaatttctgatttctttcatctctcgctttgttgattctaaatcttgaaatttcaaggagatgtgcttgaattgttgctagaaaggtaagtatgtacgcacaacaataatgattatcaactttccatagatttatgtatattattaaccctagtttgtgctactgatttgaacaacgtgctatttttaaattaaaattaaacaagataaagttatattaatagaattaaatgtagaatttttcccaaagttttaaaagtattgtaagactgaagaacaaaatgatgtagtattgtaggctaaatcattactctagtccaatggtatttgaacatataccacttaggcttcaggttgatgtctcatacttaatttttttagttgtaagaaaataataaaatatcattcaaaattaattaattatttaaaaatttattatacaagaaaagaattctaatctatgtaataagttgaagtctaacttttgtaaaaaaaaataaaattttattataaatattataattaaatgacttaactattaaaataattatagtagggatttatataaaaaaaaaaaacaaattatatataaatattaatttccaaaagaggccttattaaatatttaattgattattttaagaaaatagttaattattataattaattaagtaattaattctaaataaaaaagaattttttacctattgataacctgctattacaggtcaaaaaaaatgtaaccatgatggttacaataaaaatgtaattatcgagtagtcacccatacatatatacacatgggtaaataccattttagatcctatgttttacaaaaggttaccaagtggaccctctgttttgttaaatgataaaatagaccttatatttttcaaaatagtaaa

SEQ ID NO: 35408 - DNA, 1709 bp, Cannabis sativa
acgatattggagatgacttctcttgtgcggtgttggggtttttccaatcaggtaagcttcctcaggaagtgagtgcaacatccatatctcttatccccaaaattgataatcctcaaggagcttctgactacagacctatagcctactgcactacaactaccaaatgcatttcaaagatgatttggaccagactctcggaagttctccctgagctaattcatgaaaactacggtgcctttgttaagaagagacttttagctcacaatgttttgattttgtaggatcttctcaaaggttacactaggaagaacatttcttctagatgtatcatgaagattgatttgagcgaggcctatgatatggttgactggtgctttgtggctgatatcttaaaagcactccacttcccttccaagtttattacctggattttaagttgtctccaaggagcctcttatgcccttctgcttaatggaagaatacaaggttcttttaagggtgaaaaaggccttcgtcaaggggacccgatgtctccgcttctttttgtggtcctaatggaatatttatctagacttctgattcagagttttcaccctctttgcaaatccttaggccttgtcaatctttgctttgcagacgatcttattatcttctacaagggcaatgacaaatcagttcagatggtgaaagaggccttccaaaggtttagtgaagcaacaggcctgattgccaacaaagccaaatcaacggtgttctttgggggtattccaacttcctgtaaacagagacttgctaatatcttacaaatggaagagggttctttccctttgaagtacctaggtgtgaatctaagaccaaccaaatggagatctactgattgtggtatcatccttgataaactccataagaatttgcacacttgggctaacaggaacctctcttttgctggaagagctcaactgatccattcaattctgctgggaattaggaactattggatgggtttattcttgcttcctcaaaaaattacggcggctattgacaaatgttgcagagacttcctttggggctccaagggaaacagaagcaaatttcatattccctcttgggagaaagtttgtctccccaagaactcaggaggtctcagcttcagagaagggaagacttggaacatagcgcttatggcaaagtatatctgggctatatccaacaaacaagacaacctttgggttaggtggattaatgcgatatatctgagagggttgagcttctggacagttgacttcaagcaatgcgagctggtacttcaaaaaaatatttcgtcttcgttcaactgtcaatgaatcaaatctctcttatattcaagctcacaaggttgattatgcaaggaacatttggaatagaatggtccttccaaagcatagattcataggttggcaaattgtgaacaaccagctgctaaccagagacaatctcagtcggtttttgtcaatttcttctcctttatgcccggtctgctgtagggaaaatgagtcgcaccagcatctgtttgtgcattgctgttttacccgaaaactgacttgtgagattaccaaatggtgtggccaatttgactggccagacgacttgaacaggtggttctccaaggcagccaacaatatgcaggaaaggattatcaatacagtcattttggcaaccttgtacacagt

SEQ ID NO: 35409 - DNA, 1591 bp, Cannabis sativa
tggttagcttggcataagctctgtcatcctaaacaaaaaggtgggctagggtttagatcttttgtccatcataatcaggcacttttagctgctcaagcttggcgaattcttaatcgacctgactcgcttccagctcaagtttataaggccaaatattttcaccatacctcctttttggatgcttcaggtattcgattaatttatttttagtaatttcttctgaaccatttttctatataatttactttctgacttattcactgattattattaagttgttaatgtaacccttttgattttaataattttactttatagttgttattttttggtgttttcgagctataataattttatttcttcatcaatgaattatatgattgcagtaggaagatctcctagttatatttggaagagcatcatttcagctttttctagaagatcttccttttgtaatgaatttggttctattttagatgatattgctagtttactatccaattttcctgaagcatctctaattcatgttcgtcgtttggtcaatacggctgcacatgagttagcagttcgtgcactcaaggtggatggcgaattagtttggatggatgatttttttttcatttctttatgatgtactaaactctgattattttccatgaaagttcattgtaaaaaaaaagtacatatttgtcgagtgtaataaaagaaattatttttaattttataattattattagattttaattttttataattgttataaattaattataattatttaatagtgatttaatgattaaaaataaatataagtaatgtaaatgtattttttgtaactttttatccctgaataattattcatctgccgacagaaaaagtcctggaaggaaatatatttgtataatttattttaggcgtcattttatgtcttccttgaattggtaaaagcctcacaacagaaagagtacccataatcaatccaccgtctccgccctcctccgaccttgcccttctgccccttcaatatcaggttggctttattttcattttctgcaatttcttccattgttgcgtcaaaatggatcttaaagcacatcactcttccgagcttagtttctccttctaaaatcaattcagaatcgtaaacatccctagaattttggttgtttgctcattccatttttggacttcaccgttgatatttcgttattgcctattgtagatttcatcactgagcctttaccagaatccctaaaaattggggattgtaaaatatgaatatgacgatgttgtagcttatgagattgtaggttttcaattgctttttgatgtgattttatgggactttattcgaggagtcgaattgagcaattaaggatattgattagtaagattagttttgtgatgttttggaatttggtggtcagcttttgagataaatctagtcattgaacgtagctccgtgtatttaatatgtaaatgtattcgtatgcttttatagaatgcttatgatgcgaactgtcaacaactgaaactgtttagttctaaatctgtaataatgatcatatgttgcttggcaggaaaaccgaca

SEQ ID NO: 35410 - DNA, 2611 bp, Cannabis sativa
tttcaaccccgaacaatagtcaaaggacaggccttagaagactttggagttgagtgcacaagcaaataagaaagcatttcaaaaggtaacctgcagcatgtacaagaatcctagcctaacaacaatgaagacagacccacctggaaattacatgtggacatgttagatacagatcaactatttggtgtagggatttcccttgtcacacttggggggcaacacctacacgtggcggtcaaatttggatgcaaagcttccaacaatgaagcagaatatgaagccctcattgtttgtttgaaaattgctcgagaactacatgctgaacacatcgagatctatagtgactcacaattaatggtaaaccatgtaccaggagagtatggagcccgggggaaaaatgatagcctatctaagcaaaatacatgatctgcttgcacaattcaagacatatgctcttaggaaaattcaaagagaagaaaacacaattgttgatgccttagcccgacttgtgagcaacaatatagttgataaagctaacttagtcccaattcaattccttgaagagcctagcataatctgtgcagaagaaattgaaatgattggcggagctccgaattggatgacaccgatagcaacctacctcaaaattggagaacctccaaatgatagatacgaaactcggaagatgagaaggaaggcagcacggtatatcatgatagaaggagtcatgtatagaaggggtttctctatgccactacatagatgtgttacacaagaagaggttgcacgacttttgtctgaagtacatgatggattctatggcaaccatgcagtcaggcaaagcctatcaaagaaaatactaaggcaaggatatttttggccgaccatgatcaaagattcaaaatcctatgttaagaaatgtgataaatgccaaagattttcaaagatacatcgtgcactgcccaatgaactaactcagatacaaagtccttggccttttgctatttgaggaattgacttaatcggacaattttctaaaggcaagggaggagaacaatatgcagtggttgcagtggattatttcactaaatggacagaagccgagtcattagcaataattacatctaagaaggtgctagactttgtggtgaaaaatataatatgtgaattcagactcccatataaaatagtctcggacaatggcacaagtttgacagccaattgttcactgatttttgcatggacattggaatcataaaaagtttctctgcagtgggacaccctcaagcaaatggtcaagtcaaagcagtcaataagacacttaaagacactttgaaaaattacttaaggaagctaaggggaactggccagaggaactactagaagtactatggtcataccacacgactaaaaaaacagcaaccagacagactccattcgcaatagcctatggctatgaagctatgctgcccgtagaataagaacctttgtcccacagatgattgacctatgatcaagaggctaactatgccctcctagcagaagcacttcaaagaaaaatgagcttcagcaaacctagagttggttgcccatcaacaaaaggtggctcggtacttcaacaagcaagtaaaagcatagaaaaattttgtaggagatatggtcctgagaagagtatttctgaacacaaaagacagcacgactggtgtactcggaccaaatttggaagggcaatatcaggtggttgaagttctagaatcgagagcgtacaaacttgggcgacatgacaaaaacatggaactcattctagtaccaaggtattggaatggggaacatctaagaaaatactatcagtaaaagtaccaggtcgggtgactactcaaagtacaaaattaaagaacatttactcttaagtaaatggccttttgggcggaccccaccgaaaggtttggattaaacgataagtactcaggtcggaggaccacctttgaaagtacaatttcttttaactgcaattggttttctttaaatttagctaaagatcggactagataaatataatagcttttgtgtaagttactacggtaacaaaaatattctgaccaatgaatgaataaagatgtctatttaaattctaaatttatcaattctattagcaagttataaatttaccattaaatgcgtacaaaggtctgctcgaatccaaagaaccgaaaagacaaaaaccatacttgtaaaatacaagtgaccaagagttaaaagtctactcggtcacttggggggcacctatacccgtacaaagcattggcaaaagtaacaagctcaaaaaaaacacaaacatagttgcacaaacaattatcaaaacaagggatggtattcattgaaaaagataacaaagcacggtaaatctgggattcaaagctaccgggtcaaccagttgtcttaatatgaaaaacataacccaagtttaaaaaccgcttggccggtcatctttgtctaaaaaaaaggcttatcggctgaacaaacatatataaaataaaaagagaaaattatttagacaacgatactcgtaggctctttgtaaggatcgctttgttgtgaagggcaagaggtt

SEQ ID NO: 35411 - DNA, 2095 bp, Cannabis sativa
  modified_base (26)..(30): a, c, t, g, unknown or other
  modified_base (518)..(520): a, c, t, g, unknown or other
tccacgtgtccctgtccggttggtcnnnnnatattgggcgaaatcaggggcaactatatcaaactacttgtctcttacaaaattagactcactgtcgttggctaaaagtgaggtcaacattttggtgctttcatttagagttgaactcaaggatcgctctttattccaaatttaatcacaagtacgatggtggtacagactcgtaggggcgtggttgatccagcgaatccacaggtggtggatcctgcactacaaaacccgagaaacccaagggttctgccagccgtaaatctctcggacagccaccaactgcgggtcacggtgtgacgactcttgtggatgaaatcttgtctggtgtgcaagagactgggaataccagtttagcaaccgaccaaggcgttcataacacagccgttctgcccgctaccaatgttcaaacaaccattggagatgacactgacatccagaacctctgtgctgcccttggaatcatgcagggtcataccaacaccctacannntgatcaggaggaactccgtgctacagtaaatctcacatttgaagagcagaggcgtatgtttgccgaatggagggacaaagagattgaaacgttaagggctcagcaagcagtcattgacgatcgcagtcggcaagccactgtgctgatacgaaaagcctatcaaactgtcgggcagcagctcgcgaatgtcatccccttgggccaaacagtcaaagatccagcgatgaatacttcccagactataaatggccagccgtcaaatccccgatcacaagttttgcctgtgggccaagtggtacgcgggcagaccttgtctagtaattcatcgggaaaagtcatacccaacaattccaaccaagttaatggtgacggtcagcaaattggccaaaccaaccagtcacggagacagccagacgtttctgtatttgataggttggggatgactcatgatctcagaaacgatctgaacaggaggagaggagtagactatcagcttgacacgccgatcatgcagcccagaacccgtgctcaaattcccgctcaaaaagatgctgatgtgacttagactggccaagaggctgaacaggttagtccagccgtgcaggcacagttggacgaactaaagagtatgttccaaggcatggccggtcagaggaacaacgatctcgagttggaccgagcacgtggaacccctttctccctagagattaatatcctggagttgccccacaagtttaaaatgccaacctggaagatgtatactgggaaggaagatccattatctcaccttaagtattttgagatgcaaatggatctacaaggagtacgaggagatgtatgttgtagaatttttcctgccaccctctcggaagccgcccaacaatggtatttcaagttggcgcatggaaagtttaactcatggaaggctttctcctcggagttccatgcacaatttccctcctctcgccaccttccgttgcacctaggagatctagtcgaagtaaagcaaagaccaaaagaacctctccgagcctacatcaacagattcatgacagaggcgaccaaggtttcacgagtaaccgaggagggaaagttgtccgcgatactgggggcattgaaatccttggtgagctttggaaggacattaggaagaacggaccagtcgactcgatgagtgattttcttgaccgtgcaaaaggctttatcaaacttgaagaggctattcagcgagtagaaggtgagcaaaaacctggcaagttaaaagctccttctactgggacatccgtccagctcccccattacccaagcaattcaagctcaaatggtaaacggtccaacaacaataataggcaagggaatgggaaaaaaatgaaagtttacaagcaagaccaaacaagctccctgggagaatcctgctaagtatactgcattcaccatcctgacagaggacatagaaagtgtttatatggccactcagtcactagctccgtaaaaaaagcccgcacccatgaaaaaagacgtcagcaagagagacgtgaccaagctttgtcgatttcatggagactacggccacga

SEQ ID NO: 35412 - DNA, 1599 bp, Cannabis sativa
ctacaagtgcgctagccactcaacatcatctggtttaatcttttttggccaatcacacaacactctattcttgacatcctccttcgtagcgtgtacaacagtatcttgtgctactctccctgaattccatagcacctcattctgattcttgcacaaatgatacaacaatgcagccattgcagcggttaacactgccttcaaaaacttggacattttagctctttccagccacctgcacaacttacttaaagttgtcgttttgactctccaacctagccaagctttaatttgagacagacaaatagtagagaatgtataagagaagaaaagatgctctgaagtttcaggatgacccaaacaaaacaagcagaaatcttctccaatgatgttaagtttgtgtaatctttctctagttctaagtctatcttggattgcaatccaaaagcaaaagctatgtctagggtgttgagtctattccatacctcatggctccaaaacaccttgctttggggagagcaaagatacttgtagcaatttgatatgttgtatttggtgcttgcaaattgttgaatgtcaatgacacctttgatttgctctttaaccacattcaatttcctccaataccaacttgcttaaagtggagctcaataagtccaccaatcctctcctttaatgtatacacaatgtatccatctaatccacaggttatcttctttgttcgcaattgcccatacatactttgtcattgccgctatgttcgattctgctattcttttcaaaccaattcccccagcagattttggctgacaaacatggtctcaagcaattagcccgggtccttaggagacatgattgcctttccataagtaggcacggcaaatggcttcaatatcccttatggttctctttgggaggaccataatttggctccaaatgaatgaatggacatgagaactgagttgacaagtatagccctccctgctaaggacaagttccttgtgctccatgttctgatcctggttgtcatcttttctgctagaatcatgcattcctttcttgatattcgtttcgcacaaatagggataccaagatatttgaatggtacctcttttttgcaaaatcccgaacaatcaagaattcgttgtatttcagtatcttccataccaccacaatatatagcagatttgttggggttcggctgcaaaccagatgaacatgaaaatagtttttaacccttgtagcatatagtaattactcttataatctccatgacaaaagagtataacatcatctgcaaacatcaagtgattcaatttgagttcagcacatctgtcatggaacttgaactcctgtttagatccaatctttgccattattcttgaaaggtactccatacccagaacaaatagtaatggggacattggatctccctgtcttaagcctcgtttcccctcaaagtaaccatgtaatgagccattgaacataagtgaaaacctgggtgtgcgaacacagaccatgatcaacttgataaatttatcagggaattgaaaagcataaaggatttcttccaagaagtcccaatcaagggtatcataagct

SEQ ID NO: 35413 - DNA, 1720 bp, Cannabis sativa
ggtctgtcacttgtcgtcccatttaagtgtcgggttccccgttggctaaggcggtgacttgaccttcttgttggtgagttatattaccacatggcactaattttgtccacataagcatcccacatcatgtgagcaaaaattaggatagcatttgcccctaagtccctatgcaaacgtttgcacggataaggacttaccagtttaagttagaactgatgtagcctttgccaaatagaaattgctacatttttagccttttgaaatgcttttctcttgactgcctgatctcatttgttgcagtaaactaactgcttttccatgtctctttattgagtatgtgtggcaagttaaaaagtggtcctacaaatactatttaagtgcttttgggggaaaactctcttcacgtttcacttttcactctctaactagaaagtaacttttgaagaagctcctccttctctctaaaaggtcaaacccacatagcatcattctcccaaaatttttgcaccgttttgacgatccaagcttcccatattcttcatcaatggtttctagttgtgggtaagctttcttattcccaccattaaattgatttagttgattttaccatgaatgcatgaacattgttctttgctttgaatgtcttttgattcccatattagattgtaatcttttcggtattttgatccgcatggtagtcttaggatatgtaatatgtgatttctagacgaaaaagatatgaaactgactttcgttgtgattcttggctctttaagttgtgaagaacacgaagaacgtgtttgagttcttgaaaaatcacattctcagatccgtacacctcctggccagccaaggaggtcttgtttaagacttggtcggtcaagggtggccaccatggggtatggccggccaaggggtataccccataggctgaccggcctatgcctagagatagggttcttggtcggcccttgtttgggtcatgggacctgatcagtctcttaggcttgggaaccctagcctaccaaggccaaggttccaagcagacagctagttttttatcctctattgacctcggctaaggtcttgtgacggccttggaggcatataaaactgtagtcttatacgtggttccccttgggaactctgtatgagacttagtagtgagtccattatagttgcgtgcacagcttaggaggactcactaattgcctaagtaaatatacttaagacggtacttggctaataattagccttgcacattatgatttacctggaaggtacccttgagtactgttgactagaatgtgttcgtagctttgtcaggttgttcacctcctcttgtctcttctatgcaggtgattgtgagtgttggattaaggaggtgacagccgcataggtcctcttgttatcccgtgtgatcatggccagaacgaaatagacatgtcgtagaacactgccatgtgatctccatatcgtcagcgtggcaacaaggggttgtgtcagagttgtagaggaggctactcagcccaatgttgatgtaaatctagaggttgactaggcagaagtgcctgaggttgaccaaggggctcaaagtcctgatactgagtctaaagttgaggaggctgcaccgatcaggagaatgagatacaaaacttgtatgtcctctctaaccgactctttgggtagttatgacgacaatgaggaacctttgaacagg

SEQ ID NO: 35414 - DNA, 1322 bp, Cannabis sativa
actcgccgtcgcaggtcttggagaagaagaagctgagtggtaatggtgggtgacaactcaagtcgactgcgacgactggtgtgggtgagtcggacgagtcgagttagtcgactactgtcgatggtgggtgtgggacattgagtcgtgtgggtgtggccgtggccgtgggacggtgggtgtggccttggtgtgtgggtgagtgatatatactgtgtgtgtcactgtggcgtgtgtttgaagaagaatagtaagtgctagttagtgatatacttactgaatattaactgaagattgaagaagaatagtagaatacgaatagcctattcattgattgattcattcaatgatttattgaaatttgaacatgattaaaatttaaaaatttaaaatgctatttacattttacagaatacgaatagacaggcagttaggcacgcacgacagcaatttttattttcgggtattaattttttaattaaaaaaaacagcttttatattttcgggttacgggttctaacccgaccaccgaaataaactcacaagtgacccgaacccgaaacccgttacagtccttttcgggttgaacccgacccgactatacgggttttcagttggtcggttttttttttgcatcgggtcggggcgggtgttcaggtttttcgagtttgcgggtctaaatgtgcagccctaaatatcacattaaagtctgatttgttagaaagaatcaagacaacccaacaaagtgatccagaactacaggggtataaagaaaatcctaaagtcaggccaacaggggatttttcaatttcaatagatggattattatgatataaggacaaggtttgtataccaactgacgaaggtatcgaagaggagattctagacgagtctcacactacaccatatttcatacatccgagaacaactaagatatatcacaatgtaaaagcgatgtactagtggtgggtatgaaaggtgacattatggagtatgtgtcaaatgtctaacctgttagcaggtcaaggcagagcaccaaagactagcaagattacttcaacctcaaaagattcctgagtggagatgggaagaagtaatcatggacttcgtggttgaattaccaagaataataggattctatgattctatatgggtaattgtggatagatatacaaagttagtacacttttaccagtgcggactacgtacagtggatcaatacgttgatctatatgtcaaggaaatagtttgactctatggtgctccaaagtcgatcatctcagatcgagatccaaagtttacatccaagtgttgggagagtctac

SEQ ID NO: 35415 - DNA, 1422 bp, Cannabis sativa
  modified_base (812)..(815): a, c, t, g, unknown or other
tcaagtgattttgctaggagggcacggttagcctcttgatcataggtcaatcttctatgtgacggaggttctaattctacaggcagcataggtttataaccataggccatatcgaatggagtttgtccagttgttgttttttttaagctgtgcggtatgaccatagtacttctggaagttcttccaactagtttcctttagcatcttcaaattgtttttccaaaacatctttaagtgtcttattgactgcttctacttgaccattttcctgaaggtgtgccactgcaaagaaactctttatgactccatggttcacacagaaatcagtgaacaattggatgtcaaaatgtgtgccattgtccgagactattttgtatgggagtcagatttgacgtattatgtttttcaccacgaagtctagcactttcttagatgtaattgttgctaatggctcgcttcggtccatttagtgaaataatccactgcaacaactgcatactgtacttcccctttacctttaggcaattgtccgattagatcaatttcccaaatagcaaaaggtcaaggactttgcatttcagttagctcattaggcgatacacggggtatctttaaaaatcttttgcatttatcatatttcttaacataagcttttgaatcttcgatcatggtcagccagaaaatatccttgccttggtattttaattgataggctttgcccagctgcgtggttgccacagaatccatcatgtacttcagacgaaagccgtgtagcttcttcttgtgtaacacatctaagtagtggcatggannnnccccttctatacatgactccttctacgatgatatactgtgcaacctttcttctcatcttcagagcttcatttctatcatttggaagttctccagtactgaggtaggctgctattggtggtatctagtttggtgatgggtcaatcatttcaatttctcctgcacaggtgatgttaggttcttcaaggaattgaattgggattagattagccttatcacctatgttattgcttgcaagtcggcctaaggcatcagcagttgcataatccaaatttgactaccccgtgtaggtgttgcccacaggtgtgacaagggcaatccctgcactagacagttgatctgtagttgaaccgtccacgtgtagtttctaggtaggtttgttttccttattgttcggctgaggctcttatactagcttcaggttgccttttgaaatgctttcttctttgtccgtgccctcaactacaaagtctggtaagacctatctgtaacaccctaactattaaaggtgtgttagcgtgatttttaatgtactgtgcagctcgttgctaatcaacgagattattggaaaacgtgaataattaaaattttgtttaattatttaaaaca

SEQ ID NO: 35416 - DNA, 1269 bp, Cannabis sativa
  modified_base (766)..(780): a, c, t, g, unknown or other
aaatattatatacttattggtgaattaaaatataaaatctacctaatttaatttaataattatttattaaatatcattaatacaaagtgcacctcaaagtacacaaagtagtgtcattactaatgttcctataaaaatggaaaaagaatacaattcaagtctgggacgaaaattttcattcaactaagcttttattgtcaagaaaaagtacatatttggcctatcataataaaagggtaaaggaaagatagaagatgcaccaaaaatttagacaaccctatcataatagcatccttcaacgttatttttttctttctttttttaaaataaatacacatatataatttacaatataaataattaagtttaatttttagttacaaataaataattaagtttaatttttaatcgtaatgatacttaagttatattttttgagatttttacaaaaatactagattttatgtcaaaatttataattttatagctacacaattttttttttttataaaaatactgtctttttataaaacaactgcaaaacaacaaaacagaacaattaaaaacaattgtagaacaactaaaaaataatagtgaaacaacagtaaaaacttaacacaatacacagtataaaaaatacataaaattccagtatgtggtgtaaaaactcttattttttaaacttccataggttattgacattaagtctcaagtcaaccgccatgtggtagtccccaattagtttaagtcattaaatttttatttnnnnnnnnnnnnnnnatttaaatatactaataagaaattaacacgtgaataataacttatggtacttatggaattctaaaaatataacttaaactgaaagttaaacttaaatatttacgctataaattattcttttaatattataattgctaaatattttttttaatttatttggtacatgtgtgtactaattttttctctcccttttttatccttttctataaatttctctttcacttctacaatagacaagaatatctaagttgagaactaggtattgtgtgacctagttgtaaacttgtaaggatagttttacagtgtaatgacatttttttttgcttgtttgaaacctaccacaattccgtttgaaagggattaaagatttggccctctgaaaactaatttgttattagtagtgtcatctgtgataagaactcttgatgtgattactaatgatccaatataacggtgtcatatctaaatggtactaatacctaatttttt

SEQ ID NO: 35417 - DNA, 2558 bp, Cannabis sativa
  modified_base (2531)..(2531): a, c, t, g, unknown or other
atttaaattttatgctgaaatagattagtggatcataatcccacttattacctaattaacccataatataaatataaaccctaattatttaccatttgtcttatcgggatattacaattgtacttggaggtgtttgcgtgtgacttttatttgatccatatggaagcgccaagacagttgagtgggatgtgttggcttgttaaagtgccagaggacgtaagtcacacaaaggcatcgatagagatgcagagttgtggaatgaatgcatcaaagaagccagtagagctaagaagatcgagcgcaagcgttgagatggcgctagagtttgtgtggaggttagaaggtcgtgccagtgagacttagtagtcatgtgaggctgcgaaggtcaacaacggtgctagagtttgcatgaaggccagagggctgcatcattggaaattagtgcatcgtgggagctagaagggtgtaatgcaagtgtgaatcagttggattgttgagcgggcattgcatgcatatggaaatcgacgggggtgctatatgagatagttgactcgagagtcacatcctgtgggatgcacttttagatggcatggtgtgcatgaagagttgtggtggttaggcattcgcgtgtaggcatgttgtcggggacgccaacagatgaagtgggggagagaccttcacggttcactcatcagactagggattcattacaagcatcaagatgagtatcatggagattgattgttgtttaggatgtaaagtcaagaagactcgtaacacaggtagtgctagttatcgagagtgaaagtccggaggactcaggtactaagataataccatgggaatgttggcattaggtgaaagttggcaggactaaggtactaaggcaacattgaaatgttgaggggtgaagagtcagaatggccgagacattagttcaacatcttaatcaaagtgacgtttggaatggagggaccgtatgtgagtatgcagttagcttgcgagctatatcttgaggggtattcctctaagagagaagttcttcccaagttgaagtgggggagcccactaattcatgtgtttgaagaatcaggatacttgtttagtttcggtgtgtgaatccagagggaaacactacaacagatgggttgttcagtgcaaagacttgcatgattgttgcaagctgcagatagacaatatgtaggggcgtaggccgagatatatactgagctagtttgcggcatgttatgggcatgctttgtgtttatggggacattggtgttgtatgagacactgtgccgaatgattcaaagagcatatgctgatgggagatagcggatttggataacttcaagtcttaagagtaagactgggtgttatcaagtttgtcaaaagttagcgagtcatcagaggatgcagggttgattttaggagtaaacttgtgacacagtgttagagagcccccacaagcaggagctagagggaaagttcatggttttgggtgattgttagatcattaaccgcgtagctcagaaggggaacatatgcagtgggtcagtgggacctattgcatgaagctttgggtgtgacgtagggccggagggccaatgttgtgaacttcacaaagaaatcttgtgcaagagtgcccttggtgctgcattgggtgcagttggcttgcgagcctcgtccaggtgggacgcactaaattttatcctgcgatgagagtgtcttgttcgattgccatcaagaggatggtgtgcaatggagttggcgtgtgaagttttcagagggacttgtctagagggacttggcttcagtggaagtgtgttctgtaagtgtcgttggatactgttggtttgcgaacctcaccctgaggggtgcaccatacttagtccttgtcaaaaggagtatgcattggacattggcgggtgagctactatcaaatgatgttagcttcagggtcagtgttgcaagggctacttggtttactggagggatgttgtgatggactcgtaggaattcatgttgggggaagtattctagtgcggaggcactactccatgggtgattctgaatagcgacagtggcacaggttcttttatcaagtccaagagtgggcgagggagatcgtcaccaagagggtggttctacggaggtagagggacaagtgcaaacttaggattcgggagaagcttagagtaagcttaggagttgagataaggaagattgacctgcggtagtgggggagaatgtaacgtgcatgctaagatggcacgttataagctaagtgatgcccacaagttgtccaagtggtggtcaagtggtggcgcatgttgtggtgcatgctgatgcttagtttgtatgcagtggcattttcgtaattatatcaatattgtctagattgggacggggcttggtattcgccatttatttgggcttagaaatacaatggtgcaattggtttggtgaaactatgttatttggtatgcagcttggtcatatgtctacaaagccaaaatcatgtatgttcntggtaaaggctaaaagctcagaatgct

SEQ ID NO: 35418 - DNA, 4623 bp, Cannabis sativa
aatgataaatgtaggcaagacaaaggcaaagaaggtcgaccacgttagcttttagcattggactgttccttcctccattggtgttggtgtgtcagctaagctaagctaagctaagccctaagccaagagagacgacgatgaagtcattggtgagaccatggacgactccttccccttctttaaccatccaccccaaccttacctctaccaccacacatctcactctacccaactcattttcccttttctcttcttcttcttctccatctcgtcttttttccatggctgctgcttcttccaatcaaactgtttcagcgccaaaatttcaaggtggcaataaaggtgataccgatgtctttcagttgattcaatctcatcaggtacgtttcttcgaaaagacaaaagttaattagcagaattctgagaaaatgagtttggttatatttgatttgattgcaggaaaaggctgctcggttacctccggttgaggagattcgtacggttcttgaccgtagtttgcgtggaacgctctctactatttcgcaggtctggtaatttctttgaagattgggtttgaggagagaagaacagagtggaattgaatgattctgagaaagtgaagatagattttagagaaagagagaatacgatcactaatattgttgtaattgatagaattatagaactttaatcattcaaaattaaataaaatctaattttttcttaatataaatcctaattttttactcatcattcatacttgttaatccaataaaatagctagcatagtatgagagtttcggaattttcccttttatagtgtatggttttaactcatgatgagggcagtagctagctccatagtttgatccccccatgaggtttggtgttttaacacatcaatttccttttaaagatttcttctttgcctggaaaatgtgtagatttgtcttgaagttctttaactttttactttgatattatgcagaaacatgatggttatccatcagggtcaatggttgactttgcatgtgacacagatgggtctccaattttagctgttagcagcttggcgtttcattcaaaggttctacttctcacttagaatatctgattatttgatgattagtttcactttcttagtcacctgaagcatttgtggatagttagaggaaatgttctgattattaaccaaaatttgttatacaagagtaatcctaattgcacttaaatatatgatttttaagataaggcactagtcttaattctatagacgcccgatggatgtgtgtagataagtaaacctagttgctgggatattgccaatcttcaaattttatctcccatatctgggcaatttcttgtagcttttgttgaatttttatatggatgttggcgtgaaataaaaatcatgaatgtattaacttctttcacaatttgaagttgattgcttatggtcactatttcagattaatcactctgcaaatggttaatatttgtgtgatatgtaataccagtacttagtaagatattttgcctgacaattttcgctcttttactttatttagtttaattaattttcttctttgccacaggacttagcagctaatggtaagtgttcattgcttgtggctagagatcctgaggataggacagatttagtgattactctgcatggtgatgcaattcctgtaagtattatacttataaagatgctattgtctcaagttatttgaattgcaagactaagactattctcaacaatttaataggtctctgaaattgatcaagcatcggttcgcagtgcatatttggctaggcatcccaatgcattttgggtaacttatgctcccttattctcaagaaaaattaacattttgtcacaccatagcatatgttgtgacaatttgtatattcaaatcactaaatcactactcacatctgaaggttgactttggggacttccaattcctgcgaattcaaccaaaagttgtgagatatgtgtccggggtcgcaacagctttgctaggatctggaggttcgtacatcataactacatacgaaaggactggccatagtttccactcttttaaattacacaagaaacacatgtttctaattaccgtttccctttcactcaactgtcgcgtgaccttttatgttctctgcacctactatgagttctgttatttatcttcatattatatttcttaaatttgatttcagagtttagcagtgaggagtataaagatgcaaaagttgattcaattgctcagttttctaagcctgttgtggtattacttattactctttataaattgtgacatattcttgtactgattttagtgattttaattaaaaatcatcttttgctagactcacatgaacaaggatcatgaagatgacacaaaagtcattgtgcaacattcaacatctattccggtaatgagatatatgcaattaaatttgaaggagattcttttcccctctttcctctgtttataagctatgaaaattcatgtggaatgtatattcctcatcgaagtgagagtctattacttagtcaaattaggcacatccctagcatgtaacaattatgttcctagatttgttgaaataataaaaataaaggaaataaaatacatgactaaattggatatacatgaaagttgaattttgatgtttcacaggttgactttgcttacatgctggacttggatagccttggtttcaatgttaaggtatttttgagtgttagccatgtgttccagatttcctttttcaaacttataaatcatttgtcttcttttaattgcataaagcttattatcaagtaccctacaattttctgtttccccatttcgagtgtcatctcttcatcagtttgtgagggtttttataagaaaatgacaaatgtattttctctttcctgttgatggcaaacagttataatcttttatatttatatttaatttaggcgggttatcaaggaaatactttcaagcttcgaattcctttcccgagacgtgcagaggatcggaagtgagtcttctttaacaatgactatctcccccctaagtgttatatcacattaagcaacaacagtttaaattataaatttagaatttcagtgttgctgtcattgaagtttccttattctcttgccttattaaattgatatataaacaaaatcatagtccatatatttacaaaatgaaaaatgaaaatagattttcaaagaatctaatagattttgaatctgatttggtcggtccaaccaagaaaaggaaaagaaagagagatcatcgcaaatggcttatcttttgattgtatttttaatgttccgacggccatttattatttcatttcatgttaaacatgtcgatctggtatattttcagggacgtgaagacccttatagtcgaaatgctacgtgctgctaaacctcaagttgattaatctataacagaattgaagatctaaaaggtatgctaatctgaacctctagtgatcattttacgtttagataattttcgttcaattgtgtacattttaacctcatcttacttgcatttgtgtatatgaatttttttttttttttttggcttgtcaaaagcaagagtttaagacctgagatggtatatacttaaatggggaataaatgtaaagttactcactatgttatattcagataaaaatgtgtttgtaaagatgagtgtaccaataccataggacactgctcttcattttttgttcttatcatatagaagaatactctttatgcaaagattagaatttcagaacttatcagacatttttattcactctgaaacttttatttttattagaagggttttcgtttgtatgtaaaattaatcaacttttatgggaattggagttcttcaactttttctaagaagcaagtttgctgaagaaaaagttgaggaactccaagtctgataaaatattttggtaaaagtctagttttaacatttttagaaaacaaaaagatttttgtttatattaatttttctattcgattttctttgcaggatattggaggtattaaaaaatagaaatgtggtgggaaagaaaggaattgtgtatgtttgatgaattaatatgttctgcccaaattgtcaatgcaaattacgtaagaattactgtatataaaactctatttttctttctgaaaaagagtagtagaactagaagtagcattctttttcttattataaatattgaaaaatataataccactttaaatacattacattatttatatgtttatttttatgagaaaaaagatctcattaaaacctttttgagtaaaccatgtaagaaaaaccttacgaggaaaaagggtgcccaaaacatcatagatactaattggggagtcagaggaaaaatgttaaagggcaccggtggtgcttaataccctcttatgtgttaatatcgctattggtccaacgtttcatataattaatataatagcttttagggagtatcactagccaatcgcaacaggacatgttgagaaggtgttaggcaccactggtgcttaatagcaatgctctagttagagcactaagtataattatcagtaaatgataaacagttagt

SEQ ID NO: 35419 - DNA, 1569 bp, Cannabis sativa
gagagagagagagaaggggcgagagagcgatgggcgagaaggagagagtgtaagaaggtgaggatgcataagagaaatgaaggaaaagtttgccaaagtgaggagaaaagattattaagtggtgaatcaacggacaaggcatgcacatagagaggtacaaaatagagtacgaccacgccttcaatgtggcctggtgacgagagggtgaaagtagtggagacactccatctacaacccttgatgtctcgacaatagatactctgcaacaactacgcctgcaactcgagaccacttgacacccaacaatggtacaatgcaaaagaccacctcctgcgcctacatgttgcatccccataaggccagcttgtcccttgggggtcgcaagtgtatcttaggccattagagcctataaataccccattttcatttgtgataagaggttggaaaatcactataatacttcacctaagaaatacaagcgtttctcaccctccattgttgctctgaacacttcttaaagttttcatattttcatgttttcattcttgttctaagacttgtgtatgatttttgattttttggccttaagttagttgacgagttttcaccgtcaataatgtggactaataaattttgacatgtggtaattttaagaactacaattgaagatgttaatcgggtacctatgaactaacaatgagaatctcgagcttggagactattaccgtaattttttaagattagagacttatgaacattgaaacaaggcaagaaaggctagatggccatcaaacttgacatggcaaaagcctttgatagggtcgagtggcaattcattacaaaaatcatggatatgttttgctttcccaaagtttctctaatctaatttaccgttgcatctctactatgtcctatcaatttaatcttaatggtagggttgtaggaaatgtgacccctacaaggggaattaggcaagggatccactttctccttaccttgttctcttgtgctctaaaggcttttcctccctcattcgtaaatttgagcaatcttgcaatttcactagcctcaaaatttctcgtaccgcccctaccatctctcatcttttcttcactgatgacaacattctattttgttaggcaagtatccattcctggaatgttgttaaagagactcttcatcactatgaacaggccataggacaatgtgttaatctagataaatcttctctttattctctcctaaaacagctctgtgggttcgaactcttatctcgaattacatgggtatgcctgttagaaatgattttgaaaaatatctgggcctcccacaatgctttgaaagaactaagaaacaagccttcaagtatatcagagagagagctggacaccacatctccaattggactcacaagtttttcttaaaagggggaaaagaaatccttatctaagcggtcttgcagtccatcccctcctatgctatgtcctacttttggcttcctgtcattatttataagtctttcaaaaatctatgagtgtcaatttcaggtgggtcactaatgctaacaag

SEQ ID NO: 35420 - DNA, 3659 bp, Cannabis sativa
  modified_base (1360)..(1379): a, c, t, g, unknown or other
tattgttggaatgtggttcgagccatgtaagttcattatatataagaagattatattaaatgtggctatttaaaggaaatttaaatttttagtttaataattttttttataaagttaatggttaaaactaacactaacactgttaaattaatcacttattttttaaaaaataaatcttaatttaaatttaaattagatattaatttaattaattaatcatagtactttataataaatttactagttatgttgtttaaaatatctaaatttatttacttattttattgtttaataaaattaattagatatatttttatatatataaatctaaaattagattaaatttgatatattttaaaaatataattaaattgtattaaatttaattttaattattattattattatttaatttaataattaagtaataacattaagtaaatatgcattgcatgttattaatacttaatattaatagtatattatatataagtcaatatacgacctaaatttcccaaattaatttactctagtcccaataggtttggatgcaaaccattaaatatacatgcctttctaaaataaaactataaatgagcttggaggaataataaccgatttttgaagtctttgggtcaacatcaagctaatttataaattccaagtatataaattaaaatatcattcattttatgaaagtaaaataaaataaactaaatttgaaaagataatagaagggaaagggatgtggaccaaggtttgaattaaaagttgaaatgatgatgatgagggtaaagcaaagaccctagctactataaggggtatggagacaatatttggtggtggaaatgtaattcaatggaatttggctcatttatctataaatttacatatattatagtcattatatacatattgcaagtgtaacaactaatttggtgtactttcattataatatggtgtggtgatgctaatggcttttcagcaccattcttcatcaatcctactttgaccactaacctctctttctcttaccacaaaaccattatctatctacactgtctatactttatagcatactttccatagttgttttaaaaaattaatgcattaatgcacaatccattatatgatcatgcaaaaatcatctattttttttttcaaataaataaccttaaggtgctttctctatacaacttttttttcttcttttcacgcacttaagtaaacacaataaatttagaatttcttttcatatacctttcaaaagaatattgctattagacactagtggtgcctagcagtttctcgacatgttacgttacaattggctaacgatactccctaaaagctattatannnnnnnnnnnnnnnnnnnntacttagttggaccaatagcaatattgacacataggaaggtgctaggcaccacaggtgtcttttagcatttctcctttcaaaataatttattataaaattatcaattactttttactcttttttcttttaaaaaaaaatagacctcaataaaactttaatggcatgtttacttaaaaggagtgtgaatgaatgttatgatattgattctcatacaaattaaggaaaaaacaaagggaaaggttctctctcatttttatagggaatacatttatcttttctaacttactttattttaattttaattgtattaattaaaaatgaaaaagataaatatgttttttaaaaatctatgaacagaaaataattacatgttctaataatgacaattttatcaaattaaagcattacgattaccttttttagttatgtgaataaaataatataattctagttttattttcgaagagtttagtaaacagcataagaaaaaaatttccgattattttctattttaaactaattcatttttctcattgattattctgattccaattacagtttaataaacgcgccataagagtaaacctagtgaaaaaaatctcaaaatagaaaagagtgtgcaacacactattagcaatcctcacacaaatattaaaagagataatacaaaaacaattacaaatgagcaaggatatccctaataatgcatctcgaatacaactaatacatatggcaattattgatagcacgaaccacattgacacaatcagattcaatgaccaccgcatgatacctaagtcgtgagcacaacaatgtactggaataaactttcaagactttatcaacaatgggctccaataacccattccatgaccaggtactagaggcaagaacagtactgtgagaatcacgaagtaccaccccaacttcagtcttcttggcatcagatcaagccctgcattgcaattcagttgcatcacacctgacgtcagtctctcccaacatcacaccaccagtggcttcctgatcacggtatgtcaatgagagcagggcgcccattggcagtcaggtgccaattcaaaaaagaaaggctccaattgatgacaagctgatctggaagcaaggacttctcattcagaaaaatgtttatcgaatgtgccataagaaaacaatgaatttttcaaaatatgcaagagatattatccaaacatattaataaaagcgcataaaagtccattacaatgtaaagtggtatgtgcatggaattatttcagtagtaatagtataaatttatgtatgtacatatataaaataacataaatatgtttatatatataatcaggtacatgaattttaaaaggttaatttggatttttgtctttgaactttttttgttgttaaaaattcttatcaaactattgagattgttggatttgaaaaactttcgtctaattttactaaagaaaatttgacgtggatgaaaatttaacatccgatattggtaaactttgtcaatgctctggaaagggaataacacttatccaaaggtgtaagcatacattatcgttgatgatcatgtcagttttaattcagtgaactgataaatcatgagacttaaactttcaaacatataatcatgattatattccactgtgttgataatactataatcatgaacaaatatatatattctggacttaatagaatttatacattacataataaatcatgtgaaccatacaacataaaatgatttttgatcttttattaattagtaaatgtgattacactgaaatagattttatttaaggtaaaaaacccaacgcttagttcccctcatatcagtaggaaatctatgctcacctacattggatgtatcttctctgaaatttggattcaatgtaacaatcttagcctcaaaggagtgaacgccaatttagagctatgtgtaaggatggtgaattcaaagtttctcgagttttcttcttattcttatattgagacatgttgtggtattttcaatgtatcattaacaagtaatagattcacaaaaagtgaggtcgattccacgaggattgtagttaagtattttaaaattaaattcttaattctgtatttggttaaataaaattaagagagaaaattaaaataagaaaactagcggaagcaggacgcaataaataaataaaggaaattaacaattaataaaaattacggcttcgatttcaattgtatctattgactatggcttaatatgattatcttcttattatcaattt

SEQ ID NO: 35421 - DNA, 2090 bp, Cannabis sativa
  modified_base (838)..(843): a, c, t, g, unknown or other
ctttcaaagatcaatacacagttatatcataaacagaatagaatgaataatactaactaaatattccactttgaagagtgagaaagagagaccaataaaacaaatagtctctcacaaaattaacaaatagacatttcatcaaacacctacaatgcataaatcaaaaaacaaaaacgacaagataaatcaaaagattgagaatttgatgagcccgcttggaccatcactgccctgtaatattactaggctctgaccgcgggcagtcttcactgcaagataagagagcagccattagagttccaaaacgaactaaccaaagaacaaaaacctagagcttctttgggggaatgagagagccgccatcaaccccggaaggagggtggctcgagctcagtcccgccggagaagagaggaaagagccgatggttagggttttattggggagctctcgtatgctaacttctcttgctcagataagatcaagtagtttgggtaaaattagggtttcttccccatttttatacccaaaatttcatgtaattattaatcaaaaaattataacaaaaatgtgaaattaaaaaaaaaatgatagtaaaatattatttaaaatttttacaatacatcttcttgatgtgcggatctatttctatttattttgatatttatttattttgatattcgaaagaattgatattcgaaagaattttttagtttaatttttttatagtcgtatacgtttcataattttaacacattcagacaaatttaacaagccgaaaatagagtttaaatagtctgttgcatgcataactcttttatttttatattgtaaattatnnnnnntttcttaaaattttataaaatattttaaataactattaattacacaactataaaaaaattaaattcaaatccaaagaataatacaatttaatttaatatagtaaacactaaactttccttcaaaataaatagtaattatagtaacactaaccttttctaataaaatacataattatataaatccaagattaacaatagcaaaacatggatttctatttatgtctctaaaaaaccaaatttgaacaatttgccctaccttcaattcattcttttgagcaaaattactccattttttttatgaaattgtaagaattaacagcggcgcacttccaccgtgtgagtaacaaggtttcttcctccaaattaggtccaataactcgtatctcgatgtttttcttacttatcatggctttttctttgaggcttaagaaatcaacagatttaatttgttttaacggcatggaaagacggttgagatgcaaactaatatctgctgcaaataaacctttttggtaaatcaaaaaaggtttctcttcattattatcatttattgttgcgtcatcaataccttgcataattcttatcttctctaagaatgcttgagaaagaggaggtggcggatctggccctttaattatgccggttctttcctcagaattagtattaacataattctcaaccatatcatttggttgtttatgatgtcttattttgttcaattcttggatacatacttgagcaagtatgtctaacttagtagtatttatagaagacttatttgacattataatatataataatttttttcttaattgagatggaataaatgaaatgtaaaataaataagctttatttatagatgatcattttataattatattaggattagtgatacaaattttataatttaaaattgatatacgtttttatcattttttttaatcataatttatatctttttgacatttttaaatttaaacaaaaaaaatagtaattttattttattattcatcatttttttgtgtacggtcaaattactttccgagtaaagaaacatattaaccttttttgggacttaagtgatatataataaatattcggagagataattgatattttgaagagaggttggggtcatctttatataagcaaataaaaaatgagatatttcctaaaaataaaaaataaaatgaaagttttgaaaattattcaaaattaaatacatcttatttattattattattatt

SEQ ID NO: 35422 - DNA, 1640 bp, Cannabis sativa
cataggttttgatatgaaacgagagtattcacatagcttatgtgacttttagattattacttaatgtgaattgtatgttgttctatctcagagatgcaataattggcatgcaatttaggacctttatgatctgagaagactttaggttaatttataatttgtcatcacataggaggaagaagaatggttaattattgttaacaattgggtaatcaaagcaattaaaattacattcctaatttcacatctatttaaatatattgttatttgcatgttttgttatttaatgcttgcttagatagtttagtttcaatttttttttattcgattgtcaaatacaaacaagaattcaattgattagtacttaactacagtcctcatgggaatgatctcacttacctgagtattacttgttaaaacgctacgtatacttgcttgttagatttatcacaacaagtttttggcgctgttgtcgaggactgatttagttaatatcaatatagttaaattctattctaattttatttctttttatttaattttactaatgttttcttgatgtatttgacctgcaaggtaaaatccaaatactataccttgtgaattttgtccaacaacacaatgagccattctattatgcttggggaaaatttaaggagctcggagagatatgttatcttgatttctcaagtgggtgttttactctattcttttacaacaaacttgatgataaaacaaaaagttgggtgaattatggagcagaggtaactggaaagcctttgttaaggagaagtaatgatgtaataaatctgttgaatgatatagcagattttgattacgattggcactgggatccatcacttcagggttggagtcaccaatacactccttattgtccaaactcaccccaaccaattgaagaagaggagaatatactttcacttccagaagagattaatcgcttggcggacatggtaagagctctatgtgataatttaatggcgcatgattcagagtgttttaaggataataactcaaataacgaaagttatgagagttttttgaatatagtagaagcaccgttagatgaatatatagaagagattaagcctataactaaagagaaagaatcctttgaagtagctgaaaatttgggtacattgggtgcttgctcaacaaatgatgatctcaattgggtgaatgaagaaacatccatcctcaattatgaagttattgaagatcaaatcacagtgaaagatgtggatggtcatgaggaaactaaacaaccaattgagaggttatttgaggaaagtgagaaagaggtgtcattagtggctgaagaatcacatgtagttgttgatttgaggtcgtaaacgtcactatattatgaagaaccaatggacccttattttccactaatactgtattcgccatattgtattctctacgagctaccaacagtttattcccaagctcatcatccaaagtctcatgttgttggtgtgaattttggttcaaactcatcgcatgccaagcttgaggttatttttaaaaacaactttcaagttgtcttgcatgctgcttattatgggcgtcaaccacttgttgatgtggcatgtgttagaagttattttaccagg

SEQ ID NO: 35423 - DNA, 1559 bp, Cannabis sativa
  modified_base (530)..(535): a, c, t, g, unknown or other
  modified_base (871)..(874): a, c, t, g, unknown or other
tacgtgatgtgtatggttttttttcttcaatttaaatgtttattaataataaaaataattaatatttacgtctgcatggtttttctttcaatttaaatttttaatttttaagaaattaataaataatattattaacttaataaaaaaatataaaaataggaaaattaatcaacaactatttataaataggtatatatatttaattataatagatatttatgataataataaaaaaggataatatttacgtgatgtgtatggtttttttttttcaatttaaatgtttcttaataataaaaataattaatatttacgtgtgcatggtttttctttcaatttaaatttttaatttttaagaaattaataaaataatattattaacttaataaaaaaatctaaaaataggagaattaatcaacaactatttataaaactaataaaaaattacaatagtgagagaattaaggagagaatagatagacgcttttagagtaattttagagtgacatgtcaccgcctcatacttctcnnnnnnatatatatatagatatatagattggtaatcgattttctataatatttatgagtaatttgcggcataaatacttaagtttaactgtcagttgcaaataaatacctaagtgtaatttttggcggtaataatacttaagttatatttctataactctgtagatacttaactgttaaatgttaagtcattatatccacgtctcattttcttatgggtatatttgaactaattttttttttaaaataataaaaatttaatgacttggaccaatcaaggattgccaagtggtaattaatttaatcaggtaccttacaaaagtttcaaaattataacttaagnnnnattaccgccaaaaattaaactaggtatttatttgcaattgagagttaaacttaggtatgcatgccgtaaattactccatatttattaaagtaaaacaagtaggatccgatattgagttgcaccaataatgatattacatctcataagagtgctaggtatcatgaatatcctctagcatttttcttttaagtttttcttttattatccctcttttcttcgtcttcaattttacctattttagtttcatacttatccaattttgcgggattgagcttttttcttcttcttatatatggatctagggttcttttggatttggatctatctagattttattaagcgtgccttgtgattttcaggtatgggagctgcttatggaaccgccaagagtggtgttggagttgcatcgatggattatgaggtcggagctggtcatgaagttgatcgtgttaagatttataaaacacttaagaaatatataaatcacagatctgaacatattcctaaaagtgttttaatattgaaaacagtaaatcataaatgcctttgctaaattaaagaagaagatgataaaaagatgagcggaagctgttaggctatttttagcgtaagtttcagatcatattttatagttgtttttcttctttattattatttttgaaatagaattacgcttgtttttttt

SEQ ID NO: 35424 - DNA, 1301 bp, Cannabis sativa
aaaaaaaaaaaaaaagatttctacctctattaattcaaaaagatacaaaaacaacctaaaattgtgcagatttattgaaaacaacacaatcagagaggaatcgaagcttggccaaaaagaacttaaaaattctaatggtactaatatttttagtatttttcttcataattatgttgtttttagtatttttcttcacagttatattataatttaatatatgtcaatcagatcagtcataattcataaggtaaattggttcatttgaaaaaattgctatacttagtttgtaatttgttactcgtgtttctggcaagggatacatagattttatgtcagaaccaaaggtccaccagtgggtccaaagaagataatttgggccaagcccaagtcacataagaccttctaggaaggcaccttaactccatgaccagatgagagcttctgctaatgaaaatccgctcgaaagcagctctagtatcgtgatgtcgaagggccagacagcatattcgttggaagactagtctgatttccctttttatccaagcgcacaggataatgaagtaaatgctcctcaaatctcgacatatcaagctaaatagggaaactacctaaataaagatcaagcaattaatctataattaattgcccacaattataggacactatattaacaactcaatcgtatccaacttgcctagttagcacatcgatcccttcatgggctggccttacgagaattgcccaactttatgtattttcatgtaaactctccattagagaaaaaaaaaaggaaaagtaagtataattctcataacactataaatacccaacaaatccttcaaattaagggttgaattctctagcaatacatgctcagacaaaaatagagaacttatgctcattgtattaccataagcttttctagcttaaatacataataatatcgactcgtggtctaaggctcgttaacatcttaaccatgtaaaaattttgtgtgttgttcttatttctttttttgaattatttatttcttctgtactaatttattataattagttttcaaaaatctcggtaaacgttttggtactttcattgagagctaaaagaagcagtgataccttccaaaaattacactcattaatcatggtactcactcgaaacaagtttggccttcactttactaatcctaatgccaaggcaggagatacaaaagatcaaaatgaggcgaccagccatcacaaggatcaacttggcaaagacacagatctggacgctcgtgtagttgaagatgatgaattagg

SEQ ID NO: 35425 - DNA, 1251 bp, Cannabis sativa
gcggcattctccttcttgaacgacacattttctctttccactgcttgagtgcgctctaagttttctttcatttgagccgtgagagtggcaagttgttcacgaaagatggtatgtttctcattgatctctccttcctccatgtgctctaccatttctctggtgtgggttgactgaatgataaaggtcaaaatactttgctcgattacaacttgtcagggccccacggagggcggcaaattgtagatgctaaaatccacaatcaatcgaagatgctcgtacacgggcaccgacaacctgtagaacaaagaagagagtaatcgggaaaccttgggataccaagatcgtgcaagccgaagggactctgacgattaagtcagcaagattgttaacaatgtaataaaaaagatcatagtaaatgattgaactaagttaccacctatcttgactgtggaaataagtttgtagtttttgagataatgagagagtgaacaataagtaagaagtattgagatgactgaaaattgatttgtctctctcagtagttgagagtgactcttataggcatccatggaaaggcgttactcatgaccgctcacccccttgtgaagcgttcctctcccacttaatcaaggagatcgttatttgcgttgttagtttgactgatcactttagagatctttagatgagtgataagactcagtctcgtatacgggccggatcatcgtgacctcaatgttggatcattgataatgttaatgtctaacttgactgtatggttttgggcctgcttggcttggtatgttgattgtatcgtcataactagtcaaatagtccaacccaatcttgtttgagcattcttaggaaacatcgcatgtgacttgagcctgagcctaattttggcctctacaggtagtaacgaattactttcttatttttattttttcttttcttttttatttaattaatgggagaaaaatagttcttcctttagcgataaaaggaaggctatagaagaactttctacatctcagttttcagtcttagaaaactctgaaaagctctctccctttctctaagtcgtcgtccataattctctcttccctctatatattttgtaagttatatagtgttgtaacactttcccacatagttatattataacacctagatcattgaagaagactttgtagaattggtgcttcgatttgggttctatgcagattcggaatcaatgattgataataatttacg

SEQ ID NO: 35426 - DNA, 1752 bp, Cannabis sativa
aaatacctaaaaccgtaaaccctaaatcctaaaacctaaaaaaaccctaaaccatattcccaatagactaaacccaaaaagctaaattctaaacactaaaccctaaacaatataccataagctctaatcctctaaaccctaaactcaaaaccctaaaccctaacaccctacaccctataccctaaaccctcaactaaaaaccctaaaccgtaaacgctaaatcctaaaccctaaacccaaccccaaaccattaaccgtaaacccttaaccctaaaccgttagccctaaccctatccctaaaccctataccctaaaccctaaaccctaaatcatcctctctaaacactgaacggtaataaactctaaacctaaaccctaaacccaaaactcttacccctatatcctgaagcctaaacccttaaccataaaccctaaactctatgtcataaacactaaacactaaacccttaaccctaaaccaataaagcttaaaccctaaacccaaaatactaaacactaaaccctataccctaaaccgtaaaccgtaaaccgtaaatcctaaaacctaaaaaaaccctaaacccaataccctatacgctaaaccgaaaaacctaaattctaaaccctaaaccctaaataatataccataaactctaatcatctaaacccgaaactcaaaaccctaaaccctaaacactaaaaccctaaactctatgccctaaaccttaaacactcaactaaaaaccctaaacactaaacctcaaaccctaaacctaaccccaaaccataaaccctaaacccttaaacctaaactttcagccctaaccttatctcctaaacactatacccgaaaccctaaaccgtaaaccatcctcactaaaccctaaaccataatatactctaaacctaaaccttgaactctataccctaaaccaaaaaccatataccctaaactgtaaccctaaagccctaaaccctaaaccacacaccctaaaaaaaccctaaatcgtaaaccctaattgcaaaacctaaaacctaaaccccaaaccctaagccctaacactaattccttaatgctaaaccctaaagccaaacaaaaaccctaaacccgaaaacctaaaaactaaacctctaaaccctatactctaaacccaaaacataaaaccaaaggctcaaagcactaaaccctaaaacctaaaccacaaacccgaaacctaaaccctaagtcctaagcgctaaaccccataccctaaaccctaaaccgtaaacaatataccataaattctaatcctctaaaccctaaactcaaaatgctaaacactaaaatcctaaaccatataccctagccctaaagcctcaactaaaaaccctaaaccctaaaccctaaaaccaaccccaaacaataaaacctaaaccctcagccctaaccctatcccctaaaccgtaaaccgtaaatcatcctcactaaaccctaaacctaaaccttaaactctatactctaaaccctataccctaaactgtaaaacctaagccttgaatcccgaaccccgaacctaaaccctaaaccaataaaccctatacccaaaacactaaaccctaaaccctaagcactgaacccctaaaccttatacccaaaacacttaaccctaacccctaatccctaatccctaaaccataaaccctaaaccctaaaccccaaacccaaaactcttaatctttaacccttaaacactataccatatacccaaaacc

SEQ ID NO: 35427 - DNA, 993 bp, Cannabis sativa
tatatatatatttatacataatattttgataaattaataaataataagaactatttcaaattttcagtactttgtatattatgcatggtagtggtgtacccttcttttcttcttaactaattttgacaaacataaattattttaccaaaaatatttgggaagatttagctcatacacttttgaactattttattaccattgtattatttcaacaataaggtacaattagttaaatttattctaagagaaaactaaacaatatcagctcttgtgtgtaaattgagtaaaaaaaaatacaaaaatagttctgagagaaacataaaaggtactataaaatgatatatataaatatttatctatatacataataaaagaagtaaaggtaggtaggttttaatttggtgatagtgtaaaattttatatgtattaatatgtatgtgacaggtttttgggagttgaagaattgattcccatactcagttatcttcatcctggagaactctcctatgctaaatattatgctggttacttaatgaaggaggtaagaataacttatgccattgaaatatttttaggttggccattttctactttaacaatataattgtatcaacattttttctttttcatgtattatatgtagtcatattaaatatcatgtcagtttcgaaaatttttaaacaatttacggtgtaaaaaataaaatttaaatatttttttttgaaatgaaatatcaatttcattgaattaaaagcattctgaatacaagagagcattcaaatcaggctagacattatatttaaaaatgctacaactagaggaaattcgagcatgcctagcaatagcatgagcaactcgatttactgatcgtttaataaaatgtaacttaatatcaattagagacaacaatagctcatgacagtctttagtgattaaaccaaaggtggagaacatattttggtcacttcgaatagcctgaacaacaaggaggct

SEQ ID NO: 35428 - DNA, 2017 bp, Cannabis sativa
aacccccctgttttgtatattttttttttgaatcttataggtttccaaagcactacaccaaagagaagttattagtgaccaaattagtaatagaagttaaattaatgaaaaaaatgaattggcatattctaatttcattctgaattggcatattctttgggtcaacgaatgtcactgactgagtagcaggctgaatgattatcaccgtccaatattcactacacataattaaaaagtatagtcaactccataataattatatatttacatatattaaaacaaaaatttacctacagtggatttcagggacaaatcaaccattaatcgggttgtatttctatcaatatctcagtgagattatgtgtacgttgcttaggatctttacaagctattgaggatactcaagcaggatttaaaaagacatatgtattgttcaacccactaatattaagtgaatgctcctgcaaataactaaatcacaatattttataaatataaatctacaaatataattattaacttaaatgttaaccactatacctgcaccaaatagtcataacattagttctgacccatcccaactcgcacacatccaagacatctttatctatccgacactcatggtcaagtccaaacaagtcaggtttaagctcatattgtactattttcttcttatgccatttctgcacaatcccgaaaacctcgtcatcaataatgtcttttcaggcgaagtgtaacgtgattcatgaaatgtcactggcctctttgggtgtatcaacgactaagtaggtggagctagagaatcttgggtagctttcatctttcctttcccctacaacaaaaataactttaattaaaaaaatctaaaattttcaacattaagtttaattaaagttacataaattacctggactaaacgagctggaggtatttttattagtttctttggccaaaagacgaaatgttgcacagctaaacacgcttggtagaagccttcctgctttagaggacatggcatactggcattttcgttaataaccttttctacgaagacatgtttaaagtcacagtacttcttcttttctccatgtactgtgatttcacctttgtcattcgttttttcaaatttgacatacccaaatgcaactaagccgtccccttcaatgttgggatcaatcacatgcaaactgcacttttttgtgttcatttgtaaaccataaaatacacaaacttgtattacaatataaaattaagcaagttcactgaatagaattataattattttaaaaatgcaagtgaaaaataccttatctgaagtatctgaagatggtgctggtggagcagatgctctaacgattgttggtggtcgtggaggagaatagtccttggtagaaggtgctggaacagaggtagtatcaacacgaggtaactcaacacctagtgtagaggccctggtagcagaagctggttcgttggatgctcttccaacacctgaaccagatgtatgtgaggtgtcagcaacaccgctttgttggccttgtactacttggaggagttgttttaataattcgacagtctgcctacccctttccgtaactcatcctacattgtaaataatagttagtaagaatttgaacaacataaaattatttagttagaatttgaacaatataaatggtaaatgtaacttacaatccttttagcaacttcctgagcagggccattaagctcgcccttcttgttagtgtgtaatttgttccacaagtcacatctgtcgtatgtagtaagttggtggcccaactctctttccatatcttcttccactttcttaacaccacctcgcccccgtggtggttatattgatttttggccctaactccttgcatttttgctctcaattttttttccattcaggagttaatcttgaagcaacaaatgctttccaatcttcaggtttgtagcaaccggaaaaattatctagaggattgtcgatcatttcaggagctttgtctttgta

SEQ ID NO: 35429 - DNA, 1062 bp, Cannabis sativa
caaatttcaataacaaacaaaattcgatatttgaagataatataacatacgagaattcgattgttactataatatattcgtataaacataaacatgccaaagttatgcagttggtacatttgtttaacaaaacatacaaaaagtgttacctctcattagccatacacatcatttacttttactttttcttgtcttctatttttagatttatttggtaatacttttatttttttaattttttaattacaaaaataaaaataaatttgtatttttaaaaaataaaaatgtgttaactatttttattttttttattttattcaagtcgggttcgtgttccgagttcgaggttgagactggactctaagttggtgtcgaagtctaaaatattgattaagaaaaaaaaaaacactgttaaaattttaattttcaattaaaaaattaaaaagcgaaaattatataacatgattttagaaaatatttttacttttttaatttaaaaaacaaaaaactaattaaaaaaatattactaaataaactctttattttttttttgttaaaaaaatcatattttatttatttatttttgtaacgataatatttatttattgaatcaaaagagcttcataaaactagataccagccattagattggtcatcagaaaaaaaaaaaaaattacctctcaaaagttcagaagatgaaaaatattactctttgatgcccaagtaggaagggggtgagcacttttatctttattaaacactctactaacccaaaaagtagtgttatgtgcacctaaaatatacatccaaaattcacacagcaatgtgacaatttttttttttttaattttctaaaattaacttattgtgtcacatgctcttttggtagattttgtagtaatgagggatgagacttgagagagacagaagagagaacagaaagttttgagaagaaaaaaatatgaaaatggtatttttagaacaatgagaaagattaatataaatttgtaatgtgacaagttggagtatttttttgaattatgaaacatcatgaagcataca

SEQ ID NO: 35430 - DNA, 992 bp, Cannabis sativa
aaatcccctatatcaaagcaatcaacaactttccttgggtttcttactaccactgtcgacgttcatgtcggacccactaccgtcgatgggattccaatgccgagaccagacgttctcaaagatttggttttaatttcacagtgaaaagagatgaatatgaaaacgaagacaaagaaggagaagattacgaggaatgattctacaacggaaggaagaggcagtggtggtctgattatgagtcgttggagatggaggaaggtcctgaaattttaaaggaagccattgatgctctatggattctgaaggtttgaaatttatgctttttgtgtgggtttatagattttgaataccttattttgagttgggtatgttgaattttttggttttaagctgaattatgttgatttttcttgaattgaattttttggttgtaatgtttgatgaagaaaattttctatttttagtcttttgtaaccttgctttgatcaatacaatgtgatctttggttggttacactttctttcttatttgacatgtcttatgtaatatccaactgtgaggactagtgatttcttcaactcaaacccattagattggtctacttggtttggtgtttaatcagttagttaaatacaaattataactaacttaactgtacaaagactattctttaagagtcttggttaagttacagccttgtctacctctgttgtattccctttatataacaacaaaccaaaaatttgaagttatgtatgtgctttttgtttggatccaaaaggaaatctggtttggtcggggtgatgggtatgttaaattatagaacttcatgggtgggaatattctgtgtctagtgcagtctcattgtgatgattcattcaatgcaaaacatttatatatattgtgatttaattaattgatggacttagtttttaatttaggtgacgtttggtaacacttttgtttttcaattttttaatcacaaaatgaaa

SEQ ID NO: 35431 - DNA, 1033 bp, Cannabis sativa
ggtttttcgttttagtttttttttgaatctgtgatttggtattttgatttaggttgttgcaataaagagttgcattgtttaaattgaattggttgcattgtactgtaattagggattttgatttagttatttttagaatgtgttagttgatttggttggattttaaatatttggggattggattgagcaatatttggtcgaaaagtctctattgtgaatttgtatatttaaaattttgtttgtcatctatatttgttgctccatttgtagaaacgaatgattaggattttgtttataaaaatagttaataattattaaggttaagaaatttaaaaatctgttttgaaaaaggttcatacacaacagtgattcatactttatgcttccgttttcaagtgtcatatttttgtggaagattaatttatgaatttgttggtgagtgagattcacatcatctaacttggttgtgatctttgtttctttgattacatagattattagttgaagtatgccattttagtaggttaattaatagcttttagtaatgtatgaaatgggtataaactaaggacaaacgaaattaagtgaaaaatttgtttgacaaattatatgttattagcaatgtcgattttaaaaatattattttaactacactgttaggttagtaaaagaaaaaagatttgcttgattaagtgtaatttttatgaggttgaaaaattgaattatttatttaagatagttttataaaaagctgcacacaaattgacaacaatttgttgccgcatttgttgattcagtttaatttttatgaatgtgtttgctgcatttggttgcatttatagtaaaaggtggtgtacctttttgaaagtagtaaagaacaaacatgcatgagacactaaagggaagagttcatacaattttaaatttcaattaggttgtcctgcttagtcacaattagaaatggtcatgattagcctgaatattacaatcatgtcttgaacatatatgttgaagatcatgtggaattgggtat

SEQ ID NO: 35432 - DNA, 1628 bp, Cannabis sativa
taaatctaaggagacgttcatcaaattctataggcctacaccgagaataatcttgagcgtaaggaacatgatggaccgttaagggagacttaccggatccgaatgtgttggcatcaggagccctagtattgggaaccgggagcagcagcttaggccgagaaggcgcccgttctttccccacttctatccggagggtcctcccagcagaagcttgtgccttgatataggctaactcttgttccctcctaaaaaggtacttctagtactggtcctccgctgaggcaatgatgtccgctcggagtgccttttcagcatccggggtgcgaatattggggcaaaggaccttagaaaggtcgacatcatccacagactggctctctgtgatgagcttggccttccggcagttcaccgttgtgaccaagtctcccatgttaaggccatttttgtcgtaagtggagaagaccttagcgtgctgcaggaaaagctgggtaggagcattgcgatacattggagggatcctggctcactccgtgatagttctgggcagtccacagcttgaaagccagaagagaagaagaagcggtggcggtactccttaacatttttgtgaaaattataagggaccgtaccctcgttggaaggatggccccgaggggtgaaaaaacagtctttaaacttatcccccttcttggggacagaaacaagttcataaaaatacaaaatctcaaccgggctaggtgaagcccagcctcgggctacataaaaaataaaaaggccttaaagcaggcggtaagcttgaggaatgagtttgtaaggcgcgaggccaacaaaaactagaaaattaataaaacagtcttgactagggagcatggctcctgacatgaggtgggtctggctccaagctccaaagcctccatagttatgattgggcgtctcatcgtcctgaggtaaatggtgaaaaactctagaggcggatggcttgatgccagctacagtcacaactttctctaactgatgggcgcaagtcagagtggagcgaagctcatccacctcacaaccattggaccgacaggtgtagttcccctaggcgaccagacccttcatcacttcctataaggtggccatagtgaccatccccttgcaggaagatttggctccggatgcagaagttgacatttggctctgtaaaaagaaaaaatcaagtagttagccccaaaaccaaaccctagtattaaaagagggaatgggggtcccctaaccgctggaaagagggcccctccggatatttgccaaagatggaaacccaaaggattttccttagcaaacatcggctgcaaaattctcaaaagcagcgaaggcagagggaaagtgaaaaacgtagaaacgtggagacaaaaaatcgccccatatctcaaataatctttcgacagaggggtcgatggcgaaatagaaggaagagaaataacaaaacacaaataaaggagagcctctacaccacgtaacagacttagccacagttatttcccagatatcaaacacttagccaaaatgtttttgccctggcgtgtaagtaaacagtaaagacataaagtgttcagaaaacatacatgaaggttgagaactgggag

SEQ ID NO: 35433 - DNA, 2359 bp, Cannabis sativa
  modified_base (577)..(578): a, c, t, g, unknown or other
ttattatatatatgtgtatttttatattaaagaaaaattatttacaaaaaaaagcctatatataatttgtaaactacttaattattaaagatatacaaccatttatctatgaatgataaattatttaattttatatattaaataaaaatttaaaaattgttaggtaatacataaatcaatatccttaaaaaaatatttattggacatgaaagtaacagaataaaaatgttatttataacctaaattttgtaatagtttatttctaaacaaaatataaaaaatattacaaaattttaaaaatacaatgaaaaaaatttaaggtaccatccagactcttttgcgttttttttttttttttatatatatttatctatagatatagattttctatattaaataaaaatttaaaatttattggataaaacataaatcaataaagaaaaatatttatgggacatggaaagttgcataacaaaagtgttatttatagcctacatggaatcatcttaggtgtttctaaacaatgtgggactttacgtggatatgtgtagtagtttatttcttaacaaaatatgannatgtcacaaaattttaaaaatacaataaaaaaaaataagatgctacttagattcctttgtgcttttatatatagattaaaagacaatacaaataagtgtattagttaaaggttaaagctatagacaaattactacaaattgcacattgtcatatttttcaattttactttctattatgcaactacaataaaaaaatagtattattaaaatttaacaatcatgcaatatttttgagaagcccaaagcccaataccaaaatgcaacaaccaaaggaagaattcctctcttgacttgaagagcattgtccaaagactaaaatttaaaactgacaaattgaaccaatcaatgtttcaggccaataaataagatgagcccataaaaactaattatataatatatataaatcaaatgaataagataaatattattattataacaaaatatattcattatactgcatctaaaacaacaaattcattattgcgtatctttaatatattgttttaaacctactattaataacattaatgcatataagacttcaatataaatgtattttaatataataaaattaaattcataaaagataaaaatatacagaaatttgtataaaatacattttgtcgtatttttgaattttaatttgtgttatgtatgtacaacaaaaaaatagtaaaagcaaagactagtctaataagtaaaattgagcccaataaaagaagagagaattcttaaattaaaaccctaatataaaaaataatttcccttctaactctaacatctcttatggtagtcacaattttttctgaaataattaaaaaatttcaaactcttcttctcctctcttctcacaacaggacctattattttctaggactaagaaaattttctttctaattcttcttcatacaggcgcacaagaagattgtaattgtatatggtttctatgaagggtcgatggtggtgatggtggtgtcgttagtgttcggtggtgggttcaatgagctgtaatggagatagtattggggttaatggtgatgttgttgtgacgtatagttaatgcttcgtcttatataatttttatataatttttttaaaaatgtataatattactttctcaattttgtgataatatagtaaaatttctcttcatattatacataatcatgatataaaattaactcacctttgtattgtttgccttccataaaattatcacttctgtgttgttgatattaatttgttttaaactattgtgtatgttattaacttttatatttaaattctttataaattgaatggttgtggcatttagaattgttgtaatgtttggaattattcatactaatgagaagatataacttttggtgatttattactttttttattgcaacttttggcaaattattattatttttgtttttttttatttgtcttactttttgattaattgcaatgtttagatctatttgggtaggttgattttttagctttcattattgagaaaaatttaagtgatatatttaccaattagctttagagcttaaatatgaataccattgcaggcgaggtatgttgacattgatttttgctaaaaaagtgaaatatatattaagtgcttaatttgttattttttatctgtaactatatgcaccgaatcatgaatcatatttgtttattttttattttttatttgttggttataaattaagtaagaaatttatcttatttataaaatgtattttatagcccttgacaattaatgaattttgcagatttaa

SEQ ID NO: 35434 - DNA, 1818 bp, Cannabis sativa
aaaaatttcattgtagaagggtgaataatattagcaaggacccatttctctttatacttcagccaatatacactactaaattaaataagacacgtttagcaataaataaagggtaaatattattttggatcctgtattttataaaagttatcaattagaccttctgttttgttaaatgataaaatgaatcttatattttttaaaattgtacaaataggaccccgaactaattttttatcaaaataaaatttaataataatctgatcaagagatgttatgacaaaactggttagattttctgtatctgtccatgttaaaaattgtgttaaagttagttatattaaaataataaaatttttaaaaattgagatcagggtcttatttttaccattttggaaaatgtagaatccattttggcatttaacaaaatagaagatctgattagtaacttttgcaaacacaaaattcaaaataatatttacccataaataaatacaaatttaaacaaaacaagagcgccttgtgtagaatgagctttattaatctagtagggcttgggaattgcctcagctgctcatagttttgggccggctcttatagtatataaatattggttatattatacattataatatgaagatagtgaattagtgtaatctatgagtactttttttttttttttttagtattttgagtatataaataagtaataactttatattttaacatgatgtgtattgtgtgaaaaaaaataaacaactataccttattatggattaaacgtattagaatgactaccaatatacctttatatatatatttatataatattttctaattaggagtgacactctcatactgattgcagcctctgattaggagttgtggtgtgcccccttctgttgtgtcgccgtcgttaatgatctcacagcattgtctacgtggtgcctgcttttccatcagcatttcaaagtttccaactatgttagcaattgttgactcttttaacctacacggcaaaatattattcctcctagctagatttcgtaaaatgccaaacccaaattattatcatattcattcacgccttaatttctctcaatctaccactagtttcgcctacattgatcttttcactaggacaaaaaatatgcatagctactctcataatctaagtaaaaatacaaattaaaaagataataacaataagcgcctattacttaattttctgctaaacgttttacatataaaaagcgcgtacaattaaaccattcattaaagtgtgagttcaaaacattgctatgcaatatttgggtgtttaacattactatgaccccacataattatttaacggttttttataatttttaataaagtaaaatacataaaattcgatattaaattgtattaataaagatattataatttataaagagggttaggtattataaataccttttaacatttcacttaatctaaagagcatactataaggcatcaatacttctcataattaaaacactaatataaacaaccacaaattattgtactcaaaaaagaaaaataacaacctttataactgtatataggtaaacagaattccacattaattaacacgtttgatctttaaatgagaatttaaaggcacttaattattaagaattaatacaaacaagtcattaacaacggtgcctaaacgatacgtgtaagtatagaataggatgtctcaacaataaactatatctttcataaaaaaaaaagaaaaaacgataaactacagatgcaaattcaaatcgtcataaatgtaaagcattaaat

SEQ ID NO: 35435 - DNA, 1797 bp, Cannabis sativa
aaaaaaaaaaaaaccccttaaatttattcaggtttggttctagccatggacaatttaggcctatatctagagtccatctaatttagagactaaaaaaaattattcttcttttaaaattatatatttttttattaattttaaataatacaatatatatttttttaataaggatccaaaagtattttttttttctcactaaatttcatagccaaccttatatttattgtgataagtacacagattataaaagcaaacattaagttgacacaaagatattttgatttttcaccaaaaaaaaaagtgagaaaagtttgacacaaaagagacaaacctaacaatttatatgataatgtattttaataataattaaggtaggcgccaatctatgagttaattaagccacacccatctaatctaatactcatgttaggttcattacttcacccaacttaagatatgatttatatatatatatatatatgttatttatatatatttattacatggagaggagttgaaaatttatatttaaataaaatttaattgaaatatatatttttttattagtattgtacttaaattattctcacataattaagacacaattttgaacataagatattgtattctttggagatgaatgtatagatttgtgggaaagttatggcaaaattttagtttgaaaagaatgaaaattatcgtgaaatgatagagataaaatttggtgcaaatgattaaaaaaaaaaaggtaaacataataaattttgaaagagatgataaaaattaaaagcatcaataatatgacaaacctaagcgcataaaaaaactcaaaaaaaaaaaaataaataaaagccataaaattggacaaagttgaatctatatcatatctctatataacaatacttatattttcacgtcaaaaaaagaaacaatacttatattttaataaaaaatatatataatttataaatttattaatgtagaattaataattttattatagtgttaaggattgtattagtgttgttgttacattaatattcttttagtgtagctttatttagttattataattttataatcagaatatagtttatttagtctcggataaatatttttgtatttatatgaaaacatatatgaatacaacaaacacaaacacttaaaataatactcaaatagcaggctttcaatctacatttagtaatatatataatgtggtcaattgattaatctaacttgtatttgtttttgtttatatagaagagaatctctacaaaaagagctatagagtactactgtacggaactttagccttataaataacctgtttctagccttttaatttcaaaatattgtaacaaagatagcatacatatacatagatattgctactatcaaatgcatatgtataatgtattataatttatatgtactattgattaatataattgagaactataaacacatatatgttggagttataattttttttatataacaaaataaatattagaatttgtggataagatggatgaggttttatctcaaaattaattggaatgggaggagtagcccattcctcttatatattttattatctttccacacattagcaatgtgggactttctaacatcctcctcttggacaactcgattataagcaacttttttttttggctcactatcttctgatcacaagtggctcttttgttctacttttcggatcagtatttttagttttttggtggctctttttttttttttttattatttttggttcactatccccgaatc

SEQ ID NO: 35436 - DNA, 2741 bp, Cannabis sativa
tggtaaaatatttccaacaacagctacaaggtttcaacggtgacaccttaatgcccatggtaaagtctaactgctagtcaccctcaagggagatagcaaagcgagtgcattcaaacacttgacctttgtagtggtggactgtccaacaacttataatgccatactcggtccaccgaccctagtagacttcagtgcagtgacttccattcggcatttgtgtatgaagttcccatgtgacaataggtgcatcggtataatcaaaggtgactagtggagtgcaaggaattgctacaatgtgtccacccgaactgtgttcacggtttaggaagaagcacccatagatccctgaatagaagacctgatgaatacagaaataatctgggaagagtgtgtggacgagttagatcctagaatttgaattgaaagaaatttgtaactaatcgaggaagtagaagaagtaagtatcagtgaggaagatcccactaggattatcagagtgggaaagaatctccctccagctgtaagagaggatgttattaacacgatcaagaaaaattaggatgtgcttgcctggagtcattctgacatgatcgagattgattggaataccatttgtcatgctttgaatattcattaggatgtaaccccagtttgcaaaaaagaagaccttttgatcccgtcagagccgatgtagtaaaggtagaagtcgataagctaactaccaatgatttcctctaggaatcattgtacctagtttggcttgcaaatcatgtgttggtctcgaagcctaatggtacatggaggatgtgtatagaatttacggacctaaacacggaatgcttgaaagatcgtttcccgacccagcagatcgatcagacagtaaatgccacgtttgggtacaagttgctcaccttcatggatgcctattctgggtataactagatcaaaatgcatatcacagattaggagcatactagtttctagactgataagggtatatactgctataaggtgatgttgtttggattcaagaatgtaggggccacgtattaacgaatggtaaatcgactgttcagttggggaggaacatggaggtatatgtgcatgacatgctagtgaagtctaaaacctctgaagagcatggctatgacctggaagaggccttttcggtgataagaaaatacgagatgaaatttaatcctaaaaggtgcaccttcagggtctcctccgagaagttcctaagatatattatcaattcctgaggaattgaagacaatctagagaaaattaaggccttcatcaacataccttctcctaaaaatcataaaggcgtccaaaggatcactagacatatcactgctcttagccgcttcatttcaaaatctaccgacaagtgtattccatttcttaatgtactgtgagtcaacaaaaagtttgtgtggactgaagagtgtgaggacacttttcagaagttaaaggagcatctgactaaggctcttattttatcaaagcctgtggagggggaatatttgttcttgtacttggcagtgtcagatcatgctatcagcgttgcactcgtgtgagaggaggataaagtctagtatccgatgtattatatgagcaaaagattgttgggtacagaatccagatatccaatgattgaaaagttaaccttttgcttattgattgcctcgcgcaagctgagaccatacttccaagctcattacataagagtactcataaatcatcccctacaccagctgctttaaaagccagagtcatttagcagattattaaagtgggctatcgagcttagccaattggacatttattaccagtcacggtgtcgataaagggacaagctcttggtgacttcatttagagtgtactagcttcaatgatcctctagaagaaccaatccctgagttacccacttggagagtctatgtggatggtgcatccaacaaaaaaggcgtcggggctggggtgatcttaatctatccacaaggacaccagcttcaaagtgctttgcatttcaaatttcgttcatcaaacaatgaagcagaacattaggccatgttagcaggactaaagttagcaaaagaggtaggggcccaataggtggatatttacagtgattcccaattggtggtgaatcaaatttctggcaaatttcaaacgaaaggggaacagatggccgcttatgtcttgatgtcgcacaagttattgcagggattcaagacttacaatattcgacagattttgagagagcaaaactcattcgccaacatgttggctaagttggccataaatccttaggtcatcaaacaagaagtagtccctgctggccattttaagaagtccagtatcaaagtccaaggggtatatgccatactagataactcccactcttggatggcacctatttataaattcctgagtacgggagagcttcccacagatagggctgcttctaggaagattcaatatcaagctccccactatgtgatcatggatgggaagttgtatcacagggggttgttgacgccctatctcaggtgcattgttaggaaggaaattagttcagtagttcaccaggtccacgaagggttctgtggagatcacacttattgtaatgccctaaataattaggcacgctacccaagtcacttatcaaactctaatcccctaaacgagattaataataaaattggcgtggaattttaactttaataacaaaa

SEQ ID NO: 35437 - DNA, 1783 bp, Cannabis sativa
ctctggccaccctatggccggccaacatacatcctgcaggtgcatggctggccagcctttggcctgacaagattttggtgcacaacttcatacgtggacagcaagccagaccacgaattgggccttaacaatccatgaaaatataaggaaaatatctatatttaaggggcattttagtcatttatattttattaatttaatatgtaacgaatagcttattttacccatttctatggaatttgaaaggtgtgagctctcctatataaagagccttaattaaacctaaaaccctaggctctaagttttaagtctgaggtgattaattctgaaaccttagctctaagtctgataactcatctctctctctctctctctcacacgcccactgctatactcatacttgagatttgtcaactctaattcttacattgtaacattaagagagctactttagatcccatcactatagtcatctaagtagtattatctctctgtatcaatacaactaaaaggggagtaggtcattattacctgctatataacaaagggggtcaaacccctataaatcatgtgatcatttactttattattctaattgtgtaacacgtggtaagcatcagtattacattcgactccgctgtcgattggccaaatctgaggtctacaattatcattgtccctttaccagttttgtactcgtatccctcatcatctaaagtacctaatgagatcaaatttctcttcaaatctataatgtttcccaccttagaaagattcctgattatgccatcatagcttctaatggcaatcgtaccaatgccaacaactggtatttgttgtcatttctcatcatgacacttccaccatcaatccttgagtaatcaatgaaccagtccatagttcgactcatgtggtaagtacaaccattgtcaagaatctatttatcttcatccttatgatctgaactagtgcgggcatctccagggcttgaagttgcatcttgaaccttaattactatgaacacatttcatcacaactgtagttgtcattcaccacaagattggaatcattgcccttgtcttcttcttccttattcttctttttcttgtctcttaattctcaacaatttctaattagatgacctactttgctataatggtgacactttctggtctcccttgaccttgatttggatcttgaattgtatcttgatcttgaaatacctttgctatgttgtcttcctcgatccattaaagcttcatcaaatcatgattcttgcataggtgccttttgccaattcaattcagcatactttgatctcagagtactcattacatcttccaaagtgagagtgtccctgctatacattataacagttcttatttctttaaatttgttaggcaaaccattaagaacaatcacaacttgatcttcttctttaatggtttcccctatatttgtaagggccaataattctatgctaatcatctaaattctattttaaagaaacagtaacattcatcttaaaaccataaaacttttcttttaagaagatctttgtagcaaaggacttggccatgtagaattgatcgagcttgctctaaattcccagatcagtcttctctccaatcacttgtctcaacacattatttgcaagattcattatgattgcaaatcttgcttgtttctgttgggttttatgccctaaataaaattctatttcaatgtaatccaaattatccatatcaataaagtaacagaagtatctttcattcatttgtgt

SEQ ID NO: 35438 - DNA, 2421 bp, Cannabis sativa
tcagccgttaaatcaaataactccttcatctgacggctgctgtgcatcacggattacaatccgtaaaaatacaataacaggacaaaattatatccccacatatataatcctttgaatatgaaaaacaatttgtaccttcggtcttgaaattataaatacaatattaataagggtaaataataaatactattttagaccctgtgttttataaaagctattgattggactatgtgctttgttaaatgataaaatagaccttgtatttttcaaaatagtaaaaataggacccagaccttaatttttgacaacttttttttaatataaccaacttgaagataattcctaatatgaacagatacagaaaacacaaacaggtttatgataataattttagatcgacttataattaaattttatttttataaaaaattaattcagggtcctatttgtaccattttagaaaatggagtgtccattttgtcatttaacaaaacagaatgtccaattaataacttttacaaaaccaatgtttatttatcctattaataacataaaattctataaagatatcaatagaacaattcaatcatacatacgaagcacaaatataccttttagtaaccgaaagaaaaaatgaatgagaaaatcaaaacataattcgagtatatcccataatctaccaacaacaattatataattaagattaatgaaaaaaaatacacaatataaatcaaaattatgtgtttaaatacaaaatttaataattacaactaatatgattaaccctaataattcaatataagttagactctgatatcttgttagaaattaaatttagatatacatatggatctcaaattatcaatgttactctatgaattaataaaataaaaacaatacctgattctttcacagactaatcttctctttatgagttttctttcaattgatgggaatagaaaagaagagtggtgaagattagtcttggagatcaaatcttaatattctttagggttaattgtggcataactcctaatactttcactttgcttgcacttaacccccaaaactcaaattttggcggtaaaacctcctaaaattaggaaactgttagcaatttacagttttcatctattttaggtgttaagtgtcatgttagattgtccatgtgtacatttacgtggacataatgtacacatgacacaattttattagtacacgtaaaaaattatttaaaattaaaaaaaaaaaaaattgaaattaaaaattttgtatataaaaaaatatatatagttattgataattttaaattaaaaaaataaattaaagagattatatgttattttttattaaaaaaaaataaatggaatgaatttgggaaaaataattatttttgccaaaaatttattttaaatgagaaattattttattattctaaattgatactaaaaaatattttgggtcctaaaatgtgaattgacattttatttttacatcagaaatttagtttaataaaataaaaaagaaaaaaaaaagtatgaaatgaaaattagaaaaccctaatttgaaaaccctaactcatctctttctccctctcttctacctacgacagccagaccagagacaagcctttgccggtgccagtggtccaaaggtaccacacctccaatcttgcagcccttagaaaaaacctaaaactctgatatctctctctctcccccttctctctttctctccgtctctctcggttttctcattagagctaccctcatccagcgaaggcctaaatggaggtcgtggctgacttccacgaggcacgaaatcccaggaactcgtgttccccgatccctctctcgctcttgtaccatttctctctcatcgcgtcaagctcggtccaacgccagagggtgactccgaccatccatagaaaatttggaagccatgaatggcttcaccatcacctggaggcattaaccccgtgatcccgagccgtatgcccctggggattttctaggcctgaggacagtgatgcgtggtcctctcgggggcgtgggtgatcgaagcacagtggtcctgtcgttctagtggctcccgcacaagcgcagagagaagagagagagggtgggtgtcgagtgaggaagaaagagaaaaggaattagggtttttatcattttgaatttatatccttcaaactaaatttatttttaaattttattattttttagttttttttttgtaaatatttatttttttttaaaaaaaaatttattacgtggattaataaaattgtgtcttgtgtacaccgtgtctatatagatatatacatagacaatctaacatgacacttaatacttaaaatggatagaaactgtaaattgataacaattttctaattttgagaattttactgccaaaatttaa

SEQ ID NO: 35439 - DNA, 2754 bp, Cannabis sativa
  modified_base (2723)..(2728): a, c, t, g, unknown or other
actccttggatcgtcacctttctttaaccgatggaacacaagaggaattctattaaatgtccatggactaccatccaccacagtctgaacatcaatctcatggtaaaattggaaaatatatctattagtatccaattctttaatatacacacctttaccggattgccaaagtgaagccatcatatgtctcatggcatcgaaatctattgttcgacccgttaaaaacttgcccaccaagcaccacctatcatcaaaaaccagttgatcctcatcatcatcccccgtaatcagtaccccaccctcctcctcctcctccaaattcagttgagcatattgatcctccagagactcatttggaacactgctggaagccatgccaaaaagaaccaaaaaaacattacgactggaaatacaatcacaagaaaatcaaactttccaacatgtcaaaagacaagacaaagataatccatatattttttttcatttgtttaacatgtaaattatctttagacaactaaaagcctaaaagtctctccgtagtatttttgtaataaagaaattttatgaatattatttttgtaattagtaaatagtataaatatttatttttattaaaatgatataaatatttatttagtgtaattttaacctaaaatagaaaaaatcattttctttggaaatcatcaagactaattacatatgaatatatagctttccttttatttatttattttggaaagatacgtggccgaactttacgccacataaacaatatatatatatatatatatatacattctataatggtttatatataaacaaatctttggaaatgaataatgtgatcgttgatcaatgatttgcgtatgtatatatataaagttgttattccaatcatgcatggactcaatccaagaacatataacttaagggaccaccattaaccatattttggtgggtctactgagctagtttcggctgtcaatggcggtggaaaattaaatccaacaactctcagaacacaacttgatcatgagagtggtcgatcgatcgatatacaaaagcagtggctcaatgatacgaaactttaattattcttaattattattattattatatatttatgaaactgttttttaattattattattatttaatttgagcataactaattagtaatgatcatgataacttgtgaattattattccaactgctgatgatagtaagttaaaacatgtctcgtttatatgtgtatatacctgacaaacccacgtgtttttttgtatttaattaacgtgcatatatacgctaatataatattaatcttgatctaatctcttcactacgtacagtaaaattaattaacttttgtttgtataactaatagacatatttttaattttttgttttctttaaaataaagttccacgtaaattaatcatataaatgtaatgtaacttacgtcatgcattttttttaatgcaaactgtataatctcatcaaaccattttcaataaataacatagcaaagtcacttaatttattttgtgacataattgatcgagataagattatattcaacttcaattttgcaaagttcatttctgcatgagcaatagtacagcaatagtactgactagaattgttagtagaatcctaattttaagccatccaagcaagcattaggataagtatcatccactttatttatataattcaacacattaataacttttttcgttataaaatataaatgaaattttcaaaaaaaaaaaatactaaactaaaaaaaataatcaaattcatcatgataaaaaatgatgaataatataataatattagataatgaatcaaattttcgaaagagaagtgtgacttttggatagctcaagaacaaccaatttcagtcttcctcctatagtttcacacctcaatcaggccagcagtctcaatattaacattagttcgagtcacaagattcaagatttaacatggggtaccgcaagatttctaaactcttgctcctagtgagagtcagagagggtacaaccaaagtggaggttctggtgcaagtacaagtcatcatagtcaaggaaagagaaaagcaaaagcaaaatcatctgttcaagcctatgctatttaggttgatgatatacagggtagtgcagaccaaggagtttaatggtatggttcttatctcacactcttgggctcatgtgttatttgatactagtgcatcacattcatttatatcattgatgtttgctaatatgttagatttgtgttgggaaacttctagtcctgctttacagtagttgagtgaacctatgaaaggacatggtgagatatctaccatatgtaggtcaatttgtattgtgtttgtgggacataagttgtcaagtaacttataagtgttgcctgtaaggcagtttgatgtgattcttggtatggattggttgtctgaatatcaagctattgtatattattcatacaagagagtgactattttaattttattgtacttatcgagctaacatgagtgtagtgagacaaaatcctatgttaagggcgtgcttaggtagaaagagaaagttagagtgctatacgaatatgtttgtgattgaggatgggcttaggaatttagaccagctccctcaaatatcagtggtaagtggtttttcagatgtattccagagtatttactgttaggttttatgccctnnnnnnaactccatttcaatgtaatctatttt

SEQ ID NO: 35440 - DNA, 2616 bp, Cannabis sativa
  modified_base (2542)..(2547): a, c, t, g, unknown or other
tgggtagcgtgcttaattatttagggcgttacagttccactatataagtttactggtctaggtttatttcatgttttagaggtttctctgttggttgtgagatccaggggcagacccacattgtagcgagaagagcagtcgcctcctcaaaaaaaatcggaaaaaaatgtatatgtattttagttagttacaatatatatatttataataaaagatgatatttgtagatttaatagtaggtttggtgtaatggttaagttagattatgttataggttaaaggttcaaatcccactaataacattattttcttttgaagtttacttttgctccctactttacaaaaaaaaaaaaaaaaggttacgccccctcactttaaatcctggatctgacactggtgagatgataattgttatacatttaagatatatttggttggagataatgaaatagaattgaatagaaatgaattaagtttcgttccattcttttatttggttgtattttaatatattagaatcatttcaatatggagtgccttttctattttgaaatgaatgaaaaaactattccaatggaatatgagaatgatttaatattttttttttatcaattcttttaatgcatcttaaattgtattccatttttattgttatattttcatttctcttaactaaatgtaggaggtatttgtaatgatttgtatagttcaggagggatttttgcaaaaaaaaataaaaaataaaaaataaaatgataaattgagaattaaagacaaaaatatatttataataaaagatgatatttgtagatttaatagtagttttggtgtaacggttaagttagattatgttataggttaaaggttcaaatcccactaataacattattttctttttaagtttacttttgctccctactttacaaagaaaaaaattacaccccctcactttaaatccctgatctgccactggtgagatgataattgttatacatatttggttggaggtaatgaaatagaattgaataaaaatgaattaagtttcgttccattcttttatttggttgtattttaatatattaaaatcatttcaatatagagtgacttttctattttgaaatgaatgaaaaaactattcgaatatgagaatgatttagtattttttttaccaattcttttaatgcatcttaaattgtattccatttttattgttatatttttatttctcttaactaaatgtaaccttaattatatatttaagagttttttcttttaagaaaaataaaactaaataaatgagagaatataactctaggagagatatttgtaatgatttgtatagttcaggaggtatttttgcgaaaaaaataaaaaaaataaaaagataaaatgagaattaaagacaaagatttgcaagagtcataaagttttatttattcatgaaaaagtaaataaaagttaatgtacttcagcatttttaaaatttagtttgactaaaattataattagaagattttcttttatttttgttaataattagagggtacatttataataagtataataagtatttataagaagagagagtttaaaatatggtttagttaaattatatataccaaaattgtattaccttacattttattcaaaaatatatatgcactaccaatattaactttactatttaaaaaaataaataaaagagatacaaacggtccaaattaaaaaacttaattacttatataaatttaatatgcataattttttatttaaattatgtgtaattaataatgcatatttatcatttaaatgtttgggggttttcatttttgtatttataatttaatttattttcaaatataacttcatataaaaatctaactacatctactttttgttttccaaaatacgaaggttggacttagacatctcttctcacgatagacacgcgtcctcaaaaaaaaaaaaaataaataaaaaaataaaaaaaacagagttcaagaaacaacaatcgagcctccattaacgccgtgtttcgagctgccccagtcgagccttcgtcgcaagcatccgaagctatcgaagcttagccctccgacccgttcccaaacacttgcaagttctctcaaaattgtttcgtgacattttgctattctacctcagatcactccattaacaacttctgttatgattccccttggaaatagactaatggggatatttgaataaaaatgaaaactttggttattatgaatgaatattgaattagtacagtatcatcaatattcatttttcacattacatattctaaatcaacaaaaaactacagcatctctttgccctttcatttttttctccaaagtcatggcaggtgtaggaacacgacatatgtactcagaatcactctcatattataaatcttgccttgactttacatgagaggtgcaggatcaggtgcaaaatctacgagctaaccaatacttaatgttgatggtgcattcaagatattactgtgctgtgcatttggtaacacttttttaannnnnnttttgtttttaaaattgaaaaagtgaaaatatttttcaaaaacatgttttataaaactgttttcacttt

SEQ ID NO: 35441 - DNA, 1573 bp, Cannabis sativa
  modified_base (53)..(60): a, c, t, g, unknown or other
tgaaccatgcaacataaaagaaatttctgttcttatattaattagtaaatctnnnnnnnntgaaatgagttttatttagggcagacaacccaacagaatattgaaaacactcttcaatcaaagctatgaagaacttttcaaaccattgtctataagattgtttaaggccatgtagggatttttttaacttgcatacaatatttggtggtagctcccccttaagactataaccttgagggagagtcataaacacatcctcatgcaaatccctatgaaggaaagcattgttaacatttaattgatgtaaaaaccaaccttgtatagcagttaaggcaagaatgagctttacataaacaaattttgtaataggggcaaaggtttcagtatagtcaatgccttcttgttggttgtatcttttagccacaagtttggctttaaaccttacaactgaaccatcaacatttaacttgattttgtagacccatttgtagcctatgatatgttgatcattaggtaagctaacaaaaatccaagtttcataagtttcaagagcttcaatttcaatatccttggcattgtcccgaactgatatacctcgagcttgatggtaaaaatctggttcatagtgacttgaaatagctagcaaagttgctcgaaattgtggtgataacctgctgtaattaataatctcagatagaagataagaagtagacaacttagacaccagagattgaacattgttagtagacaaaaaatagtgataatctttaagataggatggtttttgaacatgcctagtaggtccactattaacacacattaattgtaggcatatcaataatatcagaattaggaatacattgtgtaggttcagtagatgaatatggggattctgcaggcttattaggaaaacatgtagattctacagaagagtagttagaagcattaactggaaagaagttgacaaaatcagaagggttagaaccaaccaaaataaaaggaaagatttgttgatcaaaaacatccctggaacaaaaaacattattggtatttagatcaagtaacttataggctttcatacctataggatatcccaagaaaacacaagcaatagccctagtggaaaacttggatctagagctcctagtgtagaagcataggctaggcacccaaaaggttttatatggtcatagctaggggctttggacttgaggatttcaaagggagatttgtattttaggttgggtgtgggtgtcctattgacaagataggctaatgtactgaagcattccccccagtaaggcaaagatatgtgagattggaataagatggctctagcagcatttaacaaatgttgacgctttcttttcacaacagaattctgttgtggcctttgcacacaagaatcgtaatgatcaattcctaaggaggaaaacaactctagaaattttagttctttagcattgtctgatttaaacctcataattagaatgttgtattgggttttgactaactgtatgaaggcatggatagctgtttgagcatcatattttctatttatgagatgaatcca

SEQ ID NO: 35442 - DNA, 1980 bp, Cannabis sativa
  modified_base (1602)..(1607): a, c, t, g, unknown or other
aaaattatagttttataaacattgggtactataaacattgggtacttatgccgctaaaaataaacattgggtttatgacacttacaaatataaaatttttgggtacttatgtcgctatttagctaagttaaaataaatagaggtatatattttagaaaaattacccaatatattatttttactatgtgaaattgtagttgttactataaagaatttcgtaaaaatataaaaaagaattatattaatagaataaataagagagataaaaagataacaaataataaagattttagactgttatctctgactcttatatatattaatagaattatagattttagaaccagtctctaaagcttatgaaaattgacctcaaaatcaaatacgactgaatgtgcactttagagaagaaaggcaaaatcttcatactaaccctaacgggtcaagatgaacacaggctaaacccaactcttatcgattcaattcactcagccatacgccgagtcagatcagaggcttcttcttcctcatcttccgctctcattaccaccgcccaaggaaagttcttctccaatggctacgacctcgattgggttggttcatcccaaacccgtggtcctcttctcgattccaagctcaaatcactcatcgcagaccttatatcgcttcccttacccaccatagccgccgtttccggccacgcctctgctgccggattcatactcgctttaagccacgactacgttctcatgaggaaagacagaggattcctctacatgagcgagctcgatattcgactaccgatcccgacttggttcgtgactttgattaagtgcaaagtcggcgcgccagcggctcggcggcttgttcttctgacggcggcgaaggtgacggctacgaatgctgtggaaaagggaattgttgattcggcgcacgatagcgcggagtcgacggttgtggcggcggttggtttggcggagaagttggtggagaggaaatgggatggtgacgtgtatgctcagattaggatggaactgttctctgaggccttgggtgagattcgcctaagcaacagtgcatccaggctatgattattgggctgggccgcctctggcaaaggcccatatatctatctataaaactattaataaataaattaataaaatactaaagtgatccctactaggacgactgagtcctcacattaggggacttgacttgttgctattcaggtttttctgtttttataaatatgtgtgttagtgggttttgtttagataagtttcgtgtgctgttttttggtgattaagaattagaggtgtgctaattgtaaatctttattacaaactctttattaatttttgtgtcgaaaattacatacttgatattttttaacagagttttgatatttcatactcaaaaaaacttcaaacctgtttttattagaattagagcaatttgaggcgaaatttctttatgttttaatttttatatacttaacttcttattttttttttggcaaaatctcattatgttttaatttttatatattttacttctttatttgttttttgtgacaaaactctcttatgttttaatttnnnnnnacttaacccccttatctttttttgtggcaaaattctcttatctttatgttttaaatattaccgttaaatattaactggatgactactgtataaacttgtgtatatgtaacagtaaaacctcgaaatcgatacagtaataatccagttagtatttaacggtaatatctaactacaattttaaatttgcaaagaaaagtaaacttaagagagttttgccaccaaaataaaagataaagagattaagtttataaaaattaaaacataagaaagttttgccacaaaaaaaaaataaggagttaaagtgtataaaaactaaaacataaagggagttttgataaaaaaaaaaatgaaatatataaaaattaaaacatga

SEQ ID NO: 35443 - DNA, 1902 bp, Cannabis sativa
ccccaggatacaatcaaagtctcattttagcccccgcattgtcacatttcggggcgcccatgagcaatccctcggggttgagtatcaaaactccgtcccaatccgcactagccaccaatatggcaggagcttcgtaaagctcccaaagtaagagatcctcatagggtagtacccggactaaggacaagcgacagcgaaggggatataacccccattacactcaatacacggagcttacggatatccaggagcgtgtatacttccccactcggcaaaatacatattatcgaaagcctccacccttgtacagggatagctcccggagagatcctaataaaagatgcgagtaccacaacgacattggccacaccacaaacaagtgcaaaaacctgaaagacaaaattgagaacctaattcgattaggccacttgtatgaatggatcaaaagcaggttaccgcacttaaacccagctccagcaggaggcccactgcgtcagggaggagcaaggggtatgcattaggggcaagtacctcccaaaggggcgcttcctcaacaggcgcccggattgccaccccgagagaatcgaagagtggccatgatttttggtgggcctcatattggaggaaccgccaggaacgagttgaaacgttatgttggagccctaaaacacgatgaattgtgggaggtcactcaactccaagcacaaagacccagactcatggaccaacctattacttttacggaagaggacgcgaaatcagtgcgtttacctcaccatgatcctgtagtcatagaaactcatatcgccaataaggttgtggctagaatataggtagataacaggagttccataaatctgttattcaaagaagccttcacgaccataggctcacagataaggacctatagcctagtggctcacagctcacaagattcaatgagacgacactcatcctgatgggaaaagtaaggctccccgtcaccctgtatcctgacaccccatagagcactttcaagtactggacctttgttgtggtagactgtcccaccgcctacaatgccatccttggccgaccaaccttggtagattttggagcaatcacctccattcgacacttgcgccttaagttccctactcgagaggccggagtgggaacggtgagggggaaccaaggagaggcgagtcaatgttacagtgttgtagtacatctttcagttttaatggtacaaagggacgaagagcccttggtgacagaagaagacgatccaaaacaaccatagaacctatggagaacatcgaggaagtaagtgtgtgtgaccttgactccactaaagttatctgcctaggaaaaaacctagaaccgaaggaaagaagcaagatcatagatacgttaagggtagccacagatgtctttgcgtggtgccaaggggatatgactgaaataagcccccacgtgatcacccatgtcctgaatgtcaacccagacatgcctccggtacagaaaaaaagacgtccgcttgacccgctaaaggccgacgccttggagcaagaggtggacaagttactgaccaatggccccatttgggacgtgtattacctggaatggctagccaatccgatattggtgcccacactgaatggaacatggtgagtctacatagactttactaaccttaacaaggcctgcccgaaggattgcttctccttgccccgaattgattaaatggtggatgccacctcaggatttaagttgctatctttcagggatgcctactctaggtacaaccagattagaatgcatgttgcggatcaggaatgtactaacgggaaagggtggggcaaagtatgccatagtggccgtggattacttcataaagtggacagatgccgagcctatgaa

SEQ ID NO: 35444 - DNA, 1494 bp, Cannabis sativa
  modified_base (740)..(745): a, c, t, g, unknown or other
  modified_base (1314)..(1321): a, c, t, g, unknown or other
aactggcctcagagccatggcaatgatttactttcatgaaatatgaatttaaaacgatgtttgtgttgatttggatggtttcatgatggtttttgtgcatatttgagattgtatagaaatcgcaatgtatgttgtaaaatgttttttatttcgttctgaaaatattttactagaaagtagacaagaaaactaatgaatttaggcttttacagaacctaatttagaatttttatgaattagtttttattttttgaattttgattaaaatatgtgaaacaggatgaacacacgcgcgcaagcacgaggggttcactcggcatccacgcagtttcagacaagccctgttagaggaaactcggagacgggctgtttgtagttgtgtcatgcagagtacccttggccattgaggctgcatgcagccttctgtctcggtcagaagccttcatccgcgcgcgcaggggtaagcaatgcatacccctgtgccccaaacttgttttcatcatatcttttgattcaaaaatcatttttcattgaaacacaattcaaattttggtagacttttgtgtggaatctaaattttcaattaaaaatcttattatcagaataaaattaatttttattaatttttaattaattaaaattaattttagatattagtagcctttgaattggaaaatttgatttttccacaaaaatagacttatggttaattttgaattttttttattttatttattttnnnnnnaagatcagatattacttattttattattaaaatttaaaatgatcttatttttatattagcatattattaaaattttagaaataatctagtttaaatttcaaaatttgttaaccatattaattttctaaaatttgttattttttgaaatatattttattaatttaaattataagatttgaaaaatgttatatttagacattttatcttattagatatttttttaatttaaattaatttttggcaaaataacataaaaatttgaaaagttcgttaatttaggtttgaatagatattttaaggtttctaacctaaaaattttcaaacttaggatagtttgttttatttaataattaaataaaattgataatatcctaaccaacaaatatatattttttttcaaattgtttattcttgttgtatttatttcattaaattataagattaagaatataatattaggaatatctaaattttaaattcaagatattttattatattaccttattagatatttaattaatataaattatttaaataaactgataatttgaaaattggttagatatttnnnnnnnngttagaatttaggatatttaggaatttgttagattttaaatatttgtaagaacctaaatgttaaattctcgttaaaatatattttaaatattttaattttaaaatagaaatatcttaacctactttcgagttatctgttacatgtttgtttgtaatgtttgtttatttattta

SEQ ID NO: 35445 - DNA, 1221 bp, Cannabis sativa
ggacctcggggcttgggcccgacactcggaccgtaattccccaagtcaggacccaaaaccggactcgacctcatacccatacttaggtatgtgagagaaaatataaaaaaaaaatgttagacaaaaaataaaaattgtttttgaaaatagaataaacaacattttaattttgtttgtctttttatctttctctttaactttattttctgaaaattgtttttaaaaaattcggtcaaactctttttattaatttttaaaaactaaaaatattttttaaattttgaagccaaatagtccctataagcttctagataaaagtcaatatattgttcaaactttggtaatccttactagcttttcagtcgcgaggtgataagattaattcattaataagatagttctttcttcttattaatattatttttgttctttattttcttgttactttgagttgtaatatattattttcatcacctacgtacctatcttatttacttgtattttaagtatttgtattacaatatttatttacactcaatatgttggtacttgtaattttatgttatatattggtacaatatttatttacactcaatatgttagtttcattccattcatatattaatatgtctgatattttgtattgttagaatggtgagcgtttgggatcattaatttatagaagagagaaattcaccttttacagactggtttaattgttcttggaaatttgaaactgtgactgaaccagtactgaaagttgaagagtgcaaaagaaataatcgatcagacagagatttatagttaataaatgtgaacaccattatttttcaaagtaattattttcactagtattaattataatggaattttagtattgttagccaattgtaaaacgacacatctaaaaggtgctagacactattagtatccaataacaatgttctggtattatgcaaaagtttaaacaaagagtattactattggaaactagtggtacctagcaacttttaaatgtgtcgtcttgcgattagctagcgatactccctatagttattacattaaactatacatgactctcgatactttgttcaactaatagcaatattgacatgtaggagagtgttataggcataacagtaaccgcaattttatgcgcactctcatcaacattattgaacgttgcaggctctaacatggcaagcctcgagaatcgtcgga

SEQ ID NO: 35446 - DNA, 5478 bp, Cannabis sativa
tatgcttcccgagcagatgttccaagtggactccacgtgtcaccattcatgtgatgccacgtcagtgtgcaaaaattgagataacaatatacatgagttagattaaattatgaaaatgaaatcaaaataagtatttaaattaacataaaataatgtgaggaaaaattttaaaaaaatatttataataaattttaaaaattatttaaatttatattttttttaataatggagagtatttatggaggtgcaaatataactccccttaacataattttataagaaagttattgagcaaaatagttttgaaagaagtttatttagtttaatatccccaatttttacattatccatgatctatgattttttactggtacgattgatattttttttttactggtatgattgacccatgtaactaattaataaaataacaaacagacaaactcatacgtatggtgtaacatctagtatttggctggagattaagaagaaagagttgagaaaaaaaaaagtctgcgaactggccatggaaatctggcacaaagcccaaagctttgctgaagaagccacgaagcgctctcaagagctagccaaagacgccgctcaacgaacccaggggttgaccatcggcacttcaaagctctacgacgttgtttctgagactgccaagcgctccaaggagattgccgccgcggcctccaagcgaggcgaccagtttctctctgaagccctcaaacgagccgaagatatcaagcaattggcctctgtgatcaccccatcttcggcgccagacctcacggagcctccggtgggaacgagtacaagtacacttgaaaaggatctcctaacgttcggagtgaccgaggagttgagagagttcgtccagggtatcacttccaccacgttccaggatttccctcttgaaggtattccctgtttgattacggagaaaaccttaggctatagttcaaatccatcagacaaagtgttattgccattcatttccctcctcctcccccctttcctcatgtgggttgtgcaagaaatgggtttaatacgaagtattagcttttaaagtaattgtgtcatattcaaagtttgttactaaccaaagttggtcagggcctattaatgggattttgggtgtttaaaacctggaacttctggattttctttagtgagttatttacttaatttatattgcttaatagaattggtttgttttgtttgcagatgacacgcaactgtatgatgttcatacagtaacaaacattaggcaagatctctctgagtggcaagcaagacatgccagtatcgttcttcagactgtgaaggtagtttattctttttcctcagttttacgtccataaattgaaatttggatgtaatgaggatgcgaatagataatatgaaagagagctcaacaaataaattagtttttctaatgctattaaactgttttagactgttttttcattattggtttacataaagggaaaagtttttcctattttcagagcaaacctagtttgttatcaggtgaaaacctagctcgttttttcttttttcattcaattttcttgctgggttgttaagattgcgagctacaataatatgattgactggtacggttggaaattatattgttgtgtattttatttagtttcttaacagtgattatacattgttcattcattcctagtttgcttatgagaaatcatatttcatgtatgtctactctacagtctactgatgaaacgccaattaattaaatggagaaaaagtcacaaaatttcattttttttagaactaaaccgattgttcacagcaaaatacatctgttgcaggaaatttcccaattcagatatgagttgtgtccacgcaatatgaaagaaagaaagttctggaggatatactttatcctagtcaacaatcatgttgcgccgtaagttgctcttttactttttaaatcttcattctagcagtagaacattaactcttttttctttacgaaaaatatttatgatccagaagtcataaaccaccatatgattaatttcctcctgatcatgttgaacactagtattttatatcttcatttctgctgttagactatgcagtgtccatttaatagcatgtaaactcatactgaactgtgtatccaacgaaatttcgatatgtttatgtgtgggggtattaattgctttatgaagtttgtagaaacctaaaactttataattgtattattttgacagtagtatgtccaacttggcattatttgaatagttagagatgatatctgtggtttgctttttgaataattgaatcatctcttttgatccgaatgataatatgtttcattctcttctctcccttagctttgagaagcgttaccaagaggatcttaaattaaaagctaaaaaagaaaaatatgacactctaaaagagcctgtgaaggttgaaaatgttacactgaaatcaaccaagcaagaaaaaaatgacactctaaaagagcctgtgaaggttgaagatgtaataccgaatccagctgaacaagaaaatacattgatgaaaacttatgcaaaccagctaagtcaagcgtcaacctcattacatactgatcaagacttggatatgtttctcctgggagagaatggagacagtgatgatggtcaaggtgcgtattggctttgattgacttgttgacagtttagctcttattattcattaaaaatggttgctgcatgcccgcatctttagtccaagactcctcacattgacattttttccctatgaaatgaagtgcataattgttttctatggcctaattttgcatgcagtaacttgcattgatgaggaacctctttcattcatattaatttactaaaatagagcattaataatgtaaaggcagctgattatttggccactaccacactgcttcatttgtctaaactatagctggattttttgcattttgttttggtattcctagttactaatgctagtaatttagtttagaaagaactccttccacatatggcattcctccataaaaacgaactattaagatgtttaaaatgcccaagtcctctaaattaggtggaaaaagatctgttttttaagttcattttttctttttctcttcagtcctttgagtcgtgtctcaaattgaatatatcttcaacatttgacaagtggattattttggcaactaccataatccttcttttgactaaaagttagctgttctttttgtttttgttttatgagacatagttgctaatctttgagacacaaattagtgtacttgttataaattttgtaatttaagtacctatttttgtaattgttattgtagatgctgatggcgatgatggagactttgatgatgattttgacaaaattatggatggcttggtaagaacaactctatgattttgtgttgtttgattatcttatttttaggtgtcatgtatatttgtatgtgtgattggatggaaagggggcttatcattttttactattctcaatggcacattggccttcaatgaattcaccgtggattgctgaattaggagtagtgtttagtactttggtacttggaactaactagggctggaagagcatatcacatcttttgtttgctgtttgctgtttgctcctctagcaatattgttgaagtaaaacatgaatgtttccatttgaagaagtatattgctaaagtaaagaattgattcaatatgagtttgccttgtgatattacccagttcaaggtcttgaatttcatgactccatgcaaggtcttgaatttcagtaaagtttcatgcttgcaaagttatttagctgcatcttgaacctcaacacaacttcatatccgaagttgagcatttcaagttgcattggtacatgcatggttatgttttatgtaaaaaaaaaaaaggttgttagcaaagtgatgaacacatgaattttgtatagggtttctctgtacatctttattgcttaaaagtaattatgttttatagttgaactaatactaacattacattcttaacgatttgaacctcaggatgataacttataggaagactgcatagaagttgttgaagcaatatttgaatttggagaaagttttaaactacaaaatcaaagttacacatggtttacttgcctgtgatgttcatagcccttttccttttgttacgtgtatatcttaagtaatgtttatttaacattttttgttgtatcttaaccgtttttgttttaatagaattttttgtatttctttaacaaaaagtgattactttaatagaaatataacatttgcatccttacaccaaaaggcactcattcacaactaataaagatgcatctatcacaagaataatatataaccaacagcatacaagacccagatatcaagcctttcgactatgctagaaactacatatgtatgaataaataggctatgctataaactgcatatgtatttttgtgattcgatcacacctcaacaagaacaataatcaaagaagggtaattataaacaagaactgaaatgaccaagaacaaaattatgaacaataaagaaaataacacctgaatttgagaagactaatctatgaaaaaatgggttttatgatcataactactagagcaaacataaagctttattgatcaacttaaataccagtacagagagtatataatgaactcgagcccctagactagtctaaacttgattatagattaatctcacataaggaaagtcacctcttgcatgaacaatccccttaaaatcccttcgatcacacaaactctgtatttggttcttaatcactatatctctctctaattacagaacgaaagacttaacaactaatgaggaatagcagactttatataggtgctactttcagttctataactaactaatgaattagttagtttgataatgtagtataacaatttctaccttaattaagaaactataagactttgaaagctagtttgctcagaagagatgatgacaaaaagttgtgactcaatttttaatcacattgagtaagtttaagcaatgcttaaacttcacataagtcacacatttagtaagcatatcaattgggttgtggtttgtacttatcttttttactatgacttgattgtgggagacactgtctctgatgaaatgcgacccgatgtcaatatgttttgatttttcatagtgcttgggattctttataaagtccagagaactttaattatcacaatgtaatgtgatgtcttcagagtttagaccaagctcacttatggatcccttcagctataatgcttccttaatagcttgtgtagcagccatgtattctccttcagttgaagatagggccacaaatttctgtagtgttgattcttaattgacacaaccaccaatacaagaaatgtcacttttgccagcacattattgtgctggtaaaa

SEQ ID NO: 35447 - DNA, 1800 bp, Cannabis sativa
aattataatattaaaaaaaaaactgaaaactaaaataaaattaacatatgtgacttggcacgtaacatttatttagtaaagaacataaaggtttagtccccaatgttaattttaaccattcttcttatccattcacatcaattgagtgagaaaactcgtagagaaaagattagtctgtggaagatcatatacctatcatctcatcttatatccaatattatggaatcaggtatgtctttcatcttattgattcataaagtaatcttaataatctgacatgagtttaaaattcatgtgtatttttagatctaatatttaacataattgtgatgttataatttttttcatctgattttattttaatttttttgtctctaaaagttagacggctaattatttaacttatattaataaatattaattctaaacatatctcccataaaaagatgtcccaattaaatggttgcaaactattattttacttattgtcattaatagaattacattatttttttttctcttttgtagttatatggcatattggtcaattcattttaaatgtttttttttttgaatagtaacatatgttacatatctatataaataacaattgatagggtattatggtaaattatgtgataatgaaataattttatttaaaaaaaaaaataaaaatcagtgagatatggaacccaaccgcgtccaaagcgcaagacgtgtgtagttgttaatttgttattgtccagtcccataaaattttgcaaatcactcgctgtctaaacacccctaatttccctcaaaacacaactcatcttctaattaaatcccatgtttacctacgtgtccaatgtttgtgggtttacttaacctacaattctcaaagcttaatttctttattttatttaaatttttgggttcacacttcacatggacctagttgtcattcccattttttaaaacagttttaaatgccatttcaaaaaaaaaaaaaaaaaatttaaatgacacacattccttacaccttgttgttagtaatgttatgattgcgtatgtgaatttattattaattttcgttagtgattgatttaagtattgagtttcttttttagtttgagttttttcataccatattggatagtttattatgtccattaatccaattgatgtcgacttgttataatatcacatttgtcttcactgttgacaaatatcgcaaccaataaattaaaataagaaattttgtactcacataaatgaaatgttttgctcattatgaaatgtttgtcatagtcttcatatatatctcttagataaaacaaattttagtgaattgtggctatattttgtagttcaaaataaatagtttaatatttttcgaaaaatctataatacactaccataataattagttagagtatcttaaaaaaacacactaaatttagcgtcacactattattaatttaatgtcaaaaattatttttactctaatcacaacactataccttaacaaagtgatcttagtctcaatacattcacaaaaagacattaataatcgattcgtaatgtgattagggatggtgataagtgtactaattttttcttcatttctgccacgattcgtaatagaagaaactccgtggatagtatcttgaacaaggatggtgtgtggataactaataaagaagagattggtaatgagtttattggttttttgggtgacatcttcaaacacccgcctcagggccctttggaaagcttagactacttaattcctgatcatctctcccctttggagcagtc

SEQ ID NO: 35448 - DNA, 1193 bp, Cannabis sativa
taataactgataatttattagcttatgatgatctgattgaaccagcaatattattattggtcatatatagctaaaaaaaaacataccattttgagtttttgtattttagtttcgattctacgatggaccgttttgttaaataattaaaatttattctgatttttttaaaaaaaatttaaacatataaaaattatttttaaaaaattgattcttattgaatatctaccaatttaacaatttttatatgtttatacgaagttatgtttactttaattcaatttaggaaaccgtttttttttttacgcggtgatccaaatcacacatgattaacaaagcagcaatctacaatcggcggcggtacctcctcgaaccaggataactcattgtctaaacgaagagcatgtatgtactgcagaattcgcatcccgagccacttgggacaaaactgctcccggggagtttaaacaataaagctatgacatcctcaagtagcacacccagctcgttgaaaaagacccttcctttgtttatagctgtgactagagacaaagaatcagaaaaaacctctttaatttggattccgcatgaaagagcccaattaagtctaaccaaaagggccaaggtctccgcttgtaatacagagatactacctgaaaacataacaaaccagaaaacaccacaatgaaaaactatgagtagaaactaaagacaaaaactaccacgagaaacgcaactcaaaaaacgataaaatcaacaatgcaaagaaaggataaaggaaaaaactagtgaaagaacaccataaaacataaaacaaacatttttctcaaaaggggcaaaacatataaatcttgatacattctagcctgatacaagtgcactccagaactagcctatcaatgtctaactagtcagtctaaaaacgcctaaccacattatataaacaccaccaagtactactcaatcacttagctagaacatattttaaaacttgttacgtcagacctaacccttttagcaattaaaatataaaagaccctacatcatctaaaacatgtaaaaaccagacctaataatgttcaaacatgaaactgttagacttttatttgggcttacattaaattttattggttttattaaaacttgggttgattggatagttctttgctgtattagcccatgttgttggtgatcaa

SEQ ID NO: 35449 - DNA, 1703 bp, Cannabis sativa
cattcctatttttaatttatgattttacagtgctttcttatttttaccaacctcgtcaaaccagtgccatgatgagaaaaaaaatgcatcttttgaagtataacgaattcattaaagaagggtatagccccaaatcaatatctcataaccctaaagaagtaaatctcccaaaatcaatactcaaaaacagtaatcgatatgaaaaacaaaataacaataattacctctcaacaattaagtctatatatgagcaatgaagaagaagaaaaccttgattttgatatagagttgattgtggataatgaatacggacatacagaacatagtcctcttccaatctatagcttaaacttttaaacggaccagtctagctttaccatcaccaaaatagcagccaaatgatcaagtaccagtaagtgactatagctttcttattgtagaattgttaatagcatatgaacaaaatctaattaaacttactaaatgaagtgataccgagaagcccttttagtaaagcacactacactgccataactcttgctttcacggctcaaagcaaagaatttaaaattgatgctcaatactcgaatagctactcgttatgtcataaaatgaatagtaaaaacacttgaaagctatttacccgtgcacaaattcatgcagaaaatcaaactcttaaatcaaataaaatcccaattaaatcaaatatcaatataccccaaattatttctttaacaaaattctggatttctttgcactttatatacaaaccaactccagattacaatattcatactcaaacaacaaacataatgaataaacaaaaatataggcaattgatgttagcaaatcccaattatcacacagcacaattgaaacccaaaaaaatccatagtaaattgaatcgaaaagtatgaatcaaactggactaaccttattggtaaccttgtcttctctttacaactcagatccgactaagcccatttgcaatttaaaacataaataaagtaaatcaaaaggccattatataaattgaacaattggaaatctatggtaatctttcttagaaaaaacgcaattacggaagattaatttatagggcacaaaaaaagaagaagaagagttctagggcaaacaaagaggaagaagaagaagtcgtaaatgcagaatctaaatttataaataaataaataaaaaattccgacctgccggattcgaaccagcgacctaaggatagctattaccaactacagtcctccgctctgccaactgagctaaggtcggtttctgttaatttcaaacaaatgtaattaatattgctttaagtaatctgcaattattcttttttatataaaaaattaaaataattatttaatttttgggaactttagttagggaaatttgattttttatgcttatatttggttaattttttttttccctaaacacataataactaaatttgtaggatatgacaatttttataatatccctaaaatactccccatttacacaatcggaccccacatcagacacaatcggacccatcggacccccatcggaccatatctgctatcaatttttttttatgtttttgtacataaaaaaaaaagtagcatcaagtgaccatcggaccccattggaccatatatgctacccaattttttttttttttttttttatatttttgcacataaaaaaag

SEQ ID NO: 35450 - DNA, 1213 bp, Cannabis sativa
tctgaggaggtaaacgcgaaagtttgtcgggagaaacatcaagaaattcccgaaccactttgacgtcttttggccaaacagagttaggccgagtggtatccaataccacggccaaaaaccctagacatccctctcgtaacaattccctagttgttagcactgaaattactgggatccgagatccctgaaccgaaccgacaaagacaaacggttcttcacactctggttggaagattaccatatttctcttacagtcaatatcaatacaggctgagtacttgtacttggactagaaatccattcccagtataatatcaaaatccactaaattcatctctattaaatcaacactcaactctctatcctctattctgatcggcatagacctaatccaccttttagagataattaactctccgctaggcagcaggttccaaaccctatttcatagctatcatgtggtctatctaatttactaaatattctggccgccacataagaatgagttgccccagagttaaacaacacagagaaataagagttgttgatcgagagctgacctgttaccactaaagggctggcttctgcatcagcctgagttattgcgaacaccctaactggagtgggtttcgctccagtcttcggtgcctcagttctaagctagggacaatctctcttgtaatgccttggcatgccacactgaaagcaccctagccctttacactcccccagatggtgctttttacaactggggcactctggtaagtgtatcgggtttcggtgccactctgatgattgcctcgaccctggttcccccgaaacctcttgttctgacctaagccacaagttgcagtggatgcctttcttttctgatctatggctgaactactaccacccttgctaaaacctgatgcaggaggggcaggagccctgccaacagccggagtcccaccagactcaaccatacatcccactgcgccctcatctcgcaatgccttatccaccatttcagcataagtggttctgtcatcattagtgatcatcaagtcatgtctaatcttcacgtttaacccatccaggtatttctctttcttactgaaatcagtcggccaaattcccacggccaacctcgccaaatggtcaaattgttgtatactcagtaacactcatattttctttctgagtcagttgagtgaattcctttctcttagca

SEQ ID NO: 35451 - DNA, 3595 bp, Cannabis sativa
caactagcgctacaactaatttagaaaccaatatggggtaattcccctaaaaattaatccttaaccttcttgagatttatttagaaaaaattgattcgggtaattccataaatatgggaaaaatgaagttgtttagataaatatagtaagaaaatttaataaaaaatatatggtatttaaaataaaaacttaatatatatggaattgtataaatgatattaaaatttccttcatatttttttttttcaaaaaattaaacaaatgaaactacagtgattgccgaagttgtcaccggagccggaaaaggcatcaaagtttactgccagagccgaaaaagtcgtcggagttgctgctggcaccggaaatgtcaccagaattggcattatcattagaaaaatgaagaaaccagtttcttggtgatttttcgagtaatttttccggcgataatgccaattccgatgacttttctaaagtttgctgttggtgccgaaaatattgccgaagtagttgccagtatcagaaaagtcgttagaattggcattgtacaccataaaataaaataaaaagacttaaaaaaaaaatactatataaattagtcaaacttaaaagtaccatatttaacataagaacttttaaaatcacagtgtaattgtaatttctttttaataaaaatcccatatcaaccttagctcgcgataaatataccaagcttaggttgaggagctagtgtaacaaccaacaccaaacaaccaacattcaaactaacaataaagcttattaccttctcatacaaccctctcttctaagcaaaaccattcccatatactaaaccaacaactactcatcaacatcactatttcaattaccaaaacaaacattaaacacttattcctctcttactacacacataaaaattaaacacatatatctctttcttgtcccaccaatcatccaacttatcaacttatcaacatcatcatactacactacctcatagccacctatttaaatctaaaccaataaacatttattctcaaaccatcacttttattctcaaccggttgagatatcttaatgcactgcttcttatcagtaatatatgtaaatatataattatatgagaattaactatggctaatttatgaccaatgctttttgtggatgtatagaaactctgtgcactttcatttttggtcaatttaggtcttatcaccagatgaacgttactagctagactacaaaattatctatgtgtgcacgttcattaattatgtcacaacatgataaatttttttctgtatttgtttgttttcctctaagaggattataacgaaacagctaaccatgactaggcgagttataacttaccgttttagagcattactgtacacagactaccgttttagagcatttattttgtttgaccgagttaatattaattcttacctcgaaatatatgtaatttgtatagaacacgtacgattcacgtgtggcacgttggtttctactggttgcattacaatgctattacgtacacgaacgaatattacaccagtggatatccatgccatgttaggtttcgtaccctccttgtcctctatataaacacaccccaaacgccaacacatctcaatttgtttttcctcaacaaaaccacaactttacttctcttatatattcactgtctgcttctctctattgagtacgttccatgcaaacatggagttgataatcaaacgaaacctgatggtgactccggctgaatcaacttggactgggattatgtccttgtcagaatttgatcaaattggttcaaccacctatgctcgtgctatctatttctacgggccaaccccaacaccaacgccatttcaaaccatcactgaaatcctaatcaattcattgagtcaaattctagtgcatttctatcccctggctggtcgtttgcgctccaccaacgatagtcgttacgagctcctatgcaacgggcaaggtgccattttcgttgcagccgagttgaacgcagatttggttgattttggagcagataactacttcacacccactcaaaactttgatcgcttccttttcccatacatagacgacactaatccaattcacgaactacctattctattggtgcagctcactaaattcaggtgcggtggtttatgcctaagctttacctcctcacacatcatcactgacggactaagcgccgcaaacttcatgaccgagtgggctcgaatagcacgaggtctaccattacaaaacatacctattttggacaagaaggcatttcgagttggagaatcggcagtcatactgcgctttgatcactcgaaagacttctgtaatatgccgtttttgttgaaacaacctactgcagaagaacttgagaagatgaaaacaacaatggtaacactaaagcttacgaatgaacaagttgagaaagtgaaaaagatggctaataacgctaaaatgtcacgaccatacactcgttatgaggccttaacgacacatatttggaggtgttcgagtaaagcgaggaagcaccagcacgaacagcctacggcttgtctcataacaattgactcacgaaagcgtcttcagccaccattaccgttttggttcttcggtaatggagtgttcgacataacggctagctgcaatgccggtgagttgttgtctctgccgttaagtcacagtgcaggtaaggtacgctcggcgattgagactgtgacaagcgagtacgttttgtcagcaattgacttttttaaaagtcaacaaaacttgaccaagttccaatactcgtataagtcatccactaacggaggagccaattatggggggaatccaaatatcggggtcgttaactggatgaacttgccgtttgagggcattgatttcggatggggaaaggagattcattttggtccggctaatcacggagtagacggtgacacatggatacttcgtggtggtggtagtgaagatgataagtcactgttgattgttgtttgtcttctggtggaacatgtcgaagctttcaagaaatatttctacgacgacattattaattactcgtcagagacgttgtcctcattctcagatgagcttagtaagttgatttaggtttatctgattatgattgtaggacttttttgagacgtttagagagtctcatcagctttgaaaattcagttatatggtataaatattattgtggaatctgtgtttaattatttccttgtttgtttgataatttgctggattgtatttacttttttgattgtatttagttatgctgaaataatatatttgaataactctcaccatctttctaacttaattatatattgaggtttttttatgaattcgtattagcaccgacttcaaaatatggtgcagctcataggcataaccagaatattgttgtgtaaatcttgcattgatattagaaaatatatagcaaaactagtatcttcttctcgtcttgttagagagattgttttttgttcagtgatatatgttagattttttatatgtatagatgaaatatataagggctcgtttggtacgcagtattgtattg

SEQ ID NO: 35452 - DNA, 2632 bp, Cannabis sativa
  modified_base (437)..(447): a, c, t, g, unknown or other
ttccttcgacgttgccagtcttcgttctatcggcgatcaacaccaacccccagccttcaaacttcatgtaagttcttcgtatactgtatacttgcttacttttcgtttatatagcaagttttatgatttctgggttggatgtcgaacttctaggaatgggtttgcttgagtttctgtatgatgcattaaattcctcttttttgcgtttagattgctcctttcactatgtttctgttgaagaatcatcctcatcttacgtaataacgtctttagggcttagagtagatcttgcctctttggctttgcccttttttcttttttctctttttttttcttttttgcaatgtcactgcctctgggatttttgcacccgattcttgccaaggaaagcctcttggggttttcttatttagcaagtgtccggagggggcctcttnnnnnnnnnnnggggacccccattcccttttttggacattagggtttggtttggggcctaactgttggattttctctattatttcagaaccaaaatgtctgcttccgcgtctggttctaagtcttccaagaagggagaggttcaactggccaccctggaggaggtcatgcagggtcccatggcccaggagaactataagtcccgtgccaatggatgggaggcggatgagctccactccacactcacttgtgctcaccaacttgaaaaaatcgtggtggtggcaggcatcaaaccctcagccttcgggaccttccctcggttgcctcgggacgaggagacacccaaccaaaattacgggggcttcggagcttggagccaaacctatttgatgtccggggctatgctccctcttcaggactactttgtaaattttcttgtttttgttggtcttgcatcgtaccaactaatcccttaagcttaccgcctgctttcaggcttatttattttatatgccgcccggagctggggttcgcccagtccggctgaaattttgtatttttacgaacttgtttctgtcctcaagaagggggacaaatttaaagacggattttatggcctccgggcccaccctttgaacgagggcccagtccctttcaaccaccaaaagcatgtgaaggagtaccatcactacttcttcttttcttccggctaccaggccatggaccgcccggagcttcttacagagtgggtcaggatcccaccttacatgcgaaccgcgcctacccgagtattactccagtgggccaagactttctccacttatgacaagaaggccctcgacgttggggacttggtcacggtggagaactgtcggaaggccaagctgatatctgagaatcagtcggtggatgacttcaacctttccaaggtcatctgcccgaacgtgaggactccgggtgcggaaagggcgctccgggtggagataatcgcctcggtgtaggaccggtaccataaggacctctttaagaaggaacaagagctggcctatatcaaggcccaggcggcagccgggaggaccttccgtttggaagctcctgcggagcggaggccctccaggcccaagcctgtgatcccggttcccaatactggtgctcccgacgccagtacttcaggttctggtaagtctcctttaataatacattatgttcctcctgtccgagagtatacccaacttagacctatagggttcgatgaacgcctttgtaggtttagaatgccttccacccggtggggaaatcacaccaaagaatattatttttcccacttgggccattttttaggtcggtcccagatgggctctggacctccgacgcctattcccttggaccattcaacccattcatcttccagctggtttctcccctcgaatagctttctcggcgatgatgaagccagcattgtaatccaagactttgctagggctgaattagagagtcagggtaggactagttttattgctttcttgttgggcacacgcctttctcacgattatcctaacacttagcttatttctttgttgcagcagccaggcatatggaagatctcctagctactctcgccgaggcatgcagccctgacgcctctctgcctccggctccatcccagctggtgacccccaggaggtcctcatccagtgcccctttaggcacgatcgtcttgatagacgaggagggggaagtcgaggaaggtgaggtggacgttgcggccgcccttgagcgcaagcggaagggcaagatggttgagactgagcctcctaagcagacccggaggggggacactccggcggtgagcaacgactccgagattccttccgaagcggaggaatacaccgtgccgcacgacattgtgctgaccccagttcccgcggattaggagaggcaaaatctccgagttgccaagcacaactacgccctggacgagtacagtcgggggcacgctgaggtggaggccttaaagaagattctgcgggaggagcagcagaaaactttgcacgaggacgccttccgaaatccatgggacctgaacatggaccctttgacggattggttcaaccgctttgtcaggcccaccatagatcccttcgcctcggagatgaccagccagtttgtctcccacttgactcagtttccagccaag

SEQ ID NO: 35453 - DNA, 1111 bp, Cannabis sativa
cagattaaagaatggaaatattcaacaataagttaaaacctagaagtttgaaattttgggtttagggaaaaatttcacgaagctttgaataagcaaggtgaaggacagacaatgtgcgataaaaggccgacgtcatgaaccgtgaagtgttacatatcattacaaatgaaatcacaaagttttaaacttaggttttttacctatcttctacagcaaattcaagaacgcatatctgaaatccaaaaattcaacatgcaaagtaaaaagaaaaaggaattaagaacttactgatgctttggtagaaatctcacgacagacttgaagcgaaaacctctttttttctctgagtttgcataatgggaaagtggtaaaagtgaatttgtggatgatgctcagccctatttataggcagaagaatgaaaaaaggtaatcatttgaaatgccttagatgcattggttcccccctaaagcaagtattaggaatcaaatataatcaagtgtaaccgtcaaacgtggtgagagaaaactaggttttgaagcattaatttggttagagcattattaattagccaaaaactgaagatacgcctggtccgcctcacattgaatcacgaacagacgcgcctgacacatgtcacccatcgaaacgcaaggacagctcgaatgaagtctacacgcaacttcggaagtcccatacagacttgggggcaaatattatctcaatttttgcacccttacgtggcatcacacgatagtgacacgtggaatcaattctatttacctggtcgcaagaaatatgacgaacaaggcaccacatatattcgctcggacgaagccttcttaaccgagtagtgaacaatccgcgcagcacgccaacacttaataaattcagctttcgcatcgtaagtcaccgaagaaatccctataactttgggatcagatcacagagatatggcaagctatctgaatcccttgattagtgtattgtgtatttaatatgtaatctttccacttatattaattgtaatcagaatgaaaattcttccctcccaagcttatagccctataaatagtgattcatactcactgaggaaaagatcgaaaaacttat

SEQ ID NO: 35454 - DNA, 2108 bp, Cannabis sativa
tattgctttcaaatatattaaaatgaaaatgacttgtgctaataacttatacgtacggagaagctagttctataaatggtaaatagctgtataaagttttaagtttataagcagcataaattaaattcaaaatttatttttaacggcataagtactcaatgtttataaaactgtaatttttctttagttttgtcagtatagactccgttttgaatttattaaatgaacatttggaagtaaatgatactacatgtttctgtctagacccaattattaagaatctggaccttatatgtggtctgtttaagaaaataacagagtttgtattaacgaaattagagaaaaattacagttttacaaacattgagtactgatgccgctaaaaataaacattgaaattatgccacttacatacttgaaactttaggtacttatgccgctatttacccttctataaatatatatatgtgagcaatgcatgatcactacaaatttttttacttcagtcacaacaaaacttgtgattaaaaatgaaaaaattatgactaataattataaattattattcttattttatgattaaaaggtctatgcctaaatgtattagtcacaaaaattacaatttattgtaactaaatgtatttttagtcacaatacttgttgtaactaaaactaaattagtgacagcttataaccaaatactatattttaactagtcacaagtaacattttattgtgactaaaaaattatcactaaaagtagcagttttttttttgtagtgcatggtgagatttatttagggcatttttcatctatgtacaactaaacttactatattacattatatgtgccaaaaataatatttacataatagttaatgtattgtgtctattaatacaactaattatagaacttaccatatatattatattcaaaagaaataaatatcttcctatattaattgcataaaatttatactactattcaaaattcaaattaactgaagctaactatttaattatttgattatattataaattgatatttgtatttttaagtaattcttaaaccagttaataataaatataaatgtttattatttttcacgttattttattaaaaattaatttataaaaaattatacacataaatttataaaatatgtacatttaataaacaatgttaatatatattttttataattatgtcaatatatgtttattattaaaaaatatacatcctaaaaaaattaaaatataaacacttctataatataatagccatactataacatgtttattaaaattttacactttaaaaataaaaatatacaaataaactacatatgcatattataaacaatttcaatgtatatttattatttaaaaatgttatttatttcaatttctaattaagttactaaaaaataaatactaaaattaaaatatataaacaattatgtttatattataattattacaatattacatttactaaaaattaactagaaaaaaaattatatagagtatgtgtgtgtttaaaatgaataatatcaatttatgtttattatttaagaatgttgattatttttaattttcaattgaagtactaaaatataaacacataaaatttaaacatataaacatttatgtgaatattttattctattatcaatataatatatttattaaaaattaatatatcatacatatacataaaatttttcactcacaacttacatgtttattatataaataatattaatatatgtttattatttaaaattatgaattattaattattatcaatttattaacaaaataaatattcaaatttaattaagaaaactttttattatatacttagtatacgataacgaaaataagtttttattaatgaatatattgtatgtctaaatgtaattaatatttattattaatgcgtgtcgtcagccacaacaaatttactattttttttttttatttctaatacttctaattattaaaaaattggtgtcaaaagttagaaaatggggttttaagattgaaattaaaatagcaaaaataaaagtaaaagaaaacaagtttaaagatagactacgatatga

SEQ ID NO: 35455 - DNA, 1272 bp, Cannabis sativa
gacctcttcagtattcgtagcctcagcgtcctcaggaaaaagatttcccccacacccttgggtttgagtaggtgacatagcacgaaaagcttctgccatctcagccgcctctgctccaaggatcgagaagtcaaagtctggcaccttggatagagtcgtgtatatgtagtcagagactacttggtcgtactgcttctttccattttccttatcagcctccaaatcgcgagacaactcctcgaccttcgtttgagaaagtttggctccaagttccacctgctctttggacttccggaggttctctagttcgttatccttggcgatcacatcttgcttcagcttcttgttgctttcctaaagctagatgacctgtttctttagaagatcaacttctttagaacctgtgacaaatgccctcgaaaacacggtcatgaattgcgtggctagctctgcccctagcgacatcatttccttggtagggatcgcttccaccttcgacacgaactcgtcgctcacgaacttaccctgcagagtcacataatggcgggccttgacagccgggtcaatcatgaacttcttccccttgtcctgcgaaggcttcacctgcttcttggaagagtcagcggcaggagtaaccacgacgtcactcttcctcttctgagggacgacaagataagtcgtcgctgttccagccttcggcttgtgattgagcacaggagcttgcttcaggaaagtgatctctgcgaagacaagaaaagataagttaaaaataaacaataacttgtatatatacaacttatatgcgtgatgtgttaacttgatgttggtcgggaggtctgtttagaaagacgcttgtctattttctctttctgcttctcagatggctccttgtacactggctcccgatgaaggctagcattctatgaaattagtttgtgttcccgcaacttcaaggtcgtgcacagtagtcgccagtcgcgatcttgaacagggagactatcgagaacttcagcaacttctctgcgagctaggtccaatacaggtcgagccggtttatctgcaatcaataagaaagaacacgtttgtcgatatcataaggtagcacgaatatcaactaagtgctaaaatatgcgacgtattaggttgacgattaaaatcggttctaatccctggtattttaaacacatagaaccatttagatttccaatctcccatattggaaaccattcattctaccccattaatttcagaagtggcccatttgctgaagca

SEQ ID NO: 35456 - DNA, 1389 bp, Cannabis sativa
tccaaaacatcttaaatcgtccaattctaagttttattgaagaagttatgataaaaatactaatcatgtgacaaatttttttcggcaggatcaatttgtggccgcgacgaggctgctcatggccgcggcgaggaggtgatttctgggcaaaatttgtacatttatctatttttttagtgacatatttttaagggttataaataagacttctagtgtacgaattttagcacttttgagctacaaaattgaaagagaaactcagagagagagaataagaggaagacggagattacggcttcgaatgttctacatcataattcttttccttatcattaaactcttactatttattatgattttgattataatgtatagttttgagtagtttctttttagttaaggattatttcaaaactcgaaacatgattttttagtttcattgatgaatgttaatttctagtttccattatatcaaattgcttctattcttctatgttcaatgtcatgattgatgttttaatcttatttagatgatcactaaattaaattttgatttaatctattgtaatcttaggattactattcacctaatagtctaggattctaagtgttttgataaattataatttctaatattgtcaaaggtatctttaattatgatgacgaatagaacctatgttaaataaattatatgcttcattaatttattgtctattaatctatctccattgaacttaaagctttatctaagttaaataaattacatgctttgtggatttattgcttaggtaaaagagttaattagtgagcgattcgcattgattacatgcaatggggagagtggaataattgattgcttcaatgttatctcggggtttaatagtttgattgaaaatctaaaataacattcattatttggaattaagaatgattgttaagggtggagaactatttcttgaatatcgtagtatatcattctatttgtttctttttatttatgttatttaatcttcataattaaaacctccctttgtcattcttgttactgattttgaataataaattgataatagtccttgtgggatcgacctgtatttaccgttatactgaagtaattggtaatatatataaaaataaaaattagtaaatttattgtggtaaacgatacgcatcaaatttttggcgccgttatcggagactattttattcatttttttcttgttactaacttgttctttgagtacgtagtggttttaattttaagatctttctttagaaatatggcgatgtatgatcaataatactgtgatccatattatatctcgccacaagtatattaatatgatacctactacgacactcacgcatacaatcaataatggggagatt

SEQ ID NO: 35457 - DNA, 989 bp, Cannabis sativa
ttgacagcttctcttggaaataacgtcccaattatgtgtggagaagtatttttgaaactaagcaattccttcttgctggtgtgaggaaaagcattgcaagaggctttgaaaccagtatattggatgacccgtggctcccagatggtattgatccttatgtgcgttctgtaaatcctggccttgtgaataaaaaggtctcttctttaatgtgtatggatcgacttcaatgggacaaggaaattttagaagacatgtttgatgtaagagacagagatttaattctaaacattcctttaccccaaactgtccagaaggattgttggacttggagcagggagaagactggggtgtattctgtaaaaagtgcctatagagggatgcaagaacactctattgtttctggtatgcctactgagttttggtctgcattctggaaaatcaatgtgcagccgaaggtcttacaatttgggtggcgagctctcactggtactttagctaccaaagtccaactcaacactaagcatgtgcctatctcccaatcctgcactttctgcaatgttgcagatgaaaccatacaacatatattagttgattgttcttatgccaggtcctgttggcatcgttcctctgtcaacttctcttcagctgctagcacggtgtatcacgagtggtttcagcaagtaatgattagtaacaacacggggcagattgaagaagctctaatggtgacttgggcaatatggaatgctcgtaatcagttactctggaatcaaaaaagtactgctgctttggatgtggttctgtcagcaaggtctaatctttatcaatggcaaagtgctcaaaaaaatcgttttgatcttcttttatcttccttcgagataggtaaagaggtagagcattggactaaacctgttggaaacaagataaaggtaaatgttgatggagctatctttgaagcttacaactcttttggttttggttttttagcc

SEQ ID NO: 35458 - DNA, 2253 bp, Cannabis sativa
gggagtggctcttttatggaaagtggaagaagaagttaaggtactggaatatggggtttcttacatcgatgttgtgattagtggtagcgatcaaggacattggcggttgacaggcctttatggggaaccgaatagaaatttgaggaaaagaacttgggatcttctttgtgagctgaaatccaagtcaagcttgccttggtgtataattgaggatcttaataatgttacctctcatgatgataagaggggtggcaatccttatccgagatggttacttgacgggttcaatgatactttggctatgtgtggacttcatgaccttgagctatttgggtacccttacacttgggagcgatgccgaggtactgtggattgggtggaagttcggattgatagagccttggtgactcaatcttggttagacttttttccctcagctaagctttttaatttagaaatttccacatctgaccacactcctttacttttaaatactgtcaatcaagttgtggtggctaaaaatagttttttccgtttttaaaattcatggcttaaagaaccattattttttgaaattgttaaaagcagttgggagccagggaattcggtgggtgttattgacaaagtaaaacattgtggggaagtgttattgagttggggaaaggattattctgggaatttttcaaagagaatcaaagattgtaaggaagaaataaagaagtggaagagaggccaagatgatatttccatacaaaactataaatcggctagtgctaaactgaatgatatttttctgcaaaaggaaatatattggaagcaaagaagtaagcaactttggttgcaagagggagatagcaactctaaatatttccatgctactgccacggcaagaagaagaagaaattcgatccagaagcttaaagattctgctggaaattgggtggactggcaggggggattatcatcggttgtggaagattatttttctcagcttttttcttcatcagcaacagcaggaaacaatgatattttccagcacttttcagcctcagtcacggctgttcagaattaaaaactgctggagccggttacggatgtggaaattcgtcgtgcgctctttcaaatgcacccggataaatctctgggtcctgatggcatgacaccgggattttatcaaaaatgttggaacactgtcggtaacgacattatcactcttgttcagaatttttttgttgttggttcgtttcctagagagttgaactatacaaacattgtgcttatcccgaaaaagaaacatcctgaatctatgactcatcttcgaccaatttcattatgtaatgtgctttacaagattatttcgaaggtgttggctaacagatttaaagatgtattgccgaatgtaatatctgataatcaaagtgcttttcttccggggcgtcttatctctgataatatcgtggtagcttttgagatcatgcattatttgaagaggaaaagagctggtaaagaaggttttatggccatcaaactggatatgagtaaggcatatgatcgtggggaatggtcttttattgaaaggatgatgcttcatatgggttttagtagtcattgggtgcaacttattatgttttgtgtgactacggtaacctacaatgttactcatggtggacatttcatgggacctataagtccgggtagaggtctgcgacaaggagatccattatctccttatttgttcttgatttgtgcagaggggttttcatcactgttaaagcattatgagagacgtcattggctaactggttgccgtgtagctagaggtgctcctatggtttcccatatgctatttgctgatgatagctatgttttctgcaaagcaaatgagtatgaggctcaaaatgtgattcggcttctcaacagttatgaacttgcttcggggcaacaagtaaattttactaaatcttcagtcttttttagtaaaaatactactgtggctgtccgtgatcgcgtttgtggtgttatgagactgagtgaggcgtctaatgatagtttttatttgggtcttccatgtataatggggcggaataagaatgcaattcttggtttcttgaaagagaagatgaagaagaagatctttagttgggaaacaaagttcttatccaaagcggggaaagaaatcttgataaagtcagtcgctcaagctttgcccagctatgctatgagtgtctttcttttgactcatgagatttgctc

SEQ ID NO: 35459 - DNA, 972 bp, Cannabis sativa
aaattctgagtcaacaatttggttcttttactaagagcattttcctgatcaatcaccatgattttaaatagaagaacttcccctttgaattctcatcaggatcccatgactggaaatcctaatgctagtgttccttccaccacagacgaacctaccaatctagataacactgtcaatacaaacaatcatgtgaatcctattaatccccccattcctccaaggatggaacaacccgcagatctcacacaattgggctagtcaacatggagcaacctccacagagcacaactagggctattcaatagtgctacgtagaaaaaatagtgtcaaggagcggcgaactagttattgttgagcctcagttggcactgggagataatattgagctggccaggctcagagaatctataggccaggtcactcagaaaggagaagaaccacgcactggtggttgttatgctttcgcccagtagagatgcgaattcctaagaggacaagaagaactgttgctggtggtgatactttcgcccatcagatatgtgaattcctaaagtagatggattactatgaatacaccctctacacctgccaagcagaagtaaactgtcgtaatcaggaggacaatgacctgattcccgccaaaactttttccagcgcgttacatcaccggcaaaacatcgtcagagacacatcagctggtggacctattacccacgagtacgttataccggcaaacaaatgtgctggtgtaaatacttttgccggcgcaagtctttatgtcgccgacgaaaggtcattcgccgacgagccattgccagcagcttttgtcggtgaaaaatggcaccggcaaaagattgccggcgagttacacgtacttttgccagcaagcttacgcgccagcaaaagtagcttttcttgtagtgtgataaggtagttcaatgagagaactgctagaagaggttaggatatgat

SEQ ID NO: 35460 - DNA, 4605 bp, Cannabis sativa
gatattagtgtcccgtttaggcgagacactacaagaaattaccccttctataacagatgagtataatatttttcaaaaagtattataataactaagactaaaaggcggtagagagagtgagagtgagagagttttgtgtctggtgtatcgatatgctgtctgtttgtgtttcttaagggaaggtcctttcccttctcctttgctgtgtcttatctatttcttaagggagtgtttgtgctgcttgtgttttattctctttgccggtttgtgttttggtttctcttgcgttgactcttgtggggcagtgtgggagatttggtgtttgtgcttagtccagtttgtttattaggtttctgtgggttggtggggttggtaaagattcttgctttcttccttttgtatgctttttgtcgggtatttatggagtccattattgctaccaactctcctttaaaaggcaagtgtttttcctgcaatgaaacttctgtcaacttagctccgtgtgcttcatcgctaaatgctctagcatcctgctgtctatatgggaaagtcattgctcttatggttgtggaagaaccatatgttgtggagtttgtggcaaaagtgtggaataaacaagtctctgttttggccaagggggatggttcaaaggattctaacgtttttaggttcggctttgcctctgcggaggataggaactgggctcttctccatggcccctggtgcatccgagggtatatgctagttctctgagcgtggacaccggctactgatgggccggtagtgtttcatctcttgcgtgtggggatccatcttcacaatctgccccatgaatacttttctatctctaatgacaatctgttgggagggttggttggaaaggttgtgaaggtagatttgcaggaagaaaaacctgctctgtgggatgattttttgaaagtgcaggttgatatcgacatcaacaacccccttgtttctggttttttctttgatatggctggtacaagtgaagtatgataaaataggaattttctgctatttttgtggcaggctgggacatcaacggagggggtgtagcttgtcgtcgccggttatggttacgaatgttaatggcactccatttcctatgttcggaccctggctctccacagcctttgcgtaccgtgacgtgttctctgggccgaaacctttaggttctcatcgtttgttggctgcgactcaaaggaaggcgactggaaaattgatctcgttgccagcgaccatggcgggtggtggagaagacccgaagctcatcaactctaaccaggtgagaaggccgaggcgccctgcgatggtgacctctcgtggcgatgcaatcctcgggaagtcctagcgtagggcgtggcttcccaagtccggcccttttcgatccgtcaaagcaattgcctcttttgggaggggaaaaaatacggagggcctggatgaaggaaaggcacctgcttgttttcctattgtggtgttgaatgaaaaagaccggccaaagaaaggtatacaagatttgaatgaagagaccgttggagataatggtctatgtgctgggcctagttctaatgggtcgaggttgggggataatggtgggcctactcttgttatttctgatggtgtggcttccaacccgaatgggattaatgaactgggtattgggccgacccctcttgggccgtgtttgtcaactaatgagcagaccaatctttgtgttacctctcttacaattgggccttccttgccagatggttcttttaaaccgtatgggcctgagttgaaagagagcaatggatttgcatcaaatgaaggtggtaatgggaaaccaagggataaaggttgttcttcattagtaattaataatggagggaatgctcagaaaggaatcgggcaagctgagaagcccacttcgttagttccctctatcgaacctgatgttgtttgtggcaccaaagtgcactctgatgaagagaaggcactaactaaattttttcatgctcaagaaaaattattatatgatcttaaaaattttggggagctggacttgtatgagattcgtaagattggaggggatattggagtcccggcttcatcgaaaatcaataagaggaccactcctttcaagaaaagaaaatttgaagcctctgcctccctttgttcgaggccgcacaaaattcatcggaaacatcctgatgttgttcgtgacttcccttgggatactaatcgtcgtcacaatgattcaagagagttatctgatgagccttctgaggaatcgtcgaaatccctgagccgatctggaattatgaaaaacccgctagttggatcgtttattgtggatgactctggttctagcgtttctgcttactctcatacccctgtggaggagaatgttgaatctcctccacaggagtcatgagaggcattgcttggaactgtagagggttggggcagacctctacagttctcgaactgaagtccctgatcagatcgcgctctccggattttgtttttctgtccgagctaaaagtggatgttaaacctctggtacgtactcttaaaaatctccacttttactttaatatttgtgttcctccgtctggtactgctggaggcattattttggcttggaagatgggatttagttttgaatgtgtatctagtacttgtaatcatatttctgggttagtgtattcagacccccctagtcacccgtggctcctctcttgtgtttatggtcctccctatatgaacaccaagaaaatgttttggtctgagttcttgaagttaggagataaatttggtggcccgtggcttattttgggagatactaattttgttctcagtgattctgaaagggaaggtaccttgggtcgagatccctttatcccggtcatctctaatctagttgactcctgtggtcttattaatatgcctattcaaggggataagatgacttgggataatcaccgctctggtcggagtcatgtaaagtcagcccttgataaatggttagttaatggagcttggctcaatctgtttcctagagcgattctctgttctatttagactagtaactctgaccacaggcctctttgtcttctttcgggcggcaaggaaccgaggttccagagatgttttaaatttgaagaagggtggactcgtgatgagagaagcaagttggtagttccaaatgcttggaagtcagttagccattcttggccccctgcccgtgtgtttaaaaaggtgggtgccacaagggtcgctcttctgcactggaaccgtacccagttttgcaagctagatatggtcattaaggacctcgaaaagaagctcaaagatttgcagagacttcctgttggatctcgagactggaaccgggaatgtgatttaagacgtgagctgaatgaatctcaggaaagaaaagcgatttactggaaacaaagggcaagaatttcttagctaaaggaaggggataaatgttcaaagttattctttttgtctgctgccattaaagggagaagaaatgccattgagagtattttagataaaaataatctctggatatctagtcgtgagcttattggtagagaattcatagactttttcaaaggtattttctcaggagcggataatggcatggtatatgattgtagtcatttattccaggagagactctcttgggaagaacctgagtctctcatttcatgccctagcccagatgagatcaaaagaaccatttttgccatgaataaccacaaggctcctggtcctgatggaatgtctgttctgttctataagcactattgggagtctgttagtggtgatttctgtgaggcagtctctgactttttcattaatgggagaatgcatagaggtatcaactcaactaatgtggttctcattccaaaggtccagaacccgaaaagaactaaccagtttagacccatatccctttgcaatgtggtatacaaggttatttctaagatcctggctaacagaattaaacctttgttaccgtcacttatttgtcctactcaagctgcgtttgttccaggaagaaacatccatgataacaatgtcatagttcaagagataatacactctttcaacagaaagaaaggcaaggaaggtctttttgcaatcaaaatcgatcttgtaaaagcctatgatcggttgagctggagatttattgaccacgtgatggaatgcgtagggactcctgtgaagttccgtaattggatctcccaatgcatttccaccactactcttaatttttgtgtcaatggaggtcaggttggaaagataagcccttcgtgtggtttacggcaaggtgaccctctctcaccctacctgtttatttgggcggcggatgtgctatctaggttactgcatgaagcccttgcccagggaaacattcaagggattaagctaagtaggggtggcccgactctttcccatatcttctttgcggacgacttaatcttggtgggcaaagctaatgtaaatgaggtcaatggcttctggagatgccttgaaaacttctgcaattggtctggccagcaggttaataggctaaagacttct

SEQ ID NO: 35461 - DNA, 3302 bp, Cannabis sativa
  modified_base (520)..(520): a, c, t, g, unknown or other
ttttctaactcatgtatattttatttttttctaaaaaaatttcttataattttttattttaatttttttgtcatagtatttaataaataatttatttttgtttgatagttatattttttaagaatatgaatgggaagaaaaaagtttaaaaaacttactacaattaaagatataaatttcataaaaaatgaaaattattaaaatggggtgtctttagatatttttggggtgtaaataaaatttccctagtgtgtaaggtactttttttttactaattttacaaatagagggtacctgataaacatttttcatattagagggtaccaaagttatatttaagttaaatattgggtaccaaataagtatattcccaataataaataatgcttgagttactacatctattaataataaagtttcaaacaatgctgctaaatggattattgctcacaacttatctagtatgagattttgacaatattatcaggaggtctaattttttatttataaaaaaaaaaanaaaaagaaagaaagaaagaaagattagttgcaatactaataacatgagattcaaatttattgttttgtggtcaaattgcttgcctcaaaggattgcctagtgggcaaggaaaggaccaaagaagtgagttagatgcatggagtcaaacaaccttagtttacttaaagtgggagtaagataagtcttcctactaaaagaggtgttagtactaatgtgcaagtcttatgatggtgactccataccccgagtatgggattgttttgcgactcataccccttaacaagccccaagagtggtgaatcaagatgagatgagaggcagccctcgtaggcgaagtgtctccctagattgttcattgggagctacttgtaaacaaaagagcagctttatacaattgaagttttcaaggcaagcggcggacactttcatcttggaaggaaaaccttagtttaacttacagcaagagtaccattaagtaaaaggtcccataagcacatagacaaaggagactcggtcaatttgagactagttgagttgcgcacaagctgacttgaacacacatttatgtcccccaaaaatcaatttgctttattttcaccgacgaaacattccggacatattcgtgttcatagaatcttgcactacataactatacttaatcgtcagcattaacattaggccttaatagcaacaagagtagaacgtgttcaaggacggaccaacagtctcttttattagtgttttcagatatccctgtacaaacactcaatatgattgaaatccatgacctgtaaacaatttacactactctccaacattgttggaatcaatatgttttcttatgtaattgggaggttccctgtgacattcttatcatggcttcaaagatttttgacctgcattagaagtcatccaagatgtaatcacttctacaagtaggtttatatcttttgatatctccgtacgaaggatccttgagtctgtgcctaatgtattaccaacttctttggctacagtctcccatggtgtacctgcagacagatttgccagaaactcgcttccacgatttactgcatcagccattgccggtggaacatctggaagggcctgcaaaatgaaatgttccataatattttggttcttttatcatgatctttcaatcaaagcatgtcaaacaagaaaatacgaaatacctgttgcaacggaagcccgtgatcaccaggcatcaggcgaattgacatgtccagcatcgaactaatggctgattctgagctaagcaactgtgccagtgttgaagtttcatcgattgtatcatctttaaatttcaccaaaagatttcgcgaaatgccatagtatgactttatctggatagataatcataaatagagagagagaagcaaatcaagaacttaataatattaaattgagaattccaaactaaagtcctaatattgcaatgtctgaaaagagagaaagggacaacccaaagatgccatcacatccctcaagtatatccatattaactcaaaaatcgcttagaggttttcaaaaagcaagtgtacttttttctggggggggaaaaaccagcaaccaaaaaatatacaatttcttctagaaaatgcatgatgcagctaacttactgatggtaagaggattttgcttaccagtcttctggtttcttcaggttttggaataaagtcttctcttcccttcactaaatccatgtacaacggaggaagctgctcaaccaaaggaagaacttgcttcataatgggagggctaaggttttccagttgcttcagagtcatctctgcctgcaagaaaagcattactatgtcagtctggtatgaagaagattagaagtgtttgactgcattactatcactaccaatgatttacatcattcataattcacaagtgacaggacaaaatgcaagtaattcacagtgctactaaaaagcacacatacacatccaaaagtaaaaaagtggccttctcaccgtgagacgtattgttggtgatgatgcaatctgtgacaaaattgggccaatgctttgagccatggggacaagtacaggtgagaacaaagggatagctgagcttgcttcctgtgacatgggagagaaattgtgtaaacctcatcagttctcaaatgggattagatagtatattttgttaagatttaagacatcttggttgatgattaatcaagataccagttgataaaatcttgcactactgtatttactagttgtccagatttcatagaatctgattttagtttcctttatttcacatgtttcttattttgtagatttataatcctatttggtaggtggtatcatcatattctattatataatactatattaaaattgtgtcgtatattcttttcttttttttttttttttcttttgcagaatgttctatattctatttttatataatatcatgtttgatattgacttgaatattccaacataagtattatataaaaatatattgacaaaacagacttttagagttatttttgagccttcaaataagtttgtacattcttctttagaggacacaatacagtgatcaatacaactttcttttatatatattcttttctcttcaaattttctgttcatattttttctacctaaaagttaatacaagtacaggattatgggactgaatttctctcagcccaaaaatgttgacataccttgttgttaaatgccattaacacattcccatttctttgtacagcatatcttgaacctgataaaaaaaa

SEQ ID NO: 35462 - DNA, 1346 bp, Cannabis sativa
tcgagacgcgaacccgaactaggacctatactaggatctaggagccggacttggatgggggacctagaccagggacctaggccttggaaccagacccatatctaaatctaggactcgaaccttaaccatgacctgacctggacccgggaattcgaagtcagacccagaaccggacccaaaaccttccccagacccaaactaggacaggaacctagacatgaacccaaaccagaaccaaacccaaactcagacccagacccaaaacctagacctgcacccggacccaaactcgaacccagactgggattggaagccaagacttagaccaggaactaaacccagactcagatcgagattgaaacctgggactcggacccaaacctggcccaaacccaggaccctaaagcacacctggagcccgatctgaacctagaccgagatccggacccgaaccaacactcggaccaggactcgagccccaacccgaactcgaacccaaactcgaattcagaattgcaactggagctggaatgggactaggactaggaccaagaccaggaccaagacctagacccaaactcaaacccaaataaaaacccagaccgagacccaaacccgaaccgcgactaggacccaaacccgaacctagaccgggacccaaacccagactagaaccgggacttgcaaccagaatcgggatagggaactgggcatttgaacaaggaccgagacccaagacccaaccccagacccagacttaaaactaggacccagctcgtgatattacacccaaaatggaaccagaccaggactcgagatcggtgtcttgattttggagccagcccagacctcgacccagactaggtccggaacccagacccgaactcaaacccaaacctagacccgaacgcgtaccctgtgacccaaaattggaactcaaactagaagtagaccaagacctgggaacgggaccagaaccagaactttgacctggacctgaaaccgtaaccagacctgcatgtagaccggaaactgtaatcggaccaggaccacgactctaacccagacctaaactcgaacttggacccagacccagatcccaacctagacctagactcagtgtcgaacctggactcgaactcaggcccaaacatggaaccagattcgggacacaaaattggggttgagagctagaaccgcaccccagtctcggtcccgaacccaaactcggacctgggactcaggacttgaaccagaactagaccaagacacgtgacagggatccagatttgggactcagaccaggacccaaacccagaccttgacccaaactcgggacccaaaat

SEQ ID NO: 35463 - DNA, 1826 bp, Cannabis sativa
  modified_base (1767)..(1769): a, c, t, g, unknown or other
ttatgtagataaaaattatatagatattttatataaaaaaattaattgaaatttaaaatacttaaaatattacagatattttatgtaagcaaattttaatattttaaatattttatattagtcttctggtcatatttagtgtgcttatattattattattattattattttctttttgaccactgtataagtggagtgaaatctaatgatttttatgattttatggatcgatgcatttcgcataatttttaaatgatcttaaaatataatttatataaattgttttttcatatcaaaattgaaaatatttttagtcaaactataattgtaaagtaagtcaaactgatcttgaaatataatttatataaattattttttaatatcaaaatcgaaaataattttagtcaaactatatttgtaaggtaagtcaaacttaatatgtcatgattatataaagtattaattattggtaggagttatatatacaccgaaattactccaatagttaaaaaaaattctcaaaaatcaaaatatcaaagctcattttaaattttttttaagaaaatacattaattaaaaaaattaaatatacatgtattacacttaacttcacctaattaaatttaattaaaaaaaaaactaattataacatcagtatatatataattgggtatgcttatcaaaccgctgagatcatcaatataaaaacctagcgtacataaatacaagacattggcagaataatatagacatttaaaaatataagacaattctttttataaaattattgtcttgtttgatgatgtagagttactaacattattattagtgcaatatatataatattggtaaaggatggtgaaaggaagagtatgctggcagtccaaacaatacgaaacacccaaatggcttcaattttcaacgcttcagtagcgattctagtaaacacaacattggcagctctatcaaataattcctacaaagcaagccatcttcacaaccatgcccttctcggctccaaatcatatgaaatcgtcgctataaagtacgcctcaacgtcattcattttgttatctagcttcttctgcagttcttcggcccttgcacttttcatggacgcaaattattcgataacagcttcctcattagatcacgactctacgtcctttacatttccaaaagtgattcttgaacgtggtaaccttttggctcttattggaaatcgcttgctctggctatcctttcctcttctcttatggatgcttggtcctttgccattaatattctcatctgcagcaatgatttggtggctctatgaccttgattttccaagatacattaatattgtccgtaagaaatgtcataaatgagacatgggacatagtcacagaaaaaatttcctccattagacattgtatccacacaagagccttgtcaaaagatctttaagttctatatctcaacttatatcaacagattcagcaattacgaaatcaatttataagatagctctatgttttttaacacatgtatacttaggtgtgaggcagggtagtacccacatataggcgagggatgcaactgcaccccaaatattaaaaacaataaattaaagtttgtatacatatattagttaattattgtaaaaaatttaaattaatgcaaaactacaaataacaaaatttgtgtattgcttgagttaactgatattcatggcaagggtttaagtccctgcaaagtaatttttaatatatctattctatatannntgtgcctatataactgaaattcttggtttatgagaattcatgggtgactttttattt

SEQ ID NO: 35464 - DNA, 2084 bp, Cannabis sativa
cagtaagttaatgctgtaatcaccctctctgatgtaatattttaaacttcaactgttaataaagttgaattattttcaagtaattacaaagttttattctttaaaattacttgaggggcatatatgtgtgttatgattaactggaatccatctgaaaatacatgatatattgcaaacccactccactttaaaatttttaaagtttttccagataattgataaaagaacctttctcgtaagaaaggaaagtcaaagtagcagttgtaaatgagatttaactcataaaaacaacattaagctacgtgcgatgctaaatgaataatggctcgcattttttaggaaagtattaaatgagacaccaagataccttgaaaaaaatacttaaacctaaaatatgaatacaaggcctaactattcatataagcaataaaaaatgtacaagataattcgccagacaaattatgtaaagtatatataagtttgcttaaaataaattataactgtttatgtgaagcagaattaataaactgctcgcaaattgaaagcagggcagacaataattgctcgtgcacatagtagataactaactacttaagtaatataaaaggaaaatacgagcaatggaaatgcttcaagtgttttaaatttgatcaaagtataattgtttaatttgtgagaaaaaacacaagtaacagatgtatttagttcgaatgcaaaaatacgaggcattaagtaaaagataaaataaaaacaaagttggccatccaactcaaatctttacaaaagtgccacaaggggcaatccattgtctcggccataaggccattttcctaaataaataaaaaaaaaaataacttaaaaatcgagcctacattgtagaagatttggttggatcttcttgttccacttcaaccttttcttcctcttccagttcttctttcctagtcttctcgctaaaggcaagaatggcttcggcattgtcacccaaaaagctaaggtccaagtcagggttaactgaccagatttggtagatggtcctcctgccgatactattgaccctctttggtttcagcctccaattccttaagcttttggtcgtgatcaacctgctttttgtcaagatcagcttggagagacttgagagtgtcctcgagttccttgaccttcttttggtcggccagatgctgcttttctacttcttccttggtgcgagaaacctcggccaccgaatcgttccactttttggcaagagtatccccatgttccctgatctagcgaagttcagtctcgagcatttcgactcgctgagatgaccaatgatgggtgacatgggagaggaaaaatgcctgcgagaagagggcaagttaaagttagtaaaaattgagaatgatgaaaagtgagaacaagaagaaaggaaaactaacctgatgcaaaagttcgtaactccttttgaccagatcctcagagctgcctcgcatagtaagatcccagtcgctggatccaagagtcaagaggttacgccaaccattagtggcatgctacgagctgagttgcgatccctcagtcccaacttcaaggggtagggggctggaaggctcgaggagaaccatctctggatgagaactagagaatttcacttggtgcaccgacccagtgagctgctcctcggcattctctgcagcagagacctcattcctacagtagagacctcattccctgcagcagagacctcagtcgcttgctcgggagacttggcagcctcgatggtaaggtggctcgaggatttcttctttttggctgtggtttcagtccttttgggttctttggcagaaccagaggcctcaccagcttgaacaattctcttcttagactacttgtcgactgggggaggactcttgaagatgtctccaaatccacatccatatctgcgaggcgaaagaaactcattagcacttaaaccaaataaataagtgaaaaagggaaagaactccaaatccacatccataatcttcagaggatgacgagggaggactataatattcactaaactccctagatcctgtgatcataaatatatcataagg

SEQ ID NO: 35465 - DNA, 1279 bp, Cannabis sativa
tcaattaacgggaatatgattacatattaccctacacagccaaacacagtttacacatttctctataatcatattttcctttatgatattccctataatcaaattattttgaacacctcatatcaaacgccctctaaaattaatctcacgttctctgaagtcaccctaatattttaaattagcaataagtaaagttttatataaaataaagtataattataacataaaattaaatataaaatttgaaattaagtaaaatgaataggtattaaaaatatttgagatggatactatacaatactttaattaattattatgaaaatatatagttaaaagtattgtttgaattattatttatttttttacataacaaataattttatgttataatgttttttttattatagcactaataattttttgattattaattttagtattttaacatttataaaaaatatattgaaaaatttaatgaataagagttgaaattaagatttatagtatttattttaaaaaaagttacaatataattaatataatttgacaaattattaaaaagtacagtatattatcacatcgatcatcttatgttaccatttcaattttcttttaaaaaaaagaccaaataattaatattttattaatattaaataaatatgaatacaaaattagctttttcattatcatttttactgcaccgatcggtgagatctacaaaattagattttatctagacaaggtgtaccccactttcttcacgtacaaattaacttgtatattatcggaagacacgataatattcttgtttgtttatcgatcgatgtcaatatacattattggcctcttggtttaatttgaagggtggttgcctggttaggtaccctacaattattactatacacattatttggaagaataaattattatgtatattataatataaggttgtttaaaatttaaaactccctttgctctttcttcaatcatagacaatattatatgaacaatctttaatcttatttttcgaaagtgatagtcttgcaaacttgtctatcttaaaaaattgctttcttataggtattgaccagcctttaatacatctatcgatcaaagttagtgttatggacaatactatttttttaacaaatatatacataggacacttttatactaaggctgtctcttttatctctatgatagggacactttattacacattgattaatgatccaatggtgagaagaatgtaaaaagtatgatagtatcgactttacta

SEQ ID NO: 35466 - DNA, 1446 bp, Cannabis sativa
taattattaaaagataaataaatacttataaaaatcaataaatataatttattaggtaagatattaataaatcacccataaaaaaataatatttcttagacaaaaaagtgttgaaaaattaaagtattaattataacctacttagataacacctaaaagatctctaaacaatgtgggacttttagctttgtatgtatagtttatttttcaaataaaataagagaatatgccaaaaaataagaaaaataggaagaaagaatagtaaaatgccacctaaactcctcttgtgcattcctttatgtatatatattgattgattgatgagaaaatggataaaagaatatgaattaaaattaacataggatgccacataaatcattttaaagttcatatttttgttattaacaaattgatttttttattattattattatattatcatttttctgatttttatattttgtaagtttaatttaaattatttaaatagttaaaattattagaaataaaaattgacatttttttacttaaaaaaaatactttttgtagtttacattataaattaaaaacaaaaatataaactttaaaatgatttatgtggcatcctatgttaattttaattcatatttttttttatccattttctcattgtttatgaataaaataaaaccatcaatatcaatatatttaaaataattttaatattatgtttaaattcatggttgaataacttaaattattataacaataaataggtttatttttcctaaattattactaaaaaaatcacatctttgaactattatcgatactaaatattctccaaaactattcaggtaactaagttgtgaccattctcttactttttgtcctacatgaattttattttatttttaaaaggagtccaaagaatgactaaattataatgatattttaaatttaaattttaattatttttttcattgttcattttaccaaatatttaattgagtaagattgagttaatcattcgttgattcaatgaaaagaaggatgagtgatatatttataagttacaagtctaacattaatcacatttttaagccgtgactttttttaaaaaataaaataaaaattctataataaatatctatattatatggaaataataaaaaatacaaataattaaagatgactaaaaatatctaaaatcttagaaaaaatttagttgtttttttttttatttatttaactaaatatcaaagatgttgtcacatcataaaaatgtatcaatcacccatttagtgaaaaaaagaatgagtgatatatttataggttacaagtctaacattgatcacatttctaagctgtgtgggacttttatagcatcataaaaattatacttttataataaaagaaaaaatatgcactaatcacattttctaaagaatataatataaggtgtaa

SEQ ID NO: 35467 - DNA, 1043 bp, Cannabis sativa
  modified_base (43)..(46): a, c, t, g, unknown or other
taaatatatgaaaaagactaaataccaatacgtgtttgatatnnnnatcatgtgttgatagattcgttcaaccataatccttcaccatcatcacgagatgatttgatatcatccccaacggtgacatcaacaggtggtggggtgatttgatgaatttggtgacaatactactaccttaaaatccaaatgccatttctttgagacaacatcatctcacgaggtttatcctactagccacttgccacatgcttttgctaaaataattaagaaagactaacaacaaattttaacgttaaaaattattgaaataattattagaaatctaatataataaaattaatatttgacatatgcttctctagttttttataaacacaaggcttgttttacgagagatactcacaagctcgaccatgactactgctatagccagaatgcaattggtgattctaaatctaatgccaataaaaagagatatgtattacttaggtaaattataaagtgttttttcttcttttttattcttctaatcaaccatttataaaccaatcatatcaacattttattttcaaatatatatttcattaaaaaaatttaaaagacataatatatattattttttataaaaactagtatatatattattctcataccggccggaaaatattgtggtggtggtagtcgaaggttgggctccggtcgacgacgacgacgtgtgaccacccaagactccgaaccgacgaagagaagaaggagaagagaagagaagagaaaggatgggctggctcgtgtcgtgcgatagagaacggagagggttgtggtgccatcgtcgtcgacaaagaagagaaggggctgggtcacgtcatcatcgacagagaagaaaagagaagggggttgtgctagagagagagggggttgtgctagagagagagggggctgcgaagagagagcgggctaagctaggttttgctgaaaaatagaattgggggggaaatataattaagtataaaaaaaaatagggggtatacccgacggttttaaac

SEQ ID NO: 35468 - DNA, 1839 bp, Cannabis sativa
taatgtaactattttgtatatatatatttatatatgaaacacttgttaattgagtattatttatgaataattattaaataaatttaattaataaatattaattttaaaaatattaatccatcaaattttaatctaatgaagaataataaaagagaaatttaaatttctatgcttaatttatctagttaattaaatatatgttcatataaaaatatttaagtcaaacttaatttttattatattttttttttcctaaaatttttaaccgataaaataatctcagtccatataatataaaaataagagatttttcatattaaataaaaaaattcaatttaaaaattcaaaattttctaattttatccgttaatacccttaaaaaatgcatctatttatatatattgtgtatatacattgtcatcaatattcttaagccacacgcatgttttgttttttacttttgtttttatacaaacatttatgatttataatttggcattcactttttctaaagcaacacttcactttactcttttgcttttggaaattttgttttatctactattaaacccaaaataattgaaataaacacaatcaaaccttcatttttttaattacaatattttgattctcaaatcaatattgatggtaatttatacaatttaatattaagccttatattttattttaaagggtaaatattattttagactatatattttacaaaagttatagatttgactctctattttgtcaaatgataaaacagaccatatattttctaaaatggtacaaataggacaatgaactaattttttgtcaaaataaaatttaataataattcgacttagaagtgttataacagaactggttaaattttctttatctgttcgtgttagaaattatcttcaagtttattatattaaaaaaattatcaaaaattgagttcaagttctatttctactatttaaaaaacatagagtttaatctttaacttttataaaatacagaattcaaaataatatttgctcttttaaatttgataataaattatattaatcatcatatcatatatatttaccacaagagacattaaagaatttataatattgtaggatcactaattaatgtaggtgattgaaaaaaaaaatatttagtgacgctttgcataccactaaattttttaaaaaattctcactaagtgtcactataattttttaaattcccacattatcataatttagaatttgatggattttccttactttgataaactttagaaaatcgctaagggcacatggtaccaaacatcataagaattgacatactgctaagtgtaaattagtatttagtctcacacattttgatttaataaagtgaaattttagaagtatctttttttatgtttatttacaattttacagtctaaatttttttacaaaaatacgcttataaagttttaaaattataaaaatacactttgttcaaaaaaaaaacaactaaaaaacaacaagaaatcaacttcacgacaatcataaatcaactataaataaaatataaaataataagaaaataatctcataataactataatacaaccataaataaattataaaacaatcaaaaaatagtttattgtttaaactgaaaatatatttttataaataaaaaaatttaaattataaaaataaaaatttctccatgttaatgtatatttttataatattcttttttttcaaatttttagttgattaataatttttttaataaataatataaaaaagggtaaattgtggcataagtacccaaagttttaagtttgtaagcggcataaaccta

SEQ ID NO: 35469 - DNA, 3199 bp, Cannabis sativa
  modified_base (28)..(37): a, c, t, g, unknown or other
  modified_base (318)..(322): a, c, t, g, unknown or other
tatatttaattgaaacatacctcttttnnnnnnnnnngtactcaaaatactctgacataaaggagttacatagagagtatattgaggtgacaggggtaaaattggtaaagtgtttaaaaaaagaagtaaaaatgataggttttaaaaaagagagtgaaaataaaagaaaataatataaacaatgtacagagtctaatttcctcaagatgatatggctaattcatgacatatataattgtaatttttgtttgtttagagaaaattataaattatatgggtttttataattttttgtgtaaaaatatagttttttttttnnnnnaaaaaaattattttatggaaaaaattaaaaaaaaaagttgacaaatatgaaaaaattaggtaaaagtaaccagcgtaactattggggtaaccaattacttttctcatattttttttttaaaaaaaaattccaaaaaaataatatattttaaaaaaaaaccccatatttttacaaatttataccttaaaaacctttctgaaaattccaataagtacataacgatatacttaagaggaggagaggtgtagtacttattaagttttgtcaactttgttataatgtacttacataacatattttttgatataattttggtctaatagtactatctttttgataaaaatcccaaatgtcctagattaaattatggctggataatattatgtacattagaccaaaattagaccaaaatgacaaatttgaacttatttttgtagtgaaactttatagtcacaacatacaaaattttgtggctaaatataatttttagtcacaacaaaaagttaatacatattttactcacataaaaaaagttcaaatttgtcattttaatttagataacctattatagttttactaattgatcaatgcattggctaatttttgattaatttgtttattaatatgcacctaacgtgtcaaacgtgttgacttcggatttagtaagttaactagctagtgttaattaacctaaaatttaattgtgtttaacttattttgacaagtatttattcatgctaaacccaatctcctaattttgtgtcgttttcgagttatgttatgacctatattaaattaaatagaattgattcttattaaaagaaaaatacatttcctaatctcccgagatagctcgctatgcataaagtttcaactactattctaaaactaattaaagtataaaccaaccattttggtttgagaaaagataaaataaaacgacatttcaagtcagtggagggggcattatatttagtagttcttgtacaattacaataattggtgtttgtttaagtcaaaaagctcaaaacttctaaagtgcctccgattgcaagggacattaatgaaaatgaaatattcaagttgtggcttttggtcaccaagtggacgacgatgcttgataagttggtcaagcatggttgaagaaaaggaggttaagtaatttgtgtgtgtgtgtacctatttgactgactctctttctttttcttttctttttttaataaggatcatttgaccctttgaatcaagtttcaaagacattgtaagttgcaaccaaattaatattatacaaatttgatgcatatatttttggatacgaacaacatgcatgttatgttatgtgtgtgtttagtcaattttaggcaggtttgcctttatgtgtagatgaaagggtgcaacaacgttaatttatatagtataaaaaaaaaagttcaacttcagcttcttaaaaaagcaataataaggttccattttggatcaacttgtgtggattttgcttgattttcctaacataaaataatcattattttgttaatcatggtatattccaaataactctcacccttaaaattgtatttataaagaaacttgttgctactttattctgggctacttaaaatgttgtggatcaagaggagttgacaagttggattaagtaaataatatgcttttttatttattgttgtgatcaccatttcatggtcgagtttagtctttacattatcttaattaagtaattacaatcacaaacaacttgcctaattgcgtatatttgtgataagggcaggcattattagtttcgctttcgactcttttaatttaaatattatttaagggtaactaaagaaaattccaagagcaaagtttacctaccaatgactcaaacttgctaacaaacttccattcaaattatattccatgttgaccctaatgcatttcttagtggactacttctcagtcaactcatcagttgatcaacatagctaataatcattttctaagataatataatgacatgtttattattttttctagctgtttctacttatgattccaagatatatgagtagatcatgaaaatgagaccacctttttttttcttaaaaatatatttatttattatgcgtacgtacgtatatgaataatggtgacttaattaaaactatatttaactatttattatagggtgtttctataatatattattttaaaaatcaataaaaaaaataatgtattgatgttctttttatctgtttcattatctaaaaaattattgtagtttaagtttttcatatttgtgtacgttatagctatttaagatatcttaattttttttttttgagaaatttagaataatttaaaatatagaaagcaatgtttaaacagtctatcaattcatacgcgtatatacaataaaatagtcacacactatttgaacttgttttaagtgtgttaaattttgaatttttctaaatttcttattaaaattttgtaggatgtcttaaataattataacataaaaaaaagtttgacaaaaaatattatttatgatactaaaaaaaataaagatctatcagtgtatcaattttaaggggtacattataaaattttcattatattgttgtcccaaacttttactcgggttggctctctcaacttgtcaaataaaaaaatatgtatattggtttgtttagcacttattcccaattttctatctatcacattgttacattagcacgttttgtcaaatcccactacaagaaatgtcacttttaccagcacagttcgctattgcgctggtaaattacttttaccagcgcattttggaaactgcgctggcaaatgggtcaaagttttaccagcgtacatttgcagtgg

SEQ ID NO: 35470 - DNA, 2176 bp, Cannabis sativa
ataattttcataattaatcataaacactgctaatttccaaattaactaagcgggctttacacccaaaccttattttctttgtgtagcatcatccagcataattttgcaagtaaggcaagatttatgtccaagaaattcctcaaacccaagcctccacatatctttggttggcataagtctatccagcttttcaaagcacggtatcgcttcttctccgaatttccctcccaccagaacctagccacgaccctatccaactcttcacataaagtcttgggaactttagtcgtggacataaagtaattggggatactctataacaccgagctaaccaaggttgttctgcctggttgagacaaagattttgctttccacccctccaaacaggcaacaattttttccctaaggaaatggaaatcccttctctttttagcagtctaaaagatagggttcccaaggtacttttcattgtaaccaagtggattcatctccaacatattctttatttcttccttactcctcagctgaatatttggagaaaaaacaagcccgcttttctgtttattaaccatttgacctaactattttttcgtatttagtaatacaatccgtaaaagccacaacattttgaaaattagctttacagaagaagatggcgatgtcagcatgaaacacatgtgtaataggaattgcattccaagaaaccttcacaccagtcaaatcccccctactttctacttttataataagtttcggcaacacttcgctccatagaataaataggcacggcgatagcggatcaccttgcctcaagccacgcttaggattgaagggagataacggagtcccattaagaagtatagaataggagaccgaagtgacacaattcataataagagtataagcatgttcattgaagccatttgccttcagaacccgaagcaaaaagctccactccaaacgatcatatgatttactcatatctgtcttaatcgccataactccttgtttccccttcttactcttgaaacaatgcaacacttcttgagccaaaatagagcattccgagatccatcgactaggtatgaaagcggactgaaaaggagataccaattttttcgataatacctttgagtcgatccgtcaagatacgggaaaagattttgtaatagaaattgcataagcttataggccaaaactgatcaaggccaaaactgatcaaatcgactagcattagagattttaggaattaaacacagaaaagtatggtttagttttgtgcttaaagtcctcttctcaaagaaattctgaaccatatcacaaacttgagctccaacaatctgccaatatttcctataaaaaatctccgaaaagccatctgggccaggtgattttaggggatgtaattcaaaaacaacctttcggatttcctcactcgagggtctcctacacaggaaagcattctcatcctccgtaaccacctccgtaaacagggtttcaagctcactgtcgattttagagtcttgagattcgtacaccttgacaaatttttccatgaagaattccccactttcttcccgactgtgtaaccatctcccatcatcctcaatgctcacaatctgattccttctccttcttatcactgtggaagcatgaattaaattcatatttttgtcgccttttcggacccaattctcccgagacttttgtttccaaatacgttccatattaaattccatttctaaaatttccaattgcaggctcgcttcatgttctaggttttcaggagaaggagttgcattctgaattttagccaacttctctttgagcttccaaagtttagtatcgcagaaaccaaaagagtttttgttccaaactattggttccttttttgtatttgccagcttctttatcaagatcttgtcaccatttccagtgaagatgagtctccaagacctatccactaccttctcactgtctgggctagacgtccaaacttccaggaatctgaatgggtagctcaattttctcgcttcactccaaactgtcaacaaaatgggagaatgatcggaccccaaaatgggtaagtttgtcacctttgcattaggaaaatccatacaccaagaagcatccgctaatgtaatgaccgctttagtaatttggattagtaaaggca

SEQ ID NO: 35471 - DNA, 1750 bp, Cannabis sativa
  modified_base (589)..(589): a, c, t, g, unknown or other
  modified_base (1101)..(1103): a, c, t, g, unknown or other
ttagtgatgatcacaaattaaaaataataatcaatttttgattagtttggttgattattaattgtttaatttatttatttataatatcaagaagagtacaatgacaatatctgttttagatatagagataacataataagggatgtaacataataagggatactttgttttatccataagagagaatcacaataagatttttaagtaaataatgacataagtactcaatgtattaaatttgtaagtatcctaaataataaatatttgtaaaattgtaatttttctctagtttttcagtacaaactccgaattgtcttaaacaagacatatataagactcagattctaaatcgttaggtcgaattggactgatttaatatctaacttaagttaaagttgatataattttcttacttagttatcatcaaataaaatacataatttatttcatatgtataatttaaaatttttttaaacattcgctgcgtagcgcgaattgtttactagtataattatatacgtgtattaaatttaggaattggggttaaaaaatagtaacgtaccctgacactcatttaatgtaccctganacccatctaatgtaccacggaatacattccgtgaaagtacatcacggaacaaaatcgtgtccctaataatatatatgcacacaacatatgcatgcatacattagattaaagggcctataatatgatacgacgatatttttaaaatgataaatctcaatcttaggagcaacttcaaggagctgctaagagcatctctaatggtaaaattttaatgaatgcttggtgaggtggatatattatatggtaaaatattgagatgctatactattggagaaaaaatgatactattttagaaatttgcatagatgctatgttgtggcattgatgctatttatttatttttttaataaaaaattgaagctaaaaaaatattatagttaaaaattaagatgtatattaaataataatgtgtgagatcataattatagtaattttaaagagtgatatacattggagtgtttttagaagtaagagtgctaaaaaataatgtgaaagagagataaaataaaatnnnatatttttagatgatgtgtaaattattagcattcttggaagatgctctaaaactgtattattgttgtaattaatgctctaataaaacaccaaatagtgcactattttaaagttttttttaacagtcatatatgctatagttactagttaccgtatttttttatatatttaattaatatatatttatattattgtatttataaaattaaaaatttatttttagaaaattttataatacatctttctaaaagtgatttataaatgtacttttatttattttggtatctaacaagtatttttagtctatattatttttggaattaatacataaaaaatataaattgacactttatttataaaaatacctccataaggtgtggacaacatttataccttttatgtgattttaattactaaaataccacttatattatcactatacacaatcagacgatggttgcagggtggttgctgcgtagttgcacggtgaaaagaaagatcaagggaaagattgaatcttggtagagcgacccactttatacccatatgcctattccagagtctcgtccatcgtctgcttaagtgactatttaatagcctttatctctgcctgtgagttaggccaagtactctactatatataatata

SEQ ID NO: 35472 - DNA, 2380 bp, Cannabis sativa
acccagactcggacccaaacctagacccaaacccgaacctgcaccccgtgactcaaaactagaagcggaccgggacttgggaacaagactagaggactaggatccgatctcagtctcggaactggaatctgtctaggacccaggcccaaacacagaccgagatgtggactcaaatcaaaaatcaaatcgggactcgggacatgaacccgaacctagacacggacttggatctaggctcggacgcatgaactggactgagattggagactcagacctggacacagttcccagacctcgattggggacccaaacccaaaatttgaaccaaaatcaggacccaggacttggaatgggacccaagacccgaccccagtctctgtcccaaacccagacccggacatggacacggactgagaccaaggatccgaatcggaacgagaccaagaccaaagattgggatccggatcttgacccatgacccggtgcttggacccaacccgtagtcggtgtttggatcttacaattgtaccgagacccaaacctggaaccatttcaagactaggacccaaacaaggactcagacccaggacctgaaatagtaacaagaaccggaaacaggacatttgaacaggaattggacttggaccgagaactggatctagacgcagaaccgaacaaggacccggacctagattgggatcaataaccgaaccgaaacctaaacctgaacctagacttgtgccacgaccagcgacccagaacatggaacccaaaacccataacccaggacctagataagaacccagacccgtacaagaaccctgacccaaacatagacccagaccaagacccaaacccatacccgaacaaaaacccagacctagacctagagtcaaactcgtactagaactcaaactcgaacccgggacttgaacctggaccgagatcaggactaggacccagactcggactaggatcgagccctgaacctggactgggactagaacccatattgggactcggacctgggacctgagactcggacttgggacctgagaaccgagctgtgacctagatgggggacctgggccccaaacccgatcctggacccaaacttagacaaaggatcgggacatagatgggggacttggacccaaacttgggcgcgaaaccaagactgagacccaaaacttgaccccaaactcgagaaacaagactagaatttcgacccaaacccaggaactgactaccgggacacaactccaaacccaaacctaaaccaaaacttaggactcggcttgggactcagggcccgaattggaaccagaccgagatcttaatttggacctaaggctttatcctgactcgtagttagtgattgaatccaggacccggaccaagatccggaaatagagtcggacacggacttggatgagaacccagacctgggactgtaacaggacccaaacctaaacacaatcttagacgaaaacccatatcgaaacttagacccagaccgagacctgtgacctgggacctaaaccaagactgtgacttggacgcagacctggacctgacccagacccagacctaagaatcaaggctagacctaggacccaagaaccaaactcagactagggacccgaaacccagacccaaactaggagacccgaacccgaacccaaacccacacttggacctgagacccgaacccaaattgaaacaagaacttggacccagatcgggacctaggacccaaacatagatgggggacccagacccaagaattaggcccccaaactaggactagaacttgggcctcaaacttggatcaggatccgagacctgaccccagacccaaacttggacctaagacccacctcgggacttgggatcagggactcgatgcttggacttgacccgtaccgcgtggcttgaaattggaactgaaactagaagcggatcgggacctaggaacaggataaggagcaggacaaggacctagacccaaaattgtaactggactaagacccagactcaaacacagaccctcactcggattctgtgtctgggttcaggttcgagttcgggtttgggtctgggttggggtctcaatccttgtccaagtctgggttcgggtgtaggtccaagttagtgtccctagtgcgggtctaggtttgggtttgggtcaggatctcagtccagatctaggtctcgcgtttcaatctcggtgtgggtctttgtcggacttagagttcgtatttggaccccaatctaggtctgagtttgtgtttgggatcggatcccacatttaggtccgggtctgggcccgacatctgtctcagtttgggtctatggcaagattcgagttcggttctag

SEQ ID NO: 35473 - DNA, 1822 bp, Cannabis sativa
aacaatgtgtaaataatataatagctaaaataatattaaaaacaactgggtgtagttttgtaaaaaaaaaaaaatttaaatttgtaaaaatattaaaaatgctgtaaatttgtatagttgtatctttttcgggtaattatgataaaaatccctattaacaaaccaagatggctcttttgcttgatatggcgagagtttagtagtcggagttacctgaatttgttagacttgtttttgacagttccctaatgaaatgtttcattctattctaaaaaaaataaaataaaggagctttcaattcatgttgtacctttataaaatgcaaattcggaataattttcaggagtttttctgctgttggtgtggatcctgctgttatgggcattggtccatcagttgcaatcccagctgcagtgaagtctgctggtcttgaactcgataacatcgatttattcgaaattaatgaggcaagggatttcttcttcttctttgtttttgtttttggacaaaataactatatcttaattagcactactttatagctagaaaatctcatttgctcctttttcaggcatttgcatctcaatatgtatactgcattaagaaactcgagcttgatcccgagaaagtgaatgtcaatggaggcgccattgcctttggccatcctttaggcgctacaggtgcccgctgcgttgcaactttgcttaatgagatgaagcgccgagggaaggactgtcgttttggtgttgtttccatgtgtataggtctgtcttttctcatcaaaaactacatgaaaacaaaagaaagaaagaaaaacttaaaatgtaattttagaacaagttttatagtgtttagtgtgatgagtattgaaaatatttatgtgtgtgatttgttgcagggactggcatgggagctgcggctgtgttggaaagaggagactcagttgatgagctatgcaatgctagagcagctcatagttgaatatggattcattttgttatggtgtgtcttactataatattgttcctaatatttatcagagtgaacaaataatctcacatatctattttttttatgtttttagaaatagaaaaaactgttttttctgttacttcgccaaagatatggttaaagttttttgctcttagtaccaatttaatattaatgaatgatgatatacctagatggaagatgggttatatttacacccaaaagattattaagtacacccaaaatttctgtttcctaaaatgtgtcttatttgaaaaatagtacacccaaaaattttgaattcattatgaatacaaagttacatttaatctataaaaaaaattctataatgcaccaacataaaaatggtacaatgatgtattctctatttgttttgacattcaaaatttttagtctaatttttttaataatcttgtaagttgtagttatttaaaatattttacaaaattttgaaaaatttataatatagaaatcgatgtttaaagaatctattttacactcgtataaaataaaagagttacatgtgtaaaagaatgtttaaattgtattttcgacatgttaaatttttttgaattttttaaaattttacttgatgtcttaaataactacaacgtacacgactatgaaaaaaaaattagattaaaatttttccaaataacgaaatatagagttcaccgatgcaccccttttaattccgccactatatttacacttgaatctcaatatttttaattttgacgtgtaaaaaaaaattgttatgtatttctgttaattctccataaaaattacagatttgggctgttgggccaca

SEQ ID NO: 35474 - DNA, 2702 bp, Cannabis sativa
  modified_base (926)..(926): a, c, t, g, unknown or other
  modified_base (1097)..(1103): a, c, t, g, unknown or other
  modified_base (1188)..(1195): a, c, t, g, unknown or other
ggctaaaatatgaaaatcggcaattcctgaaaattgcccatccggaattccggttggtgcagccctgtaccatccggaattccagttcaccacaccagaaactcgaaaattcagatcttgaaagtcccaaaacttgttccaaacctaaccaattgttcccaaacttcacaaaacagttctataacatgtatacaacatatctcaaaactcaaagcaataattaacttaaaatcacaacttcaccattgttgagtaaaaactaaactccttaaatcttatttcttccaattcatgcataacaaccctaatatccaatcaaacgaagcttaaatcatcaccaattcaaacctaaaaacatgtcttaaccccagaaatcacacatacttgaaatcaatataaaccccaaccaaaactcaacctataacataagaaattcatgagtaaagaggaagaactcacctcacaccttgagcagcacctatggtaaataaattcagcttaaacttggtggaattgatgaagaaaaaaactcttggttgctgctgaattctagggctcgaacgggttgaaagaaaagagagaatgaggttatgtttttttttttgcttggataatctacttatttcctaggtaatacacaaattaaaacataatataaatttactctaactttctaattcagcatagaaagcactaaaggacaaaaatagaataaaaccttggtaatgactattttaccctcattcaaaaaaaacttaagttatttactaacctaaaggtattttggtcaaaccaactatctcgatttaaactgatatctccatttttaacctagtccggtataattccaatataacacaatttcaaccatcgtgacatttctgactactccgtcgagttccacagttgccaggcccgaaaatatnttattcgaattatggtatctacgatacccacatattacaatacaatctctgtaattaataaattgcgctttattattcatttactcatatttccctaataaactcgtaattagtttaagtaggattataatcctactctaatacccaattaatcacatatttaataaaatnnnnnnnattaaaatatcaatatattttctgagatattacaataaaaccgattctattttaattataactgatttgagttattttgtgttannnnnnnntattcattatgttacagaaccggttatatttcaattataactgatttgaattatttgtttttattcattatgttatagaatcggttctattttttgtttatatctaagacacttatttctgatgactttttcagtgacttttttcggtgactgacttttctggtgacttttccagcgacggtgactttttcggtgaaactaacttttttagtgacttttccagcactgatgactttttcggtgacttttgcggcgctggtgactttcccggtgacttttccgacgaaccttattattacaagttttgtcaaatttatttattatttttttcccatattttacacataattattttttaatcccatattcttttgcattatttatttatgccataaaaaaataaactctactacattttcccatatttatgaaaaaccccctttttttaatttgagggcacaatttcggcgggtcacccatgtaccgccgagatagggtactaacaataccctatcttgacaattcaggggtgacctaccaagatcagatctcacaaaaaaataattaatttttatatttaaaaaatgtcaccaatctcaatgtttattataaaaactgctgagaaagataccaatctcagtggttacacatggaattgccaagatcggtgtgccaatatagcctaattttttagtagtgattcaacaagataattaaaattctccaaatgaatgctcaccagagctcaccacccccaactcaaaattagacagtgtcctcaatgtcacaaaaaaatgaaatgaaaaatatagggaaaagagaacacctgattgacgataatatgcacaggacgagagcggagataacctaataacagtaaccaaaaaaaaaaaaaacatagaaaagaaaaatgcaaaaacacaaaacaaaaataaaataaaatactatatatatagaaaaaacaaacattcagagtgtataatctaggtcctcaagaaggacctcttcaacaaggctcacactctcaatgtaatgtttcaatatctggccattcactcaaaaaattatcccatcggttaggtcctcgacctcaacagaactgttggggaatccttgttggattatattttaccaggacttagatttactaacaagtatgtttttaacatcctatatatgaatttctaaaacaataaaatttaaacacgtataaagtttgagtaaccttacattgattgcagcagaattaaatgactcctttcactcagatctctaacccttattcattattgtcacagagtattatcaagatctgagccaaattctccttcagttgtttggattcttcatagtcttacacacaatgattgaggactaacttgctaagggtgggcatgcactcaagtactaaggctcaaaattttatgtgatgaacactcttggatttcgaaattaggaagaagaagaagaagtttcaaaactctctagttgtctgacaagatgtaaa

SEQ ID NO: 35475 - DNA, 1680 bp, Cannabis sativa
tttaaaaaatgtttgatgacataatatatttttcgtattttttaatttattatttaaataccaaaaaagaatatcatccttagagaaattaattactatatattattattatatgatttacacaatgataataattaatttaaaaactacaaagacttggttgatcatttacctttgtcatcttctctcagccgcaatggttaataaaaacattcaacatatataattatattaataataaaagaattgatgttggtaatggtgggtgttcaatagtgatgcaatcaaagtaagacccttgaaataaaatcatatataaataaagacctaaaaacccaaaaattaagcatatatttcttccctaattttatcttatcaaaaaccaaacaacaagacaataaataaaattgtagtttatttgttattttagtaaaagggaaagttgaaagaaagtgcatatataacaattgaaaatcaacattatgttgataagtgatttgtaagtgaaataatcactagaatttgattaattttttttattacttttttttttaaacttattcgcccctttaaaatatatattttatattttagatgcatgacaaattattcggtaaaaacgaaaagtttggttttaaagagtgctagaatgaatcattttttatgaagtgtgattataattgaagaaaaaaaaatagtatgtgtagttgcataacatgatgatgatgtagaggaaaacaatatgaaaagacattgtaagcatcattgtatttggcaaaataagtggagctttgtctttttgtaatgaacaaataagattcacaaatttattcacgtcaaacaacaccccggataataatttatttatttattaatattaatattataaccccattcccatgtaaacggtcacaatccaagtctttaaatggagcatgattttgtctagcaatttttatggttgtgaatgggaatttgttgttgagttcggtggaagttaggcaagaggatcagtacagcttttataactctttcttctgatcataaatattacatattcaacttgtgcatgaacccaacaaacaaacacccccacaccccatatcccaaaataaagagttttatttgctattactagtactagtgtactacatcatctttcattgcttttcttttctttttctttttctttaaaacccatctcttttttctgttcattttagagagaggaaagatttttgtaagttttggataaactgggaaggttctactttatggttcgtcctcattgtcatccatcttcatcaactttcaaaacttcagctccaagttttggtaaatgtcattcaatttaaagatttagtttttcttactggtttatttttatttttgtattttaactaataaaagtctcacatttatgtaactctggtccattcacatcatcccttttttctttcctccttttttccatttgggttttattattctcaaacgtgtagatttttgacaagtggagtctcattcagaaaataactcatctttcttgtgtttttctttttgggttctcaccttctctaaatctatgtgaaaaattgttcctaagattttattctttatttttttttttttttttgtttctcacatcttttcaatcttgaactgacagccgccatccac

SEQ ID NO: 35476 - DNA, 1669 bp, Cannabis sativa
cacctgagagagttgaggcctaagcaaatccacttttaaatgatgtttttgtagcaacttgtgttttattttttttttcttgttatgaaacaacttaaaatcatttttggggtctctttttggtactaatgttattcttcttaagtttagtattgattattattacttcttgatatagtaacaaagattatctgaaacacagtgatacattgataagttcttgaccaaatggacacaacaaatgtgtcatattcattggttttaaaatggtggtaatgcatgcacatgcgtcgcagattacgagtaaaaacaccacattgcaatgtaaaacattgttaataataatatcataaacaacaatctgattttgcaattttctgttcttcactcgttaataatttccattcttcatgagcttattctgaaattagtttccaagagaattgatgcagatcagttgcagagtacgatgtgatatatacaacacaccttattataataaagacttgtaaattggtatttttgcatttaggctattgtcacattaatgtgagcatttgtaatctttctgcttcaagtttttattggactttttatatggtttatacacaagcatgtcactctagttgttttatggactgttacataccaacaaaagtacttcttagatgctagttgttttatggactgttacataccaacacaagtacttcttagatgtcagtatctgtatttattttttttgacaaaagaaaaataaatttcattaaataatcaaatcgttcatcaatactgaaatgaattctgagggagcattgctcacactcaaactacgttcagctataaaacaagtggatctcgttaaatagtgagctccattgtttgcagactctttaacaaattttaaagaaacaagacaatctttcaactcattcaacaactttttgcatttagttataattctaccaaaataggaatacatggtagaagagctacggatagattgaatagcaactaggcagtatgattctacttccacacggctccactttttgtctttaatccaacttaatgcttcatgtatgccaataacttcagccacctcgggggatacagttcctcgcatttggctttggcttccaacagtgtaccagtatgagttctagccacacaaaagtagctatagcaattagttgaagagaatgttgcaacatcggtattaatcttaatcgtatcaacatttggtaaggtccaatgctcattaccatcctaaaaatggatcaaaagttttatcttaagcataaagccattgattaagaaccgtacgtgccaaaactacaacatccttaacttcaacatgcttttgattctacgccagcacattcctactcttccaaagtgcccaacaaaacatagtcaccagctgtctactcatgtcactccatttttcaaagatcgaattcagtcagttggaaaacgttccttccacatcagttgagacccttggtttttactctgtccagcaagctttagagaaagaacaagtgactaaaatgtggcttatggtttcattttcgagattacaaaatgggcacaaagtattaacagccacatgctttgtttggagttggaattttgtgggaagacaatcggtagaggcttgccataa

SEQ ID NO: 35477 - DNA, 1720 bp, Cannabis sativa
tgggtaattttatttttaaagttttttattcaaaaataatctattctatatttcaatagctccgattgacgaggaggcatttaaattatttggtgacttttttggcttttaaatattcttaagaatatatactttctctgcgaagaaaaaacctaaaaaaaattggctggagtcgtacaacttgtttcagagtcgcatactcgcatccatggaaatacgaagaatatattcgaatggattttcaattttcggagaaagagattggattctaaactcaagattctttccctgaaactcgaaaggctttaaccgtttcaacatggttgaacggggttggagctttacctatttcggatgatgctactaattcacaatctcactctcaggttgattgaaattccattccactcccatttatctatttctttctcagttagtgttgttttaataataaatatttctctgtgattgaattgtacttattggctgaagaattttgtgggtttgcaaagtttctcttaaatttctctggttgaatgtggaattttagttgtgtttgctctatctgatatattgtgaattcatgaatattactttgacaagagaatttagaacctggttttgagttcgattaattagttttcaatttcatgtatctttaatagatattcgttctgttttgctgtttctccaacaaaatctttataatatgaaggtaatatgtctatgtatgaagttaattaaagtatatatatctatctatatatttacatatagatcttagctcaaatgattcttctcacttattctcttcctttaaaaacttttgattaaaatcgctgtggcaattgcaagttgggagagttttgtgggtttcatccatacttgtctgtcatagaaataaaattctcactttatgtaggacctaatttttatttgaacttctgacagtactaaatatttttatatatatataaaaaaatataagcagagtgataattagagccccatggttgcttcaactatttgagttcttctcatgtttcatgttattttgtacatagcttccatcttgcttaattcaagaatagaattttgacattggacaaaatgacaacaaagaaaggaaagcactcccaggtacactactttaatgtgtttttcttctttgttcttctatttttggggttgattttgtaaggtgttatttctgtacagttctatgttacatatctaatactaatatcttttatttaggcatctataacctctctatttctttttcctttcctagaaaatcagaactatggaacaggatgggaagaccattaaacttcaaattataagtaaacgaatttcctctttgcgtgttgtttttatgatcatgatgctattatctatctcactgtatttgcctgatgtttaaaaacttgacaaatgttttaatgaataatatatctgttacttttgttgttatataatcacattccttcatcccaatattcttttataaatttgtgatgcatttttctgttgcaattgctaattgtcattcttgctgtttggatatgcagtgggacactgctggccaagaacgtttcaggacaatcaccaacagttactaccatggggctcatggcattattgtaagtacatttctcattttgttattttgtgtgtgcctttctatatatggccatgttggtattcccctgtacaa

SEQ ID NO: 35478 - DNA, 1990 bp, Cannabis sativa
aattttttataaaatattctatttcaagtaatttgatcttatttagatttttttttttgataaatcaatgagttgtattgcacaaacaagctttttacaaactatacgcactcatgaaaagggccgaattctatgtatacaattgtatcaatctagaatcaaagtatgtgttatgatttacaaagcaataaaccaatctctatcgttagtcttgacctttttaggcatcaccctatcaatccgagcctttatgttccattttgtttcttcaacaattcgagtcgggttaactcaagctttttgccaaacaacttcatttcgggtcctccaaatattatacaccagccctacaacagcagccgtgagtactcccttcttaaactttgacaatttggacttcccaatccacttgagaagttgctgaaggctactggtttgggcatgccagttcagccaattcttcaaatcctgcaagcatttctcagcaacagaacactcaaagaataagtgttgacaagtctctaattgtagctcacataagcaacaggttccctgaacatgaaggccaaattgcatcagtctatcttgtgtctttaacctgttgagcattgccaaccaagctatgacactatgttttggaatgttaagccttgaccaagcttctttactccaatacagacgagttactggtggagagaacaatttgtatccagctgcaacactatatttttgcttctgaaaagcatcaaagtctaccatgtctcggatttgatctttcaatgcgaccatcttcttccaataccaactggaatgtatggaaggagagtagtccccccatgtctgattctttatatagacactatgtacccatttgagccataagctctcttgtttatttgaaatagcccatatgtacttattgcagccttgttccatgcttccaagttcatgatccctagacctccacctgccttaggttgacaaatgaaatgccaagcaacagaccctgcaccttgaaacatagcttgccctttccaaagaaaggccgacagatggcttcaatagatctcaatactttctttggaagaatcatgatttgactccagtatgcctgtatagcaatgagaacagagttgattagagtgattctcccagcaaaagagagattcctggagctccaacttctgattctagcagtcattctctcagctaatatatcacattctttccctgaaatctttttcccacagattggtatacctagataagtgaatggcatttcctgtctgctgaaacctgaaatctgcataatgtgattgacttcattaggctgcatgttactacagtataaggcaattttactggcattgggatataatccagatgtgagtgagaaggttttgagagcctgcaacatgtataagatactcataaaatccccatgacaaaataataacacatcatcagcaaatgcaaggtgattcagtctcaaactagcacatctgtcatgaaattgaaatccctctttttcccctagtttcttcatcaatctcgataagtattccattccaagaacaaaaagcaagggagaaatcggatcaccttgtctaattcccctttgtgcttcaaaaaaaccatgaagagttccattgaacatcaatgagaatctaggagttgtgatacagttcataattagttgaatgaattttggaggaaaattcaagccaactaacattttttcaagaaaactccactcaattgtgtcatacgccttttgcaaatccagctttatcatgcaactaggcttatttgcctttctaccatagtgcctcaccaaatcttgacatatcaagatattatgccctataaacctccctttgataaaaccaccttgagactgtgatattattgaaggaaggatgttattgattctagaactcaaaagtttggttgcaatcttgtaatgtacattgcaacaagctataggtct

SEQ ID NO: 35479 - DNA, 4801 bp, Cannabis sativa
tgtaccatttggagtatggctagctttatctcaaaattgttggcttctacggcgggtagtcttatacaagactgaacctccatcaatattgggagaacatagtccctcatactatggttatgtggattacgaccatttgcctggtcttctatggcacccccattatttttgttattggccatcacctcttcttggtcaacccttaatgcagatctttctaaccttttgttctttctattctatctacaagtcttctcaatctcaggatcaacatgaactcttgaactagctccttaacgtcccataaaccaaaggcacctgagatagaataggaaaaaaattaagacaaaatagttactaagaagtaaggaagaaaaaccaaagcagaatttagtctaatttctgtaatatcaatttttaaataattctttgacaacgacgtcaaaaacttgttacgaaaattataaatagctacacaagtgcacataatcaagtagtactcacacatgtgaggccgattgcacagggaattgaactaaataccactaaattagacttatatttctatttgctaaacaataaatttgatgaaaataaaaataaggaataacaataaagtaaaagtgagcaataaaattgtttaatcatggatgagaaattaagaaagggaatcttgttgcttcaattactcaatttttaattctaattactattcatgttttttttaaagtgaatgacatattataaaaattaacctaactctttttagatcttttatgtcctaaatcacatgttatctaatcatctctaagataaaataacatacaacctacattaaaaaataatctaaatatcacgaaggttatgcaaatacttttgtttcacatcaaaacctagtttatccaatttcatcattaaaacttcttttagattttgaattaggatcattgagcatgcaaaaggttatcaatcttaaatatataattaagcacaaatatagataaattcacaaatatgagagaaaaaatagcacataacattaactcatagagtaatcttaatggtaggtgcctatgacttgtcctgtccctatgggatttatctttttgggttaattaattatttaactaattcaattggaaaaatatctaatttaaaaaatagttatagatatttcaaggttatttagacattttctcgagtatttgagaattctctcatacatcagtaaccgaatttggtcatagatatttatttatttaaataattaaataatgattttattaaagtaatttaactactataagtatgagcctgatttgagaaatcaaatccactcttttgttgctatttttgaaatagggagagaaaaaataatttttctctcaattgttcttgcacatgtgttgagagctcaacaagaacaactgatgcatgttgtaaggtacaataaatttactaattatttttatttctatattaccaattatttcagtgtaacggtaaatacatattgatcccacgaggactattatcaatttattattcaaaaattagtgacaagaattagaaaaatgggatttggattatgagaataaaataacataactaaaaacataaataaattaaatgtgatactatgatatgagataaatagttaaagattactctccaccctcaataatcattcttaacttctattaatgaatgtaatttcagtttttcagtcaaactatgaatcccgcagataacgttaaagcagtcaattattcaaatctccctgttgcatgtaatcaaggcgaatcactcaataattaactcttttacataagtagtaaatccatgaagcatgcaatttatttgacttcgataaagctttaagatttatggagatagactaatctaggcaataaattaatgaagtatataatttattttatctagattctattctttaccacaaataataatacccgtcacaatatcatcaaaagtaaattatcacttaaacctagaatctcaaactattaggtgaatagtaatcctaagatgacaatagattaaagtaaaacctaacttagcgatcgtctaaacaatattaaaataataatcatgacattgaacatagaagaatagaagcaatttgatataatagaaactagaaattaacattcattataaaaattaaaggttcatgtctcgagttttgaaataacccttaacataaaaaaagactactccataatctcaaacctaatcataaacagaattatagatgaaaattagacgtttggtaatttctcttccgaccagaacaaaagatcctattgaagcggctaagcccagtttaaaaagaaaaactagatgtagatgtagattctcctcttctcttgagttctctccttcaaaatatagttcaaaagttactaaaaatgaactctaaaagtcctataaatacctttaaaatatatcactttaagaaagataaaaatttgaaaacttgtagaaatcgcgtcctcaccgcggcgacagcttcctaccaaaaaattctaccccgtgttcaaattattattttggcaataacttcttctatacaactcaaaattggacgatgcaatatgttctggaaagctgagaatgagatctataactttcattttgagctccaagtctaattctacctttaaagtcatcaaaatgtgtaattaagttctatcttgtcaccgacttccactattttctaccaaagtatgctaacatccctccaaaagactccaaatgcatgactaatctttaaaatagccaaaaaaaaaaattaaaatcacactaataaataaattaaagaattaatttaagaatattaatacataaattgttatatttataagacataatatcgatttatcaaatttccccacacttgactcttgctcgtcctcgagtgaattagtgataagatgaatgatgcttaaaaaaattaatctttatgagaaataattttagttttaataattgtacatcaacatataattctaagaaacatataaactcttcaatcattagaatttcaactcaagataatgacaattcaaactcaatttgtgtgtgtttgttcaatcaactcatcatattatcaacattaaaattaattcatgcatgccaataatcaatgtttatctcaaaataaatgagtatttcaataaaaatctactccataagcttaattatcgaacaattttccactaatgtaattacacaaaatctaaacatcaataagattttatacgcttataatgtaaggatagggtggaaggtagataagaaggttgatttaggcttaaatcatatcatgacatgcatatacaacattctctcaaataattactatttgtattccccaattagtctcctcaacaattcaatcttgtatctttttttcaacataaaacttattattctcccccacttaaattgttgcaagtattcatttatttttcattgattttttttttatgaaataattacaacttacaaacattcattctaagggaataataattttttttcctcatcatcacttgtacataaccatcaatattttccactcaatgaaactctcacacccttacaaatacataatatactatggtgtgaaaaaggatgaacaaggaattttcttttttttcttaaggctcaaaaggttcatgtatatggttaaaaagaaaaaaacaagatttcaataatcaagctcaaattgggtaacaagggaatcaacaaatagggcaaacttgaaaagctcaatcgatctaaaaaaaattacctatatcatatctcaaaatcatatgtaatttatcaattttgcctcaaatgattatcaaataagttctaatgtgtaaattaaaagtcaaatatgcatttatctttccaaacatcagcaaatatgataattcaactaatgtgtaaaagttttaaaaaaatcaagcttgagtagtaattaatcgtgagttaagcacacaaactatgagaatctactattttctttgaattataactacacacaatcaagaatttcatcatcgataaaattattttccaaaagaccatgcataagacatcaaaggaaaaacacatcaaacacgagcaatcattgttgatagaattttattcaaactatgcttactaaaattaaagaaagaaaaactaatgtaaactaaaaaaatgataaaaaaataaataaataattaacttaacaactaaagaataatggggtagacacgacaattaatctccccccacgcttaatataagcattgtcctcaaggctcaatcaaataaaatcaatgcaaaataaaattaaaagggtaagaaaaactcccataagttttccttgtataacgtcgttagctcgattacatgttgtactcatgtgatcttcacatgaggccttctaacaaagactcattccttatgtacctatcaattgaatctaatacataatttaagtgttaatttcaacatcaatttctattctaagtatatatactttgtctccaacttcttactcacagtgaataagaaaggtctccaaaatagagttgatgtaggattgggatcgctctcatcttccatcacaattatgtaagaatcacttgtagggaccagtccattagcctaaacaaaaacatcttcaactatccctaaaggataagcattactctgattagtcaattgaatcaaaacccatgtttctcttaatgaatcaagatttaaagaagccaaattggaataagacataatatta

SEQ ID NO: 35480 - DNA, 1065 bp, Cannabis sativa
aaattaaaaaacaaaagtattaccaaacggcacctaagttaacgaaaaaaactcaaaaagatatcgttaaatcaagaattacgttgtatagccatattttatatagaatagatatatacaaacataaaaaaaaaattaatttaagagagagagaatttaaaaaaataaaaataaaaaagagaaattgagagagatgagaaaaaaagaataataaaaaaaatgttcattaactgacttaaagaaaatcagctaagactgactaaaaaaaatataaaaaaaaaatagattttttttttttgaaactttaataaataaaagataataaaaaaaaattaagtaggaaaaatataaatatcaatgtaaattttttttaaaaaaattagcatgtgtaaaattttcaattattaatattaaaaaattgatagtgtatctttgttaatacatgggaaaatgtcaaaggcatgatctaataaaagacccaaatttctaataggtcataatactttttaaaaatacaggtaagtaagttggcctccaaaacaaagtaattgtatatcatataatataattttattttaataaatactttaagagaatgggcccaaaaagaaaacgaatcatcttgataacactaaacaaacactcatgtatataacttttagtaaattaacttttatagaatagcaatggacaaaacccaatcaattatttccacataatgttcattctctttatatcaaaatgtactgatatcatataacataagagaatggggaattaataaattaaaatttattatgacacgacacatcaatgaattaaccaagcacaaatacaggaaataaacaagacctaaaaacaagacaaaattaaatcatatttttcgtttcatttattaagtacttctttcttttaataaagataagaatggggttaggttttgattattgaataaaagaagtaaataacattaaacccatcatcatttaattaaagaataatttcataaatcatcatttaaaaaaaaaaaaaatttacacttttacgtttaaagattttcttttt

SEQ ID NO: 35481 - DNA, 1687 bp, Cannabis sativa
aagaaattagagccaggatcagtagattgctggaacaagttacaagttaatttctggcggcaatttatcgcagtaagaaagatcaacctcgaggtcagcgccctaacaaacataaaacaactgcccgcggaaaccttaaagaacttcataaaaagattcaaagaggaggcctcgaagaccaagaaggtggatgacggacaacaactagcccttcttcaggctagaatttctacgagaacccctttttggaaggagctggagcaagagggagcagctagccttcaggtttttcagaagagagtccaaaagtacatcaatttggaagaagcccaaatactggcttacggaggatattacttaaccagggtgtcgggatatgtgccaagagctcaacttccaggagctccatctcttgccactccccaaggaagcggaatacgattctccgctaccccaggatacaattaaagtctcgctttagctcccgcattgtcacattttagggaacccatgagcaatccctctgggttgactatctaaactctgtcccaatccgcaccatccaccagtatggcaggagcttcgcaaagctcccagagtaatagatcctttaagggtagtacccggactgaggacaagcaacgacgaagggggtataacccccagtacacataatacacggagtttactgatactcgggagcatgtatacttcgccacccagcaaaatacacattaccgaaagcctccacccgtgtacaaggatagctcccagagagatcccaataaaagatgcgaataccacaatgacattggccacgccacaaacgaatgcaaaaacctgaaagacgaaattgagaacctaatcaagttaggtcacttgtatgaatggattaaaagcaggttaccgcacttaaacttggctctagcaggaggcccattaccttagggaggagcagggggtatgcccgaggggcaagtacctcccggaggggcgcttcctcaacatgcgcccggattaccaccccagctaaatggaagagtggccatgatctctggtaggcatcatgttggaggaatcaccaggaacgagttaaacgttacacaggggccctaaaacacgatgaagtgtgagaggtcactcaactcccagcacaacgacccagactcatggaccaacctattacttttactgaagaagacgcgaagccagtgcgtttcccccaccatgacccctagtcatagaaactcctatcgccaataatgtggtggctagaatattggaggataacagaagctccgtaaatctattattcaaaaaagctttcatggccatagggctcccaaacagggagctttcgcttagcagctctcagctcacaggatttaacgagataacacttatcctaacgggtaaagtaaggcttcccgtcaccctgtaacctgacaccccacaaaacactttcaagtactgcacctttgttgtggtagactgtcccactgcctacaatgacatccttggctgaccggccttggttgattttggagagattacctccattcgacacttatgacttaagttccctactcgggaggccagagtaggaacggtgaggggaaaccaaggagaggcaagacaatgttacaatattgcagcacatctgtcagttttgatggtacaaagagac

SEQ ID NO: 35482 - DNA, 1460 bp, Cannabis sativa
tttttttgttttgtttttttttttttaaaaaataatttgttgtaactggaaaataaggtcctgcaaagaataatgtctgaattttattttgttttgcatttgatttaattttctctagttttatcttttatgctcttttaaaaggatagaaatagggggagaagattcacgaatttttctaattaaacaaaaatgtcatgggaaaaggtactagtgaaaaaaaaaacaacggttttttttatttttatttttatatttcaaaacagtttttttttttttttgtagttttatagaattttacgtagaaatccctattgcaattaacggagcgatttaaattgcaatcaaaattcgtatagcaacccacataaaaactactgtagaaatcaccttagaaacttaaattgtaaatttgaaatttgaaaaaaaaaaaagttaaaaaatagtatatggagtaattttctaataaaataaatacagttgtcattaatattgcaacataaggtcaaggttctttcgttgaagatttgatcaaggaattagcgaatattaccaatcaatttcaacagcagattcaagcttcactgaaaaattcaatttgacaagattcccctatgctcccacagttcgctcctcgatcaaggatggcgagactatcctaatttttgttatggaaaccagtaacaagttgcaccaagtagaccacctattgcacttagacatctacaagcaccacctattgcaacataaggtcaaggttcttccgttgaagatttgatcaaggaattagcgaatattaccaattagtttcaatagcagattcaagtttcaccaaaaaattcaattcggcaagattctcgtatgctcccacagtcttgccgtcattcgttgcaagtgtttgaaaaaggatcatacctttgtcttggtgagcctgggaaatctcctatagcattaataccttttgttggtccttcagatagagtagggcaagtatcagtagtaaaggtgagtgtggtgcgaacgaacgaagaaaatataaattttttaatcaacccacaaagtgtggttatgtgaaaattataaccacatggctattttttttttttttttgcattaaccgtaaaccaccacacatatgtgcgttacaaaaaaaaaaagtgattaacccgacaaaagattaataaatatatttaaaaaaagttaatttttaaataacaaagtccaaatagaatcttaatactttaacaagcaaaacaaaatacaatcatacaatcatcctctttgtaagaatctgagattaacgaacctttgctttgctgatgatctcataattttctgtaaaggaaatttgaagtctgttgagttagtcaatgaaccctttcaagaattttttcaagcgacaggtctagcaggttaataaaaagaaatcccatgtattttttttttttttgggggggggg

SEQ ID NO: 35483 - DNA, 2808 bp, Cannabis sativa
  modified_base (936)..(944): a, c, t, g, unknown or other
atgttgcaaatttatttattgctccaattttttttataaaaaaaattaaaaaaaaaacattattattatataagttataactaacaatttgagacataattagaatgacattgtatactttttttgtaatggaacaaaaatattaaaacaaaataacgtgtgttaatttgtcaattataattaaacataaaaaagcgataaatgaacctagatgtgaaaggactccttcttttaagagacatgtcttcaaataaaacacacaagtaaaattaaaattattagcataattttttttctttttgctaaagaattatattagcataattagttaccaaataaagtgaaatattaggtattaatggtgtataacaccactcatgaagtcatattattattggtataaaaaagtatcaggtccacataatttaatttaataactattatataaagaaatgttaaggacaacttaagttgttaaacaacataaatgtgtcatactattattaatttattttaatattgaaaaattgttaactaattataaagtgtcacatcagtgtggtgttagataccttaaaacacctaataacaatgttccttaataccactaatatctttatagtatttttcttacaccaatactctcaagtaaattaactctttagttaagtttaatttaatttataaatataaaacataattaaacaattcatgcatgcatttaccataataaatttaacatattaattagctaaaacatgattgaaatgaataaattaatttgacaaccaaagtgatcgaaatggtctccctctctctaataatcttctttcactatatttattgttttatttgtttttatgtttttgaagactttacccttttttccatacgtgacaaatgagaataaacaaatctaataataataataataannnnnnnnncaacaacaataataataataatgtaggctatagctagtaagttcgtgggccataaaattaattaaattaaataattgagcatataattttatataattaattattattgtactttttattcatgggagccaaccattcatggatgtaatatgacttatattttcttattttgacttggtcaatggagactttattcgagtgttgtctactatatatatacatacataaatttttttatatatataaataaattgtaacaaaaaaaaaagaaggagaagatgaataataacccattaataattcattttatttttatttaactacatttttaataaaagtcaacaacattttttttttaaattaagtcaacaacaattttcaaatcttactttcgagtaaaatatataaaacaatagaataaggataatgagaaattaataattaaatatactaatggttttatttgttttccactacataacaaatgaatatatataatcaatgtgtttaaaaataatagtaaataaaatatatgaacatcatatcttagaaatagaaacccaccacatgtatggaggtttgtacataaattaaaaccaattaggaatagaaaatacccaataatatatctaattgatgaactaattaaaaatgagctaaaagaagagatagattgagaaagaatatattttattattattattctttagttattcaaaacaatggtttctaatgatctcatggctagtcacctaattttgggaatcttctgtttggattttccacaagtttttcaagttttttcttcttcttttttttttttttttatatggagcaatatataaattatttgagagtagtggctataaaatagatgtgtgtaggaatatttattggatcacattcaatatttttaaatttatttagattcgtttcaattatatcttagaagttaaattttatcatcgatccgatccaattaatatcggtcattcaatattgggttggttctatctattagatgtatttcatttgaaagaaatttcatttatacctagtggtttaatttaggtttatctaatattttagacaaatattttttagataaggattcggattcattcaatattttagattcaatatatattgcattgaattggattcatccaatctaaaaaaaaaaagtaaaattataatgttaatttatatatataaatatttattaataacaatacaaaatttaattacttatccaaactaaatgaaaataataattaatttgattgaatattaaatttttgaacattcaaccgccgatccaatttaattgaatattcaaaaataaaattcaatctaatctgatcacaatagatatttaatatttagtagtcagtaattattattaaatttgataaatcccaaatatgtatgggaagggaattccaaattatacaatctaatcaatttatatatttacaccaacataaatggtaactctatatattttttattcacacggttgaaaatttacaccaaacattaatttgataatacaaaaacaaaaatatataaattaggaaagataaaaatatgtttgtgttttaaaacaagacataaatgtaaaaaaaaaaaaaaacaaataatatacctaattggtatgatcataatcatcagccaaaattaggtctcttaataacacaatcttcttattattattccctttcgaaacatgattagtagcctcctcttcctcttcttcacaatattcaatcccactactaaaacgacaccgtttcaccaatttaccattttgccccttaatcatccgaacaagcataacatttctcaaaacgctactccaaat

SEQ ID NO: 35484 - DNA, 1603 bp, Cannabis sativa
taaaatttcgtgtttttggagctttagaagcttaaaaacagattttaaaagcgttgcttaagaaaactactaaaactgacttttgttaaaggaacttgttagagctaaaattgaaatttcgtatttttggagcttcagaagcctaaaaacagcttttaaaagcgtagtactaaaactgacttctgttaaaagaactttttagagctaaaactgaaatttcgtgtttttggagcttcagaagcctaaaaacagcttttaaaagcgtagtttaacaaaactactaaaactgacttctgttaaaagaactttttagaactaaaactgaaatttcgtgttttgggagcttcagaagcctaaaaacagcttttaaaacatgtctttcggtttgaagttgacatgcctaaccgccgatgatgaatccttacaggtgtgaccgaatactatatctcggaaaaggcataaaacaactttcttacaacagatcagaattaagggtctcagatcatagaccagtgagttcagtattttcagttgaagttgaagtcttaaaccaaaggaagcttaaaaaagctattaaattcaccagtgctgtagtacatcctgctgttttttctgatgaagagagaaactaataacattttaggtaaccatcttaaaatgaattaagttttggtgttttttgtatttatgttctctcatctcatagtcataataacatcaatttttcttgttttcttctcagtgtgttgacaattacactaacaaggttgggaagtgttgtgaatttttgaccaatgcattggagaatgctgcagcatcatgaagattatagtgttatatatgaccaagctatactgagatactatacagagagatttagtgaaagagaataaggtgtgaatgtacatacaaaagccaaaccaatcaggtctattttatcataagagacctctcatcaagacacttaagttcattactgatttttgatgtggtttttcattcttttttttgtttttaattttggtgtatgtttattggacagacaacaattatgtctctttatttaaatccttattttgagtaaagataatgtatatatatagtttatgacgtgtaacttttgtttgccttaacaactaaataggtggggatggcttatattgtaaaatatataggaatagttggagaaattggttttgccaaatgagaccaaaactcattatgtttattattatagttttgtcttgcatgaaaagtttggccaatctttatttttattagtggacttagattctcacaagtcggcagaactttaataattaaaatttgaaatttaaacaataaatacaatttggctttgagcttgacatatcttgttcctggccctatctaagttcattcattcctatatacataatacattgcaaagtcatttcacaaagttgattatatatctcttaacatttttcatccaaatggtcccactatatacagtttgccttgtgcttaaaaatacaatcatgttatctattcatggccaatgttattagtagagtaaatatcggtataagtacccaaagttttaagtttataagtggcataa

SEQ ID NO: 35485 - DNA, 2602 bp, Cannabis sativa
  modified_base (356)..(361): a, c, t, g, unknown or other
gactcaatgagtcaagaatcacaaaaaatttcaaaatcaaatctctttcatcaagaaatcacacattatgcatcctaaaactatcatgcagatcaaaataccaaaaataccacaatctaatgtgagaatcaagaatgtaaaaagcttgaacacaacaatggaaaattcaagaaaataagtaccgaacgggatttggaagattacccactagtgaaatttgtcaaagaagcctgtgggaagcttagatcttcaaaataaagtgataatcccaggatttgggggacttaggggtgtcgagctccaagggaaagtgaagagcttctactttttccttttttgaagagagagagagagannnnnngagagagagagagagagaataaagggtgatacgagaatatacttcaccaaatagcgttaaataggctctggtgagccctaatcatccaacatgcagcaagcaactacgcagcctgcgaaataaccatgaagaatattatcagttccctattggggaacgtgagcagccgaaaagacaaaatatttcataactgaagttgttatataaaacctgcttggttaagacttcaacacttaaaactgaagctggaaagtcccaatctgtacagacgtccacacagggacttagggggtatgtccatatagacaagattgatgccatctggagtacaacttgtcagcaagaaggctaagtcaccatgcccaacgtaccacttgatggggagtccaaatacttaagtaggaaaagaggcaacgaactgtttaaccaaggggatctgactggaccacccctggctggcctgatttctaacataggtgagctagcctgcaacaatgggaaggccaaccaatctctcttctcacaggcactttttgtgcctctacaactttcaacttgttaaaaacttccagttacaaattggtcttaaaaccccataaaaataggagattaacttcagttatttacctattcttgaggattaattaacatattttttgttactaattttgtgtaacaaataggtgatatctcctcattttcagggatatcaacctactatctctttaatgctctctcctatatatagggcatttaattaaatctaaaatctctacgttctatgctctaagttctaagtcttaagctttgaagctctaactcttaagtcatagagttcaagcactgaaaaccctagctcaccttttattctacatgccattagcagtgtagtagagactaagtctccctcatctcatctacttgagattagcctcttattctgactattgtaatcttaagagagccattttagaatccacaacacttgtgatctgagttgtgttatcactaatatcaatacaactaaaaggggagtaggtcattacttgctaacaaagggagccaaacctctataaaattgttatgtcctttttatttacttgttctcattgtttacacgcggtaatttagctcccagttggctaaatctgaggtcaacacctttgattagcaaaggtatgcacaacaattagaatatcaatgtagcatgtttaagtaaaaagggtgctacagtttggtattagagctgtcaggttatttaccgaagaccatcaagatatgtataatcatcatcagagacaagctggactcacggttcaataagcctttacttgtttagtaatttattttaattaaaaaatgtatcatatgaagcatgttagtaatttgttagttgaatagtgcattgcctaaaattccatgtatgcagtgtttagattgtatttaatcgctatctgacctacctaatttatgggttcgtaggctagtcctataatatggaggcccgatgaaacacaagaagtcaggacaatatggttgagagtagaggcgatcaaggaggtaaaacgcctccatatccctgtggatgcagtagaggtcaaggtggatttcatacaggtagttatgaaaattcaccacaggctcctcaagataggggtaagggtttgtagaaatgcaagcccgaattaaccaacaagatgaagagatctagaggctgaggtagcggggtcctcctgctatgcctcctcagcaagtgccagctactcttgttcaagtgttgccaatagaacaacctattactggcaactacatggagcttttgtatgagcagttccacaggaaaatgcctctagcctttttgggagccctaatgtcaggaaagtcgagctgtggctaactatgattaatagaattctcaactttatgggtgtcaccgagaatgatagggtgacttctgccactttttaattccaagaggatgccctgatatggtgggaaatggtgtaccttacttgggacgttactagaatgagttgggaggaattctaaaacccattaattgctaagtactacaacaaagtagttcatagtaccaagaggaaagagttcactgagttggttcatggagagaatatctcagtgacttaatatacaacaaaatttgatcaactcgccaagttggctttgggtatagtacccatagacttcagtaaaaaggagaaattgttgggaatattttac

SEQ ID NO: 35486 - DNA, 1102 bp, Cannabis sativa
tttatacagaaaaatttaaagaattctaaaaaaaaaatctaccatacaattcttatatataataataaaaaaaaccgcacacaaaaaaatattttcaaatatatgttacagtgaaaaaattaaaaattgaacaatcctcatacataacaaaaaaaaataataaatatataaaaaattcatcatataatctaaaattaattattttctttacaatcaagctatttcatcaatcaaaaccaaatgtgcatactttcacggtgctttattaaaaattatgttcacttcttaccataataattaataaaaatatttattgttcaactaggtttgaacaattttagaattttgaggagaatttcagactattgttcgattatgagaaattaaaatctgcagatgatgactctttgaagaattttcgtatcaatcttacaaacttaatgaagcactgtgagattttagatcttgagaataatgacctataccaagagttatatatgttgcgtcaaagtttaccaaaagaaacccaaagagctgtcgatgtgttgagctatataaaagaagtggatgacagttatctaaatgctaggattacttataggatttttcaaactattcctgtcaccgttgcccctgcagaaaggaatttttccaaagtgaccttgatcaaatcttatttttgttcaaccatgtctcaagaaagattaagcagtttaactatgttatcttttgaacatgatatagttgtaaaacttgattatgtaaatttaattaatacttttgcatttaaaaatgcaaaagacttataatattatataatacattaaagtttataaatttagtgatgatttattagtttggaatatatttatattactaaatattagtttaattttatttaaaattacgtaaaaaaaaaatacatatataaaagctcattttttttaatttactaaaacccttttagatcttttttttagtgccaactctgagctcacttattaattctagattcttcttctaaaaggaaaattatacatataaatctttatatttttagagtacaattagagatttctagactaattatgtctacaaatgt

SEQ ID NO: 35487 - DNA, 1379 bp, Cannabis sativa
atgtacttatcaatggaatctaacttattgaatttgagtgattcaccatcaaattttattctaagtatccatgctttcatatccaacttcttactcactgtgagtaagaagggtctcccaaataaagttgatgtaggattgggatcaccctcatcttccatctcaatcatgtaggaatcacttagagtgacaagtccattagcctgcctaaacatatcttcaactattcatgagggataatgattagcctgattagtcaattgaataaaaaccagagtttctcttcacataccaagattagagaaactaaattggaataagacataatattaataattgctcctaaatctatcatgacattatccaattctattttatcggttgtgcattgaattgtatttgtcttaggcaatatctttctttggagaacaacagaaacattctcccctacatttattttctcgccacccttcaactttttctcatttggaaacaaatccttaagaatgttagcccaatgaggctcttctttgattacctcaagacatggaagttttccctcaattttagaaaaagtcttagggggctcctctttctttaattttttcaatttacttgaaaaaagtggagtgacataagttggtacaattggcttgtatgtctttttcagtgatggtggatcaactaaagtaaaagattcatcttttggtcaagatgatccttcaagggatgaattgtggactccattagttggaatcaacttatgtacttcttggtgtggtggtgattcaagttgtgtaccactttgaagtgttatggccttgatattctctattgggttactctccacttgtgaagacatagtatttgaacattgaattttatattcactcatagatgtttctatttgctccacaagattctccatattttgtaaagatttttgggtgctctgcataatttcttgaaagttttgctaaaattgcacgatattttgttcaatctgcaagttattagctgctatcatttcaatcagcttagcagtagatgaattttcactatatggtacaacaggagtaggttgttaagaataaggcacataattttgagtatatgggtgagcttgatactaaaattgaatggtattgctcgccaaaacctcttaaccttgattatgtggttgtgaaagatgatcatagtattttggctcaacatattaatttatgttgccatataatgtattataatgatccccctattgtgaagtgtaactatcatataagggatcatattgatatactgtggtgatacataatatggatcattatactgtttgttatttcaatttttgcactctgacgtggcatcacacgatggtg

SEQ ID NO: 35488 - DNA, 1661 bp, Cannabis sativa
  modified_base (575)..(578): a, c, t, g, unknown or other
agaaatagttgattcttggttgtttgagcttgtgggtatttgtgttttgcatctagtctttttagtgagctttcttaaggttggaattgagatttttatctctgtaacttatgttttgaacctgtaggttggagcttgaattgttagaacatgatttcctttgtccttctttggaactgcaccagggacaacaactagttctgcattgacgggatcatcttcaggcacttcactttcaaacccagaatcatcagcaggtgaatgttctttcgggaaaaattcttcactagaattagacacaccctttgaccctttgattcttgatcaacatcctcagtctcttcttttggtttagaatttgatgattaaaaggaagaaggattctctgttgaggtttttgccctttgaggatgaagtcaccactttctctcctttgagagctcctttgggcttatcactttgggtttctttggtatggacaccgtggacctggtccgagagcttagggtaggcaagggcacaatacctttcttgaaaatttgagaaccattcaaagaagaagacttcgacaatgnnnnatcagatgaatgggattcatcatgatcactaagcccaagatttggggtttcaatcgaagaagcaatgatcagaggagagctgagattgtaggtcgatatttaagcttgagattttgacatcctggaagtttttgtcagagctgacaatgacctaggagctccggtcagtggaacaggtggcacaggtggcgagggtggagaagcagaggcagaacctcgagcacgcctcttagaaggttgagccttttttgtcttggcaatttttcttggaacactagaaaaataatctctcaaacttgaaaaacattacacttttggaaataaaatagagagagaagaggatagtggttatcatgggaatggtgggtagttagacatatataccatttgaaaataaatactcaaaattagaaaaaaggaaagtaacttcctcacattggtcaccacgtgagcagagaaaaaggaaaccaaaacaaaatgtctcaaaatattgttaaaagttaccaaaaatgggaaaaagaaacaacaataattctcacaaaatctaaaaaatcaaacacaatacaccaacctatattcgaaaatgccacgaaaaggaaaccaacaaaataattaataacacaaaacatgtttcctaaaaggatagaataaaagaaaatccccttaaaaaaataaaaggaaaaacaataaataaaatgcaataaaaacatgtttccataaaataaaaacaacctcaaaaatcgaaaaatatgtccccctttttcatgaattttttcaaaataagccaattttttgtattttttttagtttgtaaaaaaaacgaaaaagacaacataccataaatacataaagcaccaataactactttagagcaaaaatatgtgactacgaaaatagtgaaacgtaacaaagaaaataacaagaatttttatgaaagcgcaattgaaaatgtcggtcacaatttttttattttttttaaatgaaaagcagattaataaataagcttgatatttttttccacaaaaagtaaagaatatccgcttgtctttatccctgatgaaaaaaattaaactcataagaata

SEQ ID NO: 35489 - DNA, 1825 bp, Cannabis sativa
attggtaaagtatactagtatcagatgtatagagtatacatcgaactagatcgatattgaacttggataagatatcataaacttattgttatatatttctaagtcaaggcacttagttgatcttagatgaatagatcttaatcctgagatggttaggttctggcttaactatataatttgtgttctttgatttgtttgttaaagctgaccaaatggatcgactcaatacttacatcttgggaacatgataatacaattgagtatgagcgctaattatagatatggattctattagcttctataatgacatagaagtagaatgatgatttcctttgagctaggcttaacaaagataaattgaagagcttttatttcaataataatattagtttactgaaatatcatttatagaaagctaagtgttttaaggataaaatacattgaatggtgaaaatgtaagttttgtccctactcggtgtaaatcatctatagatgatctttgattattttgattataataatggataattaatagcgtatttatatttgaaacatatagagcgttctatgtaatcaggagtgcaatttcgaatctatagtggagtcaagaggaattaataagttaaaaaatttacttgataaatttcaaatctacttattgggagcttgattatataggctcatggtcctcgcactagttgagataatatttgtttgtagacttaattaactgataagaattctaaattagactatgtcttatttatgaactttcactaagtaagggcttaattcagaggaaagagaggattttagatttatttgttaattaagagactttgtaaggtccaattaataaataaattaaattaaattttatttgataattaattataattattaaataaataaatttgacatttatattgaaattaaaatatggcatttgtgaaagaaaaatataagttgttacataaatggcaaaattgaaacaagggggtccacttgtatgggcggccacttaagaggtttacttttacatttaatatatgtgggacaatgttctccaataccattggaccgtatcattgggctaccatcagacctttgtcttcaatctttactcactctaacaacagaaaggcatcagaccaccatcgaactaccatggggcctgaaaaaaaaaaactagttttttgcccaaaagtcatatctaaccattttcgatcctaaatctaatatctacctacagataacaaacattaatcatacaattcattcttttgtcaacattgccgatggtgaagccatagttgatggagaagtcattgggtctgcaatggtcattcggtccgtcggtccttgggtctgtgattggggtggtcgtggagaaaatggaccaaagttgtgggtggtgggttgtgagtcgagcccttggagtgagttcagaaagcgagagatataagggaggaagagagagggtcaagtgtttgaaatgggaggagtagaattgagttttataaattgttagcatattctaacaatacgtgtttaacttaagtttaaaaaaataattttaatctaataaatacataaaaaattaaattcctgtgtaaatttaataataccattttttagaattatatttaacaaataaatatatttctattaaagatattttgattttgatttagttatgaatcatgaaatattaataattataaatctttaatgtttatagtatcatcaatctttaacaactaaataagcactttttctattagttttgtcttttgacatagttttttagtcttgtcttttgaca

SEQ ID NO: 35490 - DNA, 1602 bp, Cannabis sativa
atcacaatagtctgtgatggagagattacctttcctgatggtagatatctgtgatttgatctgaagcaatcttgctttagattgacttgcgaatctctgttcaagggcacaccatgcttcataagatgaagtgtactgagcaagagagccaagaatggtctctgtcatagaagaacggagccagctgagtaaaagttggtctttacgtttccagatcaggaattctgggtttaaatcaccattaacaagaacacgagcaggggcaacaccagtgagcaaaatatcgtcgagaccatggccaataacagtgggaattacttgcgatttccatgcgaggaaattgtttcgatccaatcgaactgtgagggacgaattcaaagaattctgaaagggattccattgctgaaccggagttgcagcagtagcagtagcagagtgtgaagcagcggtttgagcagtaggttcagggtgccgaggatccatgaacgacgtaggtcaaacgctatctgataccatgtaaaacaagtaaacttatctatgcaattctaggaggacacaattagagaattgaatcacaagactttgcaaaagttgcaagtcttgaaaaatgaattggtatttataagaggatgatttacagagtttgttacaaggagaaggaaagaaaacagttaaagaaatctgtaacgattacaaccaactaattaacagtatataacaaacaaatcctaactgcctgtaactaactctaaaggttgtttatcaatgtataataacatttaggaatttgagatttgaagagtctttaggaaaaacaacaatataatggattgtaatgaaatgtttgatcaaatcatagagatcaagtgcctttatttataatgaaagatgatacaaacactaagctgtcacaaccaagaaagactctaaaaatttaactacaaatagactagtcataactacatttaactaactgtacaattaagaggttagttattataccgtcgaatgaaagggagtagcaacgacattgagtttattggtcttttaagtatattgaaataaacggtcaactggtagagcctttgtgagttaatcgacaacttgattaattgaaggcacataacatacatatgggtggccaaaattttatcacaaacaaattgcatttatgaattttgatatgtttacaacgagcgcatggaagagagggttgctactgctgcaggcccttggtcatcaacccataaaattggagtctcaactaaacgtagttcaccgagtaaggacacaagccatttaagttctcatggtgcatttgctaaggcttaaaattcactctctatgctagagtgtgcaacaacaatttttttgcagaccacggcaccaaatttcctcctaaaaacatgaattgggactggacccagacctcggacccgggtcccaaacttgaaacctaaacccgaacctaaagttgggggtctgggttttagttttagttcaggtacaggtctcggctcgggtctggggtttggggtccaagtcccagttcggatctgaagtccaagtccaagtcccgattcaagtctggggttcaagtca

SEQ ID NO: 35491 - DNA, 1847 bp, Cannabis sativa
  modified_base (272)..(277): a, c, t, g, unknown or other
  modified_base (504)..(509): a, c, t, g, unknown or other
tgaacgaatcctgactttcctaacagattgaatactagttcccttttagtgttaattctggaattagattgtttttcaaaaattcagatgggatcttgaattatacgtctactagtgatttagtaatactaaagaataaataagtaattagaagagtaaaacgatgatttgaccaaaactaattatgaaccaacacatgaaggactaataactgaaattgatataaattatatcaatgggcattgtcgttaaactcagtaaatataattctnnnnnnactaagagttcaattccatatttacagtggagtaatcatgaattaataaacaaggggttatttagttgatgagactcaatattttagtttattggaggttagaatttataggtcaatggtcctcgaatcgccaccttaaaatactgtcaagggtaggggttgagagttgtataatgatgttcggaaaaatctattttgaattggtaaaatagtaattatttattttnnnnnnaaataaataattttttcaaattaatttaataggaaaaaagacaaaaattgttaagacaaaatttatcgagatataatttgtcaagacaaaagttgtcaggacaaaagatactaactttatcttaaaagacaagggtaggcgcgctatccttatgaagtttattttttttgggttaattaattaaattaggtaaatatctagtctaaaaagtagttataaatattttaagattgttgagatattgtagttgagagatttcctcataaatatcaataaccgaattggttatagatatttatttgtttaaacaattaaatatgatttaattaaagagatttaactactataaataggagcctaatttgagaaaccagaacgatacttctcactcccagaacattgctatttttgaaatacccaaagagaaaaagaaaattgtttttctttcaattgttcttgctcatgtgttgagaactcaacaaaaacaaaatttatatactttatcctaatagccaacactatttcttgtgtgtggtagatcgatttggaagacactagtgagtccaatcgtgatttcctcatcatctggattaagggatataattaacgagaagtttcgaggatactctgataggcttcaaaagatatactctaaacttattactatttattattttgatttaatgtacacacatctggagatctaatgagccatggtacaatgacaatcagtaatacgaaactcttctgttgcgtacctaatttagtagcataaaaccaacagattcttctcaggactttgttctggatcgccccctattattcgatccacctaattttttgttgttcgatctacctctggtttcaaccaatgcttttggcattgagtctctatgatcatgttgatcgttcttccagtactcagtatttaccaaagcattagaaacatctataaacttaacttcatctttacaatataataaagttgtagttgaatgttcatatatagctttcagattttgagtttagcaataaagttttatcttcatcactaattttaacatctaaattttgcaaatctgccaaaattttgttaaaattatctaaatgttcaatcgtaggggtatctttcttgaattggaaacaaaaaaatttcttcttcaagtagagtcgattctctacactttttgttatgtgtttgtcctctagcttttttcaaaggactctaattacaatttctttcatgacaaagtatttctaatcttttttcacacagtcgaattgtgctacaagcttgacgattgacaaaattttaatcttccataaaataatcttctg

SEQ ID NO: 35492 - DNA, 1886 bp, Cannabis sativa
tgttatctataatatagaagatctcaccaccatcatctgtgccaaacaacttcaagaccccacaagagttatggacaagtaaaaccctaaacttagattaggcactctctaaacttgctcagcattcaggacatttaatgtcctcactcatttcttttggatcaaagattaagtgagtctaatcaggtagaattgttgggattaaactcacttaacatgtcaagtcagtaggtccatctttttgctcatcagatgaatctgaaaaaagctattgttaattataacagttggctttaatgccaatttaaatgggaccccagtaacaactataattaggtgttcctctattctcaaagggagttctgagtttagcgtttttgatctctaatctccaagctcatactttaaatttagtttagagagagagagtccaagatcatagtgagtgtgtggaggggtgtaatgggagtatcactcttaaagtgattttccttaatgtgagacatttctttgtaatactttattgtgttgagttgtaatcttgagctcattctattgtgtactactgactattcctattcaataaagatcaatcattcattcattctcgagctaagttttatttgtctaatttcattaagttcaagttttaattttttgtgattggttttagttttgtttgtgcattcttagatattgttactacttaaacttgagggtgaggattcaccacacaaacaatttgagacattgttgttataatctcagttaaagtgttaagtgtaagaattagtttatgcttaattattatgatttttgattttaagagtgtaaattacaacctcgttctcaactttcttcatatcgaaatattttttttcataggggtgtttcttatgatataaaatcattctaataaatttttaaaaaattataaataatttgcagtatcgacaacataattcttgatattctaatttactaaaggtgttaaaaaaaattaaacctatcaaaataatgttgtaattataacaaatactatcataaaaaaaattaaaataatatatatttcaaattcaataaacattgtcgaatgcaaatgttgaaaagaatattaataaaatgatgtaattaacagttctttctttctttttacattatcttgttgtcattagagtatcttcaatagagtgttttcactgtggtatatatacatatattaaccaatgtcataacattgaactcttattgtggtgtataagactatttccaatgcaagatataaaatttgtactaaatttgacacaaaaaataagtttgtgctatatttggcgcactatttacaattgtgttcaaatgcataagatgtaaaataagtaaaataattaattattattatcatcatttaatattttattgaaatatacaaaagatttttttttttgtatttttttattgtttaaacaatggtaatatggtaaataaagaatgtaaaattttgtaaaaattaatcaatcataataattggtggtactatagtaaataaaaaaaattgtatttattttgggctaaatttaatacaatgttatatcttgtgtcaaatttagcataatttttaccatgtgtcaaattcgacacacattttagaatgttactggagtagtatttttcgaaaatgtgctgaaatatagcaatacatcatatttttggtacaaaatatagtatgagtcaaattttacaccataataaatatcatttttttttatttaatctttagtcatttattaatgcagttaataatttttatacttttatttatatatttaatataattttattatgctccctgaatttttctggccgttaaaattttttcttgaactatt

SEQ ID NO: 35493 - DNA, 1707 bp, Cannabis sativa
  modified_base (1647)..(1652): a, c, t, g, unknown or other
ttagtaagaattatatcatggctattggccactagtaagaatttaaaatcttaaaataatttagtaaaataaatatttattaaaaaacacaattttttttttcaaaaaagaatcttattgaaattctgtagttgatcataatatacacgattagtttcaaaacgatcaaaaaaataattatgtaaaaatttaaagagctcaccaataatatcaagcatattaaagatatccagattctcaaaatactaaaagtctatatagcttaaattttgatattctttaaggctaagattcacaagtgatcaatttgactattaaattattaattacttaaatgttgttgattttaattagttttataatttagtgttaattatgttgttcttattttattactattagtaatttttattgttattttgtatttgtaaaaatatgttagtattttaaatcaattattatttttgtgataaattttaatttgaggactaaactataataaaataaaattaaataaggattagaatgtaaaaaaaaattgtacaccaaattgatgcagattcaaaaaatcaactccattaatgatttaacatttggtgcacactaatttggcccataatttagtgtgtcattggagtgaaatagcgtgaagatttaacattaatttggtgaaatagtgttccattagaggtccactaatatttatatatatactaggttgatattacatgaggtgcacaacttgcaggtatgcttagttttttttttcttttaatttttttaaaaggactcttttaattaggtatataatgtattttaacttttaattgttatattaagtaaagatgtaatttattttaaaaaaaataatattattatattaaaaaattaaatatttgatataaagttttaaataaagaaaacatataatagaaacaaagcatttctattccactcgtttattgattaaaataagatgaactccataatcagtcaataactttattatcactctttgtctattacttttaaacattgttctaaaaacataacgggttgtgacttttgtgtaatatgaacttaaattcctccataattagttaataaaataaatctcacttaggaattaaatctgcataattgtgacagtcagtagtcccgtgatctgtaaggagaaatactgggtaagttgtgcaatcccacattgcctagagaaggtcatgtgtgatgattttgagactgtgtaggtatgagactacatagttgaagagggcttaaatagattgattggtactacctatatcaataatgtgcatcttgttttctggtagcccatcacgaaagaactccaaggttaagcgtgcttgacctggggtatttttaagatgggtgacctcctgagaagttttcctagaaagcgtgcgagtgaggacaaagcatgctggaaatattcgtgttggtttgtagggtcagtcatcaatccataaaccagctatagtgacatactcgtatataagagccattattttgtggcccaatggaggcttgaagcgtggacgttacaaatggtatcagagccatgacctagttggaggtgtggtcgacaaggacgtcgaactccataaaggggggtgattgtgacagtcnnnnnncccgtgatccgcaaggagaaataccgggtaaaatgtgcaatcccacatcgcctgg

SEQ ID NO: 35494 - DNA, 1613 bp, Cannabis sativa
gttgctcttttgcattggaatagaacacaatttggtaaagttgataatttaattaaggatttggaatggaagcttgattgcatccagcgactcctgatgggattgagagtttgggacactgaatgtgctattcgtcggtctctcaataaggcttgggaccgaaaggagttatactagaaacaaaaggccagggtttcttggcttaaggaaggagataaatgctcgaagtttttcttcctctacgcggctatcaaagggagacggaatgctattgaaagtatcttgaataaagatgatatttggatttctagatgggatctaatccataacgaatttattgacttattcaagggaattttctcgggtactaacgtttgtaatgacttcaatggtagccatctcattcaagataggatctctattgttgactaagatgaactggttaagagtccttctcacgatgaaattcgtagtactctgtttgccatgagtaacaataaggctccagaaccagatggaatgtttgttcttttcttcaagcactactggggaactgtgggtagggacgtttgcgatgcagtgtttgatttttttcagacaggaagaatgcataagggtgtcaatgctacgaatattgtgcttattcccaaggttcagaatccgaaaagaaccaaccattacaggcctatctccctctgtaacgttatgtataaggtcatctctaaaatcattgccaatagaatcaagcccctgcttacttccctaatttttcctacccaagcggcttttgtcccaggaaggaacattcaagacaataatgtgattatccaagaaattatccactctttcaataggaaaagaggaaaagaaggtttttttccataaaaatggaccttatgaatgtgtacgataagttgagtttgaattttattgaccaagtgcttgctagttttggagcgccacaaaaaatttagaggttggatctctcagtgtatcactaccacctcgctcaacatttgcattaatggagggcagtttggtagaattataccctgttgtggcctgcgccagggcgaccctttatctccttacctttttatttgcgcagcggaaattttgtccaagcttttgattgatgcccaatataatggctctataagggcattaagcacagcatagggggccccattaactctcatatgttctttgcggatgatttaatattggtgggaagagcgaacatggaggaagccaaaggttactgacattgccttgagagattctgcgcttggtcaggtcagcaagtcaacaagctcaaaacctctatattctttagcaaaaatacctctaatggcatcaaaagaagtattaaggaggctctgggtttgagctcaccggagtgtaacataaaatatctagggctacctccttttagatctaggcaaaaagatgcagatttcaactttatcttggataacctcacgtctaaacttcaaggctgaaaagctaagactctgaccaaagcaggtcgtgcaacccttataaagtctgtgggctttgttgttgcctatgtacgctatgcaaacaagtaagctttcgaaccgtcttgttgc

SEQ ID NO: 35495 - DNA, 1950 bp, Cannabis sativa
tttgtaaataactctttcttttattatgtttataggttggttttatgtaatttgaattataaattagggttgaattgatgttttatactagtttttctgcagattttttctcttttagttatgattgcttttcgatttgagtttgttcttctcatgtgacattgcctgaattaatactgcttccacgtttgctagagttttttcattatcgccgacctcattgcattgcacgaaggtttcaatctcacgaaatgtggatcatatgggttgaagatatgggtttcaatctcattttattataactttttattaagctatatatttgtttatttggccagtccacaatttttttggtgatattattgtttttttttttttggttataatttaaattttttttataatcgtctacgatataattatttagaatctatatgtaaaattttaaaaaattctgaataatttacaataacagaaataaaatttaaatatttttatttttaacggtgttaaaaattccgatttctttaaaaaaaaaattacattatctagtcctaaaaaattgcaaccatgatgaaatagataaaaagtgtactaatatattcttttaacctactatagaaatttctattattattattattattattattattattattgtaaacagtaggtagaacttcacataagctttgaattggatcgaagtcgaattggaagtcctttttgaggataaggcatcatatcacctttaattttttcatcagggatgattagttcccactcgaacttctttaccacattatgaatgaaggtgagaacagcaagtctagtgtactcttttcctgggcacatgcgaggcccacctccaaatggcacaaatgtaaaagctgcaggagaactacttgcatcttcgtatcgtgatggctcaaatttctctggctctggatagtattgtgggttcttacttgttgtactcacagtccaatataactgcatcatatgtgaaatcaaatttaattatttagtttcacaacttgaaaaaattaagaaaattattaataattattaccttccatcctttgggaacagtaaaaccggcataggtaaaatgagtaagaacctctctgaaaccaccttgaataggaggagtgaatctcataacctcgtaaaccacgttccatgaatacttcatcttttttatgtcatcccattctaacaattctcctgccttttttgattcccaaatctccttttgttctgtttcatattcccatgcacatcacaattaaaacaagtacgtatctatatatatgtgaatctatatatgaatttcacgtacgttaagtctgaatcaaataaaacaaaaaaatatatatttattttattttgaataataataataataattagaatttttgtgccctaaactatgtaccaaattatggtcctgaacttttctgatcgttaaaaattctcttgggatattaaaattgttagatttaaagacttttgtctaatttcatttaattttactatttcatttaagtgaagtccaataaaacaaaaaatatatatatttattttattttgaataataataattataataataattagaatttttgtcccctaaactatgtaccaaattttagttcctgaacttttcttgttgttaaaaattcttattgggattgttagatttaaggacttttgtctaatttaatttaattttattatttcagtgattatttatgtactaacatgtgcttctaagattttgatatcaaccaaatcatgtctctcgaacttttacatatactaaattatgtcccctcaactttcattcatattagactttttttattaaaattcgacaaaaatctttaaattcaacaatctcaatgattcatgaagcatttttaactattttaaaagttcaaagagcat

SEQ ID NO: 35496 - DNA, 1092 bp, Cannabis sativa
caatagttttcttctaaggactattaaccttactggattgttgaagtgccaaactcactctactcgagttatttacaaaattagtgccaacctcacctacaaccgagttaattttttactgttgccaacctcacctctcaatacaatgaatatgtaattttaaaatacaaagtaaactctctctaataagatgaaatacaatgtgaaatcctagagagaattgcaagcacattagagaagataagaacaagtttggtttaagtgtgtgtggtttctgtgtttataaaaagatgaaaattatttagcttagaacacttagaatgatgttatatgatgaatagaagcttaaccaaccctaatttttgagtgaaaaatgagtttattatatagtgtaggactaaaacctagccgtttatagccgttagcatatttttttaggcacattctgccgtgatccagaatcctagattggttacaaacagaattcctgatgggaaccaaaattctagatgggaaccagaattctagatggctaataggggcaaaaagttaattttttcaaactaaaacgtgcataattttttactcgtttattcgatttcaaaaattacagttgcgttcttttagttaaatgatatgtgattttaaaaaattgatttagaaagtttagatatcattttatgaaataactcgtcgcacaagttagtgagccaaacttttaaacttataaaccttaatgtactatgcaaatcactttaacaagactaaaataaacttataccatttgattgtgtgtagtcttgatgtagatgaactttctaacttgatttaaatgttttaatctaaagttgactttttttgagagttatctttgactttgacttttgggttgatttttgactttgagcttttgaagtcttcatttggatagggtcttctattattgatctcttgatgaaacttttgcacttataaagtatgaagaagttgatatacttgttgaatccacttctttaattatgtttgactttaccgagcaaatattgatactttgtgaattcacttgtgaaatgatcaagaaaagattagtaa

SEQ ID NO: 35497 - DNA, 3264 bp, Cannabis sativa
  modified_base (28)..(29): a, c, t, g, unknown or other
  modified_base (2656)..(2679): a, c, t, g, unknown or other
ataatactgacttgtatctaggcgcccnnacacctatctacaaggcttaacagatgagtaagaacgttccataccagggtaaagccactataccacatacattagatacctcactgtatgagtgttggtagggtttgtttcgtaccccgagtaccactaagtgatataccacagacaccctgttcttttccgtacttgtgcaggtatcactgtaatgtactcttatacaataatcattataccaatgcactgtgtaccataactgtacaagtgttggtagtgcaactaacatttaagcctgtatatacacataacatatacatacactcagttatttatagcatacattatatacagttcttaccttctttccaaattcaagtgtgctggccaacctgaacggaaagtctcgtgctagatggatgccctaatcacataatgaaactgggtaaatcacatggttaaaaccctaatctcgggaaacccgaacctccaactctaggttttgctatactctctagggattattctaactcgggaaataggcaaacacccaactacgacactgaaatggatgagaatagagaaaatggatcattcggggaccctgtcaaaaccaactagccggttttacaggtactagtaaaaccggctagccggttcataccagttcaccccaaaatctccattccttgttcaaaaccccaccaaatgcagccataccttctagagtacctaattagggtatacacaatattttccaactagtaattcacaaaaaaactcaatgaaattcaacatgccattagagaccaaagctttgagctcaaagctcaaacttgcataaattcaacacaaagtggtaaaaccagctactaaaacctttaatcaacctaaaatgaacataaaatctgaaccctaggtattcctaatcttaacagccacgtaaacccaaattcactacttcaaactaacttaaaacttgaaaatacacaaaatcaagggttctagggtttaccttagcttgatcttccttgaattcttggttgaaataacaaacttcagcaagaactccctgattcctagctggttcgaagagagagcttttcttcaatttttttagttaatctctaatttccttatttttccctaatagaataaagattaggaaattaattcctttgctgaaataatgagaagccacatgtcatcaccctaggaagccaccaaaccatcactaaaagaaatgacttaaattccctccaagttataacttaggcattttccaaaactaggggtaaaatggtcaaattccataacccgcttaatcccgatattatattttctccaaaaaaatttccactaggaaataaggttctaaacttacctatgtgatcaaactagacatccatcgcatttccgttgtcgtcgagtaaaaaatacaaaaataacatatttcttatataatccaaaaaacacccctagattttaataaaatctcctgaattgagaaattattactctaatgcccatttctaacaatggggcctataaataattaaatttatatttaattataaaaatattagaaattagtgctaattgcctttactaattcaaattactaaagcggtcattacaacgcttattttttctttgtttttctcttgtttctttttccaattttcttcattcttcatcaaaaatataatcaccaccaccataacctcccacaatcccatgaccacatccagtcgtactcaaacacaaccccacaattcatatccagattcaatcaaccaaacaaaccacaaaaatatctcatatctcaaatttgatcttgttatacccaaaatttggctgccatctcaatgaagaacacatgtcaagataaagggaatttaaatcgatgtcattgcttttatggaataactcattaattacgtaagtatcagagtgtatttgtaacccgctgactgtaaggtcttaggtgagaaatcaatgtacaaactggaacttaatatattagcgaaaaactatatgtcactaaatgcgaatagcaagccaccaaagaaagcgacccatatcaatcatggagatgcttagcatacaataaacaaactaagtataaaaatcagatcggctcaagaataagtacgcgaggtgaccatctcgtaatgggaagagttcctatagcttcatccagctaacggtaacgaggcttacaaccctggagagtcagaatggttctttgtaaataagaaccgcaatcgacaccatacatacattgttgaccttagaaagaagtatggccccagctcgctattaagatcaatgtaaccaagtttctgtcgagacatctccagatacgatagctaaagatgtgttaattacacgattattttgacccagtaaaagtgggaaagtcatagttatacatttttcaaatcgtaaactgcatttacactacgtgatgtgtaatcaaatctcacaattttagggataatggcagtaaacatattccggtcaactttgtaattaattgtccactatgtaattataaatagtgacaaacaagaccaaaaaaattgatgaaaaacccatacaagagagttccttaaaaaaaatcataaatctgaataagattgactcgtgnnnnnnnnnnnnnnnnnnnnnnnnaaccacgtaaaaaaccctgtgttcgtatattatttttctatagctttttttttttttttgtgtgaaatcaatatcgtgaggctaaattttagttaaaaaaaatttgtgttaatagtttggtgctttcattgagagcctctatgaaaaagctcaaaaaaaaccctcccttctttcgaggaaaaaccatctccttcatggctgaaaatctagaaaatgttaacaccccacatgaggaaaccaatcatcgttctgggaaaggggccatgggctccataagatctatcaacctgcagtctagaaggaccacccgttcaaggagggttcaacctaagggtggccccagtgcgcggaccacgcgttctcggagaactcgacccgatgttggtcctagtacacggacaacacgctcgaggagaactcatcgtgggaatagtcaaaaccccaggacaagagggatgaagagcacaatcgtggaggtgcacaatctgtgggagaaagaacctatgaaacacagagttagaacgtgctgcagtctcgaccagggcggcacaggggataaatgttcaaaatcaacctgaacttgga

SEQ ID NO: 35498 - DNA, 1396 bp, Cannabis sativa
taaaaatgaaaattaatatactcttattttatgctaaattttatttacatttacaaaaataatatagttaaatacaaatttaaatatatgaaatttattaatttatttattttattcaatagtggacaacaaggatgctacattgaaagtggtacacaagcatggaccatgctctccacaccaagccaaaactaaccatactcaaatcctccaacaagatgaataccgagtcaactccattcgatctcgcctttctgataaaactgcagacgctacgatctctcgtggcggtcgcggtggcaacacaagagctaagaaggacgccaccaccctcccggccaagtcgggggcagtggtgggatcaggtaactatatagtgaccgtggggctaggcacacctaaaaatgacctatctttgattttcgacacaggtagtgacataacttggacacaatgtcaaccttgtgccaagtcgtgctatgaccaaaaggagactatatatgatccctccaaatcttctacttactctaatgtttcttgtacctctgccgagtgcactctactcaaatctgctacaggtaataattacttagactcataaattaaaatatatatatattatttaaaaaaaaataaagtaaatttttattatttttaaaatttatgaaattttaattctcaatcaaaaaaaaaaaagtgaaaataattttatagaatatgtttttttaaaatattttcatttttttaattaaaaaattattaccaaacacaccgtataagtatataaaataattattttgttttgctatagaacataaatattattatacattaaaatatgtatgattcttttttttacccaacaagttaagattaggtataactacatcttaatttaaataaatattatgcatagcaacaagaatataaaaaaaaattatatttattctttgagaagaattttttatttttgtatgtacaataatgtaggttttgaaaaattaataattagaataagattaaaaaaaaaaaaaaaagttatgcttaacatggttccaatcttttcacttaattttttccccacaaacacataaaaatggtataaatacaatcttttacaaatatgtgataatttcaaaaaaaaaattaaaaaaaaatagtggctctaacctttaataaattaaaaatgagattctaagtagggttttcacacccaaatttttaattattttactttttttattgtggggtagaagttttttaaaaaataagtgtaaattttatatgtattaagtttttactgttgttccacagtttttttttagttgttctgttttattatttgcaggtattttataaaaaataatatttttataaaaaatttaatgtgacagta

SEQ ID NO: 35499 - DNA, 1474 bp, Cannabis sativa
aacttaaagccttctggtgaaattaatattacccctgcacccgagccctgctcgttggatgcaccatccacttataacttccaagtgtcccggtctcgctcaacaggtggattttcctctaaagttattccttctattaagaagtccgccaaagcttggcccttgatggattttcgatggtgacatgttatgtcaaactgccccagttcaattgaccattttattaatcttccaaaagcatctggttttgataaaacttgtcacaagggttgatctagtaacacttttattgggtgtgcctggaagtaaggccgtaacttgcgagacgcatggataaggcataaagagagtttttcaagagggagatacctcgactctgcccccagtaaacttttactaatatagtaaataggttgcttgtgcttttcctcttttcgtactatatctgccctaatcgcgtcttctaagattgtcagatagaggagtaatgtttctccagttattggtttctccaaaactggaggcattgccaaatgccttttaatattctgaaaggcctcctcgcattcttttgtccactcaaatttcttgttacctcacaatttattgaaaaatggcaaacacttatcaattgattttgaaatgaatcatttaagggcagccatccttcctattaaggcctggacttccttaggctttattagtgatgacatatctatcaaagtcttgattttctcagggtttgcttcaatgcccctcgcgttgactaagaatcccagaatttttcatgaggaaactccaaaggaacatttttttgggttaagcttcatattatacttctttaatatttcaaagcattctgcaagtccgtggtatgactcccactatttactgatttattaacaaatcatcgacataaacttccatattttgtccaatctgattcgcgaacatctcattcaccaatcgctgatatgtttcccagcattcttcagcccaaacagcatgactttgtagcagtaaagtcccatgttggttacgaagatcgtatgttctcgatttgggacatgtatttttatctggttatatcaaaaatatgcatctatgaatgacataagcttgtgcccaacagttgcatccaccaactggtcaatcctgggtagtggaaaacaatcctttgggcatgccttattcagatcagagaaatcaatacaagttctccaagttttgttaagttttgggacgagaacatgattggctatccacgaggggtaaaacacctcgcgataaagtcattaactaataacttatttacttcctgtttaagtgccccttgtctctcagaatccaagggtctccttttctgcctctttgcttggtagtttggatcgacatttaatttatggcagataatattagggtcaatccatatcttatctccatggttctaggcgaattgatcctagttcgccct

SEQ ID NO: 35500 - DNA, 1323 bp, Cannabis sativa
atttattaaaaaaaatatatattccataaaaaaattacctcatcattttacaaatggaaaaaaaaatagcaaattaaatttgatgtaatgtacttttattgagtggacgtactatttgctattacataataaatagtttatttttaaaaaaaaaaaatagcataataaaatagaatgcaaaaataaacttatatatagtattaattatttgtaatacctatttaattattttttaaaatctttttttaattaaatgaaaaataactttctacttccataaaaaaactgattatgctatacaaatatattaccaaaataatagtaaattatattatctttgcaataaaaaaaaaatagcaaattaagtttcttgctgtagttgtagtatacaaaagaaaaaaaaattaaaactagtaaagagctttcatgtaaatattaaaaaaaaaaagtattatattatatatataaaaaaaagtgagtatttaattacatgaggtaattgtggaaaagttaactgatggaaaaaaaatagaagtagtgaaaaagttagtgaattaaatgaatgaaaaagtaaatagacatgtggcagttatttatcggagggacagggttgggataggaaaattgggacaagtgattttttttccatcattaataataacaataaactttttgttggttcatgaaaccaagaaaaagattatcaaaaaggaaaagtataagatccaaaactagaatttgaactattggttaaatttttatcttctttttaattttaatttcattatcattattatattttggtgtatctttaatgtgttttttttttcttttttattctttatgattttggactagcaaaatggcctccatatctaattacaaacttaaatttaaatattaatttaaaaatatgaagaaaaatttgtaaaaactaattagattggatccgttttttaattggatattcaattacacacctaaattttaatattaatttaaaaatatgaaggaaaatatgtaaaaactaagtatcagcctttatttaagtttaatactccataaatataccattgttacaagtataatataactaaaagtttcaaataattaaaatacatgaaatatcacttttgccagcacatttttatgttggtaaaaatttatattgcactggtaaaataaaatttacttctgatgtgttggcaaaaggagttggcaaatcaacgttggtactaaaacttttgccatcacaaaatgaaaagtgttggtaaaaataatttgggaaatttgattttttatacttacatttggttaaaaaaa

SEQ ID NO: 35501 - DNA, 1779 bp, Cannabis sativa
gaaacttacataatataagaaaatattttttaatgggtatacaaggaaagaacattactattagacaatgtcaatacattaatatgatcatgtagtgcattatgaataattagaaattttttatattatttattaaataataaaatatgagactcgatattaaattgtaccaataatttaatattttttttatgctatttagcatcatgtcttttagtatttataattaaaaaatgttaaatataatttaatacatatctatttatatattttgaaaatttttgatatatttcaatttaataattattataaaaaatgttcatcacacttgtaaggtgttatcacactgatattattaataaataatgtaatatatacattatctaaaatacgaagagtataagcttttttaaaataaataaataaagaggaagagtataagttaagtcaagataaagttgatatgttttagatgtataaaactcatgcacgcgtttatgtatgtaattaaaaggacatatttttttttttctattcttgtagggatttgttttcttatctctcatttatctcttaaatatatatatatatatatttatttattgatgaattaaatcagccatgaccccatgagtatatatttttctcacatatttagggatgaatttttttcattacaaattttaataatagtatgtaaataaagaagacgtataatttcaaaattataattttttttattatatttggttgcgctcgacaataaattctactaggactattataaatggttaaatagttaaattaatcaaatagctttagttattgaacaaatataagtataaagtaaatggataaattcaaatataattattgaacaatgttaccggcatggtagagatatctactatatctgttggtctaacttgaattttatttataaacgcattttttttaaaagtaaattaaatttacagttaaatatataaaattaaatataaaatacaccaccaccaatacgagtgggaaagggtgggatcaaatcttgagccaatcatcagatctaatatatctataagctgtcctatcctagtggtcacacataaagttaaattagctgtagtaaaattgaatcgtgaggcatcttttgatattataagtataaaaatataattaagttgaatataacttaattatttattatatagtataaacaagagtcaatataatatatgttttatatgtaatatatatagttatatgctgataattcgaagacataaaacaagagctttcatcatcagatacgattttctcatcgatccaaaatagttttatatatatataccttgatacaacaagcaaaaaattctcttttacttaataatattaattatcatttcaaattatattgtaaattaatcctcaatgtcatgacaaacttaatgtcatcatcatatattgataatatagtagtcttttatatagatctatgtgatcaggggcggatctgttgggattttatgccctaaataaaacttatttcaatctaatatgatttgttatcaatataagattagaagtcatttatgtttacatgtagttttcatatttatggtttaaaatgtacaaaatctgttaagtccagaacatatagtcattcacaattacattcatgtaaacacaggggaatgtgattgtgattatatgcttcaaaagacaatgtccctgattcatcatgcactggatttacattgatgtgataatcagcgatgaagt

SEQ ID NO: 35502 - DNA, 2623 bp, Cannabis sativa
tcttttgatcaaaggattgagatgaaaaattggcgagggtcgttctgtaaaatgtgcttctgatccttggatccctagtcatactacttttctcccaacaagatacattggttcttcaaacaatgttgtagcaaatttcattacggaggacaggcagtgaaatgttcccatgttgcaagaggttttttgtccgattgatgttgagaagatcgtcactatacctttgagttacttcagccccaatgataaacttatctggcatcatcacaactctggtatttatacggtacaaagtggctatcattttgcaacctcccctgaagatgaaaaccttggctctagctcctcgacaccccagtcatggtggaaattcttttggtccctacaaatcccacaaaaagtcaagatcttcgcttggcgagtcattcgtgacgctttaccaatggctacttcacttgttcgaaggaagatcattaccgattcgacttgctccatctgcagacaagcttgggaatcaacgggacgtgctctttttagttgtaaatatgccaaggttgtttggagagctcaaaactttacgttcaattggaacgcatgtacatcgatgcgtagtggagattacttgttacatctttcaacaacatacacaaaattggagatggaacaaattttttgtacattgtgggccatttggacggaacgaaacaaagtgtttcatggttcaaaagcacgaacaacttagaatttagccacttttgcctctgatttcatctagaatattcaagctactcaacatcagcctcctgcttcggctacttctgcaccaacagcggcacatcagcaacatttacaggttgtttctacttctgcaccagcagctttgcactagcaccgtgcaaatcctgctctatctcaaccgtggtctcctccagctccaggcggccttaaattaaatgtagatgcggctgtcaattcctcaccgaatacaattggtgtgggggctgttattagagattctaatagacacgttgtggctgctatgtcaatgccaattgtaggtaacttcaaatcccatgaaatggaagccaaagcactcttccacggtctcaattgggccattcaacaacatataccggttatacaagttgagacagatgcactcatggtgacaaatgaattgacaactcccttcaatccaaattcatctttttcagatttaatggttgatgttattagtcttttatcctttttccctaatgtaaatgtttcacatgttaaacgttctgcaaatgaagcggctcgtggtcttgctaagtttgcattaggggtggatgagacttgttcttggttggaggttatcccttcacctatttactctgttattgtaaacgaatcaatgtttgtttaataataacaagttttcaaaaagaaaaaaaaaacaatatatcacccattttcatctccaacagacgctattaagtgaattttgaaaacaaaaaaatcatttcaaatgtgaaatataaaccataattttgaaatttgtgacggttccaatacattttcagttttatatagcctccacaaacctaaaaaataacttaatttctttaatgttatgatccttaaatttgtatgaaagtaggactgggaagacgcaagcaatcatcttcatatctatcgtagcttaccagtaccataacacgaaaacttccactcaactttataaatggtgtaaattaaagtattacttaccatcttcctttgacatttgtttgtagctggcacacatacaaagattgaagataacgactatctgcattcctcaaacgaattgatcaacgcaatattcacttttctagccgaaaaaagaataagaaaagaagaagatatgaaaacggcctacgtgtccaaattgagatacatgcgtgtgagatttcactcagttttataatatacataaatgaagacagccttatgttaaagtaactcgttcgagatgatatctattcgctttagaattgatacatcattaaataaggaggtgaaactgaaaagtaaataattacctttttttaacaagtgcatgaattattgtaaatgctctgtctgtcataacaaatcaccacactaaaccctttcttctcctgaacctgtcaacacggtcagtactcatcctagatttttcgggcttgattggttttttagacttatcaagtcgactatctaaactgtttctagaaatttctggaagctccgtagccaactcaagtgtgtccgaacctccagcttcagatggttttttctgactctcagattctacaccatttttcttcgaactacttgcactcggttttgatttgccaagcgtctgtacaaatttctttagatgttttatgaattctgggtatagttcaagattgcagtgcccacctccactaatccagagcggttcatatttttcattacatagctcccaaaggttcttcccatgggacaaatccacaacttcatctgatgtcccctggacacgcaacaaaacaaatgtttatcctcatttcaaaaaatatatttattgacaagaaaaattaagaacacagcagaaccaaagaaactactgaagttt

SEQ ID NO: 35503 - DNA, 1561 bp, Cannabis sativa
agcccgaatgcccaagtaagattcattgagaataatcaagaactgaagaatatggcttctagtgtagtaacttgaactttttacatagcaccacaatgcaaccacaagtccaaggagtgtttggttgatactcgttgagttcatcctagagggcttgtaactgggtgaaataagtagtgactgagttattaccttatttaacattcttaatagaggttttaagttggagaatacgagggtcgttactctgattgaatcaatcatgaaggtttatccacatttcacgggcaatagttttaaacatgatgctagcacaaatttcacatcacacggattgaaggatccatgacataacaatgttgttgcatcgattttaagcggataaagagtgatcatttagcgatggttggggtaaagtgtcatcaacgaatggagttttaattttggtagtgatattaatcaaaatcgctcgcttccaagactgaaagttatcttaaccagtcaagagaaacgaagaaatggtgtttggttgatctccagttcccaagtgatagcgatcatcttgagaaggtcgatcaaaaaagacacgagataggccttaatttgcaagaaaagtagagttatcattaaaatggcattgatgtccaagaaagggattgttaccagtaatgaacggagaggtggaaaggtgaatgatggggtcaaatctgaggtagtgccagaaagaatggaagtcaatgagggaaccatctgagctaaggccagagttgaagaagagaaaggcgaaagcattatggtttgggtcggtgatgctatggataccaataccagcgcagagcaagagacgaacggtactgcagagtgttgtccaatcggtcctgaactagggacatcgactacgaaatcggagccgagcacaccaatagtggaaggatcaaacgtggagtgatttgcatcgatcgtgttcgagatagagttcttaagcggcaaagactgaacagcgcaatggcgtcagaggtggtagcagtgatagaagaagaagcttgaccatgggtgacggtcggagatggcagtagaagagaaggagactcattgacggaggcgacaataatggttgagtttttggttctaggagctatgggagaagatgatcttattttagggctggagtttgaaggaggcaactagagtttttggtggtgggagaagataatacctgataccatattaaacagggaaacctctcggttttgaaagtaaatggaagaaaaagcttttaattgattaggttttacaaagcaatatggagtatatattgaggaaattacattgaatacccactttactttatttgttttaatttttacctttatttccatattctttaaaatatacccacttttatagatgatgtccccattatatcccttatgttaatgtaaattatgtgctagacttgtgaagatatattgggcaactcactcacaaaagtggatactttttgataaaatataatagggatttttataaaaatacagaattttgggcaaaagtttacaat

SEQ ID NO: 35504 - DNA, 1358 bp, Cannabis sativa
ggccccaaaatgatgttgaattactcccagatattgggcctaccctgatacaaagtcttgaaataccacatatttagacctgcaaatcccaacagccccaccatttccctgagcccataaatattaggtggcccagtaatgaccctaacctccaaaagatttactgccaactcctgggccctgactctattgatttatataaatatttggtgtcttgttatgaacaattaaaacagcaggtgaatggtcataaaattctctcattcatgaatactgcctcgacagtagggaactttaccatccaatcttgattagcaagaacacgatcaatcttagagaagattcgatcatctccgaactatttattactccaggtatagtaatttctactgaacttaatatcatccagccaacagttagctacacaatcgataaattcagtggaagaaacatacctaacccgtttcccaatcatttcttccttttccaagatgtcgttaaagtcacccataatgatccaagcttctcttgtagctaattaatgaagatcaagccataatcttttccttccttcttcatcattaaaagcgtaaataaatgtgacatagaatcgagtcttgttatccaccgttgagacttcaaggtgaataagttgactagaacactttataatgtttacagtaaaacttgttggcttccaacttacaattattcgccctcttgaatgacaagcattattggatgtgaaacaccatccttgaaatacattagagtataaggcaccaagctttgaaaccttaactctagtttcgagaagccccaccataccaacactttgagatgttaaaaattgttttaccaattgttgtttgtgctggttgttgactcctcgaacattccaacttgctattttatctattgggaagaggatattgacatattaattatatagtactcattatattatacatcccattttgaaatcataagattttatatttctattattaatgtaattatttatttaatttttaaaaaataaattatcattttatttgtcactagctaactcaaaaaagagaaaataatagaaaaaaaattaaaagtataaagtcgtaacaacaaatttcatgaaaaaaaaaataatgtagtagtataaaaagattaaatcaggttgtcaaaattaagtagaaaaaatttgtaatacaaaaacgtattgatgagttgatattgttttgaatattacaattaggtcattattctgttatttttttgttgctttctagttatctttttgttgttttatatttattttcatgttgtttgttaagttgttttttatattttactaaaacata

SEQ ID NO: 35505 - DNA, 2214 bp, Cannabis sativa
acatatatgaaaacaattaataactctattttacattaattaatcaattcaaccctacctacctacctattttggagataacaaacaacaaccaattttggttaatgagcttttgtgattactcataacattaatgaagattgtaatagaaagtcatacaaaattctttttgttatagtattggtttctttctttgtcaaatacatgcatggttagtatatctatctttgcttattattttagcctcaaaggtatatgatctggtctggcaatatgtttatatatatataataaatatacatctttgtgtagttttttttatgaaattcgagctgggtaagtactggatgtttcatcatatgatattttagagtttgaactaggtttcaagtggggaagcataaaactcataataggactttgtggagattcatgtgttgttaaacttatggtcttccaaatttgttttgtcattaaatctcttctgcttaatgctcttctttaaccttttaaccttttctttttcattgctacctaagttatggattttcaatgctagctagatagatacttggcttaggcatatatatatgtatatatgtatatcaaatatcttcttttatatatgcttctgatcattattaactcatcattttaactattaattcttgtaaagttcctcaataccatccatgtatgtatgtagttcatgaactactactgaaccatgcaattacttgaaaaatcttcaacataatcatattccttcttttaggtttcttttacacatccatacatagaaatggcatttaatttacaaattctattatttttatctataatactttctttttgaatcaattttttttctcttttccatcttataatattccttattataaaggccaataataacatttcaaaaaacattagaaattattgtactaatttgctgtccactaacagctttttcattgctctcttccttgccattttttttactcattattgtcttttggttgagtcactctactgatatgagaactatttctaacatttgcactatattttttttttgaataatgttgtatattataataattaaaagttataataataaaaaaaataaaaatgtaactaagtatacgtgcattgcacgtaacttcaatacaatattgtgtacttttttttttaatcaaaagctctttctgatctctctctctaaaaaaaaaaaagctatattatctactctcaaattacatcttaaatgataatgagatgcccttgcaatataatgagcaacactatttacagagcacttaacaaaacgtaaagaaacattggacaattcgaataataataaacgacaatcttcaaccgaaaaactaaattgagagaccatatgaactatactcgataatacttgaacactcacaagattatcgaactctacaatcacattgcaccagtcttgactcatgatctcaagcaacacacccgaccccaaacttagtcttattttcgaatatagtagcatcaacattaagcttactaaattatcacaacttagttaccaaattccttgccgacctgactatctctaaagtcggtacaaacgttccaaataaaccaacaaatcattgcaacaacttccttccaccaaaaccaacaatcttcctcaacattattacttagttgaatacttttaatcaacacatgatctctctcattgcaaaggctcttagtaatatattattattttcatcccaagctcgatccattttaaaaagagaacaccattaataatattatatatagtgccaaatgagttgtatgtatgtgacttaaaaatgcattacaaaaaatgaaagacacaaaatcaagtcccacattagttttttttataaggaaacccatcatacttactataaatgattctagttatattattataaggacgtaagaaaacctaaggacgtattgatcgtggaatttaatattgatattaataatatcaacgcgtttttaaaattatattattattattattattattattgaaagtttaaagaaataaaagatattaaaagtgcttaatttattggtttaagagaattttttttaattttgttaagttttttttctcaaaaaattatttctgttaaatttgacagatagtaacagagctgttagtgtaaataatttttgataatg

SEQ ID NO: 35506 - DNA, 2236 bp, Cannabis sativa
tcttttatttttaagtatattctcttaaatcaagaaatgccgtttataaagatatatatatatattttattaattttgaataaatcaaatttgatttttatataaaatcaatttatatatatatttataaaatctgtttttgttttttcatatttttatgtttttattaatatatttaaattaaatattaatttcatataattaaaaattaaattaacaatctaaataaatgtatatatttacattactctaagtaaatatattatacaaatattctaaaattactctctaagtgtttacgagttatctaattaaatatagaaaaagaaaaaaaaaatctcatacaattgttctactcatcatcatcaccgtgaatcaccgcaagtagttttgctatcctctctcggtgtatcggtaacaacccattttttacatcgtatgttttttttttctccaaactgtaaaataaaaagtaaatatttttattagtatatatatatatatattaaattgtttattaatataataaataagataactaatgattaaaacttacaacttttatttaggttatgtatctggtaggatttgcagctcttatgatgccactaatttatttcatgacataaaaattacatagactattttgggcaagttgcttctaatatttcagtattgagtccaattaatgcatttgtcccctcactcttcttgtatgccttattttgaaaattatgttactatttcaattaattaacatatatatcttagttaattaaatatttttttatataaagactaattaaatcattacctcctcaatatagcatcaatttcttcaggaggtttgtggctttttatagattccaaatgtaaaatcctccccgtgatgcaatgacctcgagcattcaatgtgcactaaatatatatatttatataagattatatcaaaataatttcaaggaacaataaaaaaaaataattttaaatgatctcttaagtaggtttatccgatattctaaggaatgaagaacatttgatattgactttttatcgtttccgaccaactagccattctggtagccgccttctcaaactgattctctttatctatatcttctttaccgtggattgtgagaagctctgggttataaacttaaaaattcgttgcaaatacacttgcattaaattgttaagtgttaaagttttacaaaaatttcagcagaaattgacatataaagttaattagattaaataaagtatatcttgttttgaaaagcattttattgatttccaataaagtcacataaaccacttgtgttgtacatcttttccaattatcgtgatatgtgtacgaggcgttataaatccacgtggtactggaacatcaactgtatcatatatttcattgatgctcaaatattcgtcaatcatatatcagatcgacttggaaatttttgccatgattgttagagtgaatgattcatcatatcattatttgtgttattttaaatattgtaactaactagtgactaattctactctaaattactaactagtaactaattttagcatacttaattactaaatagtaactagtcctaactctactgaaattttaatgtctataattgaacttttctaaaaaatttaaagttattaataacaacaaaatacaatctaaaataatgtaaaacaatcacaacaatatttaacaatataaaaattttccaccccatctgaccgtaatacatgtatttgcagaacctacttcattaaatgaatatttaagattgaatcatttatcatgcatcttattccattccacccatccgattgcattatgatatatcgcagaacctacttcactatagataaatatttaagatattcaaattattcagcattaataattaattaataacaaaagttagtgaatatatacctgcagttagctaaaaatcgatcaacaccaaataattcgaatctttgcaaattaccttacaacctaaaatatatagaaataatacaaaattaaaaattaaattatttaactacttactaattatataatttatgagtacctagttactaactagttaagttagtaatttattataaactaaaactaatgagtagctagttagtaaaattagtaactaattgttaggttatatttagcctatgtttcgagtttgaaaagtaagtattttctcgtctattggtgtcttttaga

SEQ ID NO: 35507 - DNA, 4479 bp, Cannabis sativa
ttttgggtccgacgggtctgatgggaacccggtgggtgtccgatgcatgtgctggaaaaatttttgggttcgacaggtccgatgcatgtgttgtgtaaaaatttttttgggtccgacgggtccgatggggaccccgattggggtccgatgggtatgaagaaagagagaagaagagagggaataggagataatgtaaatgagggtattttagggatattataaaatgtgtcatatcccacaaatattacatgttatgtgtttaggggaaaaatattatgtatttgtaagcataaaaagtcaaatatttttaaaactcttaagagctccaaagttcaatcccttataactacacattaaatattttttaaaaaattaaaaagtagaaattgggaattgatcccatgatctagtttaaaataagaccttttaccactacaccaaatactttttgtaatattttcttcttatttaatatttaatttatctatatataaatatttttttttcacaatctcgaggtcctgaacgtttggggcccgagacgcacacctaacccgcctaggcgcctactcttagggccggtcctgatatacttatagcataattaatgtcaggcctgattattgaggtggtgtaggatgtacaggttagttttaataaaatacaaatgagttgaattctcaaaaaaaaaaaaaaaaaacaaaacctaattaataacaatgctctatttattatgatcagcataattagtttatgacaccaatattaagcatattttttcattttagcttttatatatatatatattttttttagtaaaatcaaatccacttcattaaataattaaatccgtcacattataatattcttgaggtactagttggtaaatcattttcaaaaaataaaaggagcgatttgatcataaaaaaagagccccaagtaagataatctgactagccctaaacaagacaaggcaatctacttcattttaactaatttatatttacatttcgaaattatttattcccttccaaaattaacctatagatactcatttttattgttttggaaacatacagataaatatactcatgttagttttaacttttaagacacgtgtcattgctagaaaccacgaatttaaaaattaattctcacccaccaaataataataataataataatataaaagtgcatgtactcaatcaatcacaaccttttgtttcgatcatggagcaatatagagaaatcatatatatatatatctctatatagagagagaagagaagagaagagagtatgattctgagtccccacgtgacagattcagacaaaaccatgcaacgtaacagactttatcggttccttccattttcctatatacatagttaattaacacctataaaaaccccacttcctcaccccctgccatctcacaaagcaataagctagtcacatatatatctatacatacatatatatatatatatatactcacactctagctctaactatatatatatatatgtttctccaagttatagctagtcttatataaaatttgcatgcatgcattgcatgggaccattatatcactactactgaagctgctcctcaattgcccattgatctgtgcaagttaataatcaggtgaattttgccattggatattatttatatacttgtgtgtgtgtatatatatatatgtaaatatatatataatgtgtaaaaatatatcacgtgagatacaaattaaagttgttggctttagttaggttgtggttggttactttattctttgttaattaacttataattgactaataataattaattattttaatttatatataatgcagagttttttttttttttgtattagtgatgtgttggcatatatttaatttatagtgtgggggaaattgtttggttgaaactaacaagttatggaccatagagaaattggatgatgaacccgtgaatggattaaaattctattgtcgagcagctatatatacttttttatatataatttatatatatatatattattattatttgatctctttctctctctctatatatatttatttattttatatatatatatataatagctacatgccttcctgcttccgtggccacaaatagctagcaaacaatgaagagtcacgagagtttttgattttacatcatgaaaccccccacattcacccaattaataatgctttctcttctgatcatcatatattattttcaattattctctctttctctctcttttcctctacatatattccaaaaagtttatcatgtatacacgtatactctataatatctttcttattcattattgagatttttctctctaaaaatgctataaaaaactattggtttggcaatggcatcacacgactttgaaaaaaattaagtattaagtcacataatttaatttagtagttattataaaatatcgctaattatttgtaaaataatattttgtagcgtgtattattcttttattattatatattatgtatatgcatatatttttttttttttgaattaaatatattatatatgtatttcaagtagtataattaatcaagtacgcgtacgtacacaacacacacaacatctctcatctcatgtcgttataaattaacaagtggggtaactatatatataaataataaatgcagccaatacaaacgtaaagaatatatgtatcagtcttttaataggtacgtatagcattaaggaatattggtagtttaattaattagtatattgtaaggtattatacatacgtgtctacatacacatgattagatggaattttgtttttgaaaggtacaaaaatatatggtaattggttttaaggacatattaacttcaaaaatttcctaaacaaattatactagtataaatgagtacaattaagttccaaaatggtctttttaaatggatttattatgaatttttatatactcaatagtcaataggcacattacttggttatgtatctatctatgttatggagagctagccttgttggggaggtgaaacatgtaaagcaccagaggaagacatgtggcagtggcactgagttctagatcttactgacctcaaactagttcacaagcttaaacatagctgcattttctataaatatatatataaaaattacactagagggtaaaaagcagcagtacatgcatgcacatgtgtatatgtatgtcaaatattattattatgtgtatcaaaacagttttaagttggacagagtgaaaaaaaaaaaaagagaaaaagaattagctgctagatttttggaccacataacatggtgtcatatacggtctaaaactttaaaaaataaaataatagacaaaagaaagtgagagataactaggaagaatctagttaaaaaaacaaaagaacatgtaatgtaacactaccagattattgccacacacaaagaaaaacccttcaaaaacctttttcattttttctcttctccaccacatttcaaccaacaaaaacagaacacgtgtcatcatcacacatcatagtgaacttttaaaaacattcatcactataaaattaagactcctctgctccaattatttcgtactacatatatataatataactcactactactctccctctgttataatttttcagaacaagctatatacaaagaaggaaaaaagaatcaaccaatggagataattcgtgggctgttactaattttttggatgattgttattattaacaatgtagaaggaagatttcattaccacaagaagcaaaacaagaacaacaatgaatccccaacaccttcagcttcagttgtgccatcagacccttcttcttctcctcctccttcatcatcaccagtagtagtaccttcagacccttatgtaaacaaccctgctccagcaccagaggatgatgatacgacaacaggagggggagataattgtacgacattcgatgttatgtcgtttggtgcagttggagatggtgtggcagacgacactgcagcctttaaagaggcatggaaagctgcatgtggtgttgaatccggtgtcgttttggcccctgctgattattgttttaaaattacttctactatcttttctggaccctgcagccctggattaatgttccaagtaagtaatgttattgattattaattattaattaggataaaaaagggaaatgaaattgattttgtgttttgttttgtgaattgattaatataggtagatggggtattaatgacaccagatggaccagaggaatggcctaaagcagatagccttaagcaatggcttgtgttttacagactggataatatgagtttcacaggaactggtactattcaaggcaatggagaaaagtggtgggatctcccttgcaaacctcacagggtaaacaaatataaccatcttatattttagcatttgctaa

SEQ ID NO: 35508 - DNA, 1334 bp, Cannabis sativa
aaaccaaaaaatgtcgttagatagacacttttaatatataaagatatgtgcaaaactaatgcattaactaaatttaatataaaatattaaaaataagataaagtgaatgtaaaacatgcactgtatttaatgtaatgtaaattttatatcatgttatattgtgattttaatttagattaactattgctaaaatatagtttattatgtaaaaagtttgctccaatagtgttcaatagcttatgcgaatttgtcacgtagaaaaaattgatctaaatttaaattacaatacaccatgaaacaaaatttgtatcacaataaatgcacaaattttatatttatttttatgtcatttttaatattttattattaaattaagttattacatcaaaatattttttttgcatttattttttattgctttatataataaaataacaataaaattaataataagttatttttaataaaaggattgattaaatattaaattttacatcagattttgcaattgtgcattggagtacaaaaagatgcaaatatatcacaaaattattttgtgtcaaattataaataaaacagttcaaaaagtaaaaataaattttttttcgtattgatatatttttattagttttttaaaatttttaatctatcatataataaatttttctaaaatatttagaagaaaaaaatgtcaaaatttattgtgcatcaaaacatattagctataattacttgtacaattactattttatttttcaaaaaaataaataaataaacaactaaaataccaaaatatattttaagacttttttttcaaaaataattaaaatagtatatataattctaagaaatcggatcgatatatatagctaaaaaacctagaggagacctgatcacctcagcctttcttctcaccaaatataaatatttgctcagtgctcacaccttcttctccctctcccaccttatctatccttccaaaaatattgtgtgaaattgtaatataagaggcacaagaataatcaaatggttaattttttttaatcgatatttataatgaattgacgatgtatattatttacaatgaattgacgatgtttaaggatttaattagttaggatatatttagtaataattatttgaatattatttttaattaaaaaattaaaatatattatgcagacccacatagaaataaggccggcgggcaagactccgtaaaaaaaatgaaaaaaaattgggtggatatgcaaaatggccctaaatttggtaactaagttagtaaatgttcactttttaaaaaaattaagaaaatggccaaatctaataaatta

SEQ ID NO: 35509 - DNA, 1223 bp, Cannabis sativa
tgtcaaagcttggctggtttattgctaaaaatatgatgcgctttcggtgcatataattaaggttaagtactgctccaaattgagcttctaggataataaactctcgtgctatgcttcctttgtggttaaaggaatttggaagacaataaattttacctaggataatagcacgtggatcattgggaatggaagaactctaaggttaaggtgttgaatttctcctggtcttgctctgatgggcgacttatcaaaccaccagattgtaatccttggattgaggataatttggatgtggaggattcagtgttaaatgatggcaccgactggaataaagacttggtcaagagactcttcatacctgaagcggctcaaattattttgtctaccaatggatccctcttccttgatgatgataaattggtttggcagtcttcttcttctctcttaaagcttcctatttagacatgaatagagatcgtttatccatgataatattagttgctatggggatcggatcttcatgggcatttaaagctctttctttagaagttactcaaggattgccttccttttgggtcttggttgttgagtatctttggtaaccatattggtgattgctctttgtgtggtatggatgagagtgattcttctatccacttcttctctctttgttcggtgacaaaatgctcatggttcacaagtggatggtgcattcgtattgacgaaattcctttccactctggtggggagatggtaaattgaatttttaatcctcttgattctcagggtcatgatatttcgtttgattaggcagaatttgctttgtttgatgttattatgtaccataagctttggttctttaggaatactaattaccatagtggagggaggtggcctttcaagagatgaagtcgaagatttatgaagatttcaattgccattggaagtctttcttggcagtcaacagtaggtgagacaagcccaagaggttccttggagtataatgggctttgtgtgtattgaaagtttcggtgaagtctattctccggggcgagttggaggcagttgttcatggcttggaggttctacggagaatggtaattcatgatgtaaacttattaactgactaccaacaactcgctcaagcgattttgaagcaacaatctcctcattgtaatttagcctactccttcaagctaatggatttaatgactggttctcgg

SEQ ID NO: 35510 - DNA, 1093 bp, Cannabis sativa
atatataatactatatattttagacgctagctagttgtggtgatatatataaagtaagattacgttaagacttagtataaattttttattcacagatttttttttaattattaattttaaattatgtggttattataatataaaatatatatttttatgataaaattgttcttatatagttaaaactttgtacatattatgataatttttaattatatattattttaaaaaataaaataatattaataattcaaagaaatattaatttttaatttacattattatttttttaaaaaaaaattaatttaaattattatatacaaatatttattttcaaaaaataatttaatttataaattttgctatcaatatttttatactaatagttaactataataaaaataattacttaagtattttcgccaccaatttattatctagttctaccataattattatttttttttaaaataaatttgctatataattctttcttttaccaaaaaagataatttctatcaatccaattgatcgagtaaattaattcacaaaaagattctctattaaaagagaaactaacattttttttttttatattttttagaacaattttattttacatatataatttcttttcctatagaagattaagtctacttttaaggctatctttaatatactatctatacaactcgaattcatgtatttttttttcttatttatacgtacaaattttaatttagtcaaatgctataaattgcacgtattaacagattcttatgaacataatataatttttatggtacattctaacatatatattcatttttaaaattatgtatgtgttttttaatatatttatctgtttttttcaataaaaaaacaaaattaaaataacaaagttcattaacttaaagcaaaaaataaaaatagcctactaatatatacatacatatgacatttataaagctctctttcctttttttttttattataatttttttataaagcagccatcttttttaactagaaaaaataatcatatatacgcacatactaccataccatctaacctctatttaattttcatctt

SEQ ID NO: 35511 - DNA, 1721 bp, Cannabis sativa
gatgattgttgcatgccaggccatgtgaggatcagctacaacaattttctgcatagtttatttcgtgcgggccatcatcctacccctggatggtggttggtgagtatgccgtgcaacggtcacagcaagagtagcaatgggaatgccaaaggcaccagggcttggacgacccacaggaatggtatcagctacgtctggctagacaatgtatgtcaagttggacagaagataacatctccaccccttcttgagttcctaaatgaaacgctcgtaacctttgcctgcgatttgctcggaataaaaatggtgttgcacttcgggttctggagtaggtccaccctctctgctcacttcccggctctcaaaactcgaattggaaagtctgtcactcaaggaggatgtactagcataaatatgagattgatcctcatacaaaagttggagaagatcctggtcgatatggtgttctcctccccaaaactcaccagtgttcatctataaaacttaagacataagaagagtatttggccgggatatcgaacaaaaataagcaaaatataccgagcaggtctaatcaaaagattaaaaagatgaaaatttcgtgtggtttaggttcataaccccgaatttcaaaaccttgaattaagggttaattttcactaaacccccaatgggcaaagtgagaaccaaatattgtgaagttaaattcagaatgccataacaatcaagttatatgacctactacagtcgaagtttcagagttctaaacctagattctctacaattttcctaaaacaagtcaagactattgaattttctacaatggaagcccagaaaattaaagatacaagcattaaaggaggaaaagatccgaaacttaatcactgtttgaagctttgaggttgctcggatgacgctgatcagctctttctattaattccacaaagaaatcgagagagaaatgtgaatttgctctgaactcactaaacaagaaaaatgctaaaaatggtttaatatgactttttgccctatttataagcagattagtgaaaatgtgtaatcattttgaatttcaaacgccttgatttcctcctaaaagtaaatattgggaaatcaaaagcaatcaagtacctggagaagagtaaccgtcaaaagcatgcaaataagtagtgtgtctcgaggtacgatttaatcagaacattaattagtcgaaaaatgaagggactctatatcagaatcacatttgatcaccaacaggcacatcgaacacgtgccacccgttcagatacaaagttaagatgagtgaagtctatgcgcaactttggaagtctcgtgcagacttggggggcaaatgttatcccattttttgcactatgatgtggtaacatatactggtgacacatggatcctatttcctacatctgttgaggagatattctgagcaaagctcagtatacatctgcacggatagagtctgcctgaccgagcagggcaagggtagacgattcaagcaatgcatcaagacttagcagtttcaagacttacatcgtgaagcataaaataaattcctacaattcagggatcgtataaaagggatatggcaaactgtcctaatccctcaatttatgtattctaaatatgtaatgtgtattcttaccaattatagatattgtaagcaaaagagaaaccttccttcctgtatttagccctataaatagtga

SEQ ID NO: 35512 - DNA, 2639 bp, Cannabis sativa
  modified_base (299)..(301): a, c, t, g, unknown or other
tatatatatatatatattcgaaatcctataatgatcgagtaccttgcccactcatatcaagtcaatactcaatcatagtgtggaagattttgaagaattccaacacctgaagaagatccaggttcgaatcttgttattactctatgaaaaaaaggaacaagggttaaagatctgaacggaaggagccataatattctgctaccaccattgtaaggttttctagaactttatatgtatttatttcattattttagaaatgtttaggatgttatatagaatataatcaaacatacatgttnnnaaatctagatcttggtaaaacaacatccaataggttccatatgtttcaccatatccagtggcacaacaagaagtgtcggtgttacaagaataaacacaagacgagcctcttgttctctcagatctcagatctcttccccttgttgtctaatcgtatcctgcatagtagtaattacttgtttccagtgttgaggcggtagaggatttacttccttaccatccatcccgagcccagacagctcgttaaccaaactgtttgattgccttggctgcataacatatcatacatttaatccacatctttcaaccatttagaactcatacaaatttcaatatcaatatgcgtataccatacacatattcttatcataatcatcactatgctacttttcccaacatactttataatagtctaggaaggtaatccaataacaaacaatataaacacttaccagtaaatgtacatattcgatcaatcttcaggacctttgaaaccatgactactctaataccaagttgtaacgccctcctatagggatgccacgtgtgtagttttataaacaggtttagtactaataaagtaattaattattaaaatctgtgataatattaaaaatttcactaaaataaaacactaaaaacatatatcataacgacacttaaactgtgttccaaaatccctgctgtaaaagttttacaaaaaaggctaaatacaaaaacaagtcaaaatacgtggcagatacaacccaaaaataactcttggcaactcaacacacaggccgataggatcaatatgtacattactagataagactattaccttatgactgatctagcttttctttgtctttacctgcaccacagagcaaccgtgagtcataaggactcaggaagaaaaataataaaagatagtacatggaataactaattattcatttcactattaaaaaatgattaagcaataacattcaagagtggataacataacaaactgtatgtatggaactaaaagcaatcatatattgcattgcctaatcaagcagacctgtgtcataatctggtatcacacataattcgttgctgcatcacctaatcagatgagcctgtgccacaacttggcaccaatgtatcacatcgcctaacgagacaagcatgtgccataacttgacacaaatgtattgtatcacctaattaaacgagcccgtgtgatagcctggcactcactgtcactaccgcctgtgcctaaacaagcatcaccgacaggaagaaacctaacaacggttacagtttagagtcatgacattattgtgtttgcctcacaggaacacccaaatatcagtatccacatatcacatttcttactcaagaaaattcatgccatagcttggcattcatatatcgcattgcctagtcaggcaagcctatggtctatctggcattcatatactgcattgcctaatcaggcaagctcatgccataatctggcattcatataccgtatttgcctaatcaggcaagcttatgccatagcctagcatccttatatcacatcacctaatcaggtacgcatgtatatcaaattgcctaattaagcaagtccatgccatagtctagcatccttatatcacatcacctaatcaggtgagcttgtatatcatattcatattatcattgcctaatcagacaatcgacaattatgaaacctgtcaggccatgttgtacattatacttttcttacctttgatccagattcatgcatgtcggcccatccaagtagataaacctctctgataatctcgactctatgtcacaacaacagtaaaccaataagtatttatcctaaaaaatgcttaatatttctaaaggataacctagggttttctaccaaaccccgtagtataatacaataaaataaaacttatattttggctctaaaacatataccatattgtagagctcgtcacaagcttcaaaacagtgtatagaacgtccaaaacgaaaacccgagtgaaaagttatgacaaaatacgatttgaattttttgaaaatgacaaaccgtttggtgaaatgattaaccatttcctaacacgaaccagttgactggttccaccaaacgtggacgggttagtagtaggggtcaaaaatctcaaatttcgcactctctgaaacatcaccaaaacttatctaaatcattctaaacttcatagggcacatatataccataaatacaacagtccttacattacaaaaatttaaattaagcccttaaatgaaaaacgccattaatgttcatacttaagctttaaaaagttccaaactcgatttctaactcaaaatca

SEQ ID NO: 35513 - DNA, 1247 bp, Cannabis sativa
acctaagcttaacttgccctctttccaaagcgcatgatacctttcattggcaaaactcgcaggaaaacatgttctcttgcctgaaatgcaatgtctctttgcttcgggttagtgaaacttgtatgcctgctttatgaagcaagcatctgagctttgatcttatctatttcatcactggtcttttgaactaactcaggacccaaatacttcctcgcccatgttttgtcccaatgtattggagaacgaaacttcctactatacaacatttgatagggagccatccctattatactttggtagttgttattgcatgaaaattctatcaaaggtaagtatttgctccatgaaccctcaaagtccatgacataggctcgtagtaagtcttctaatatctgaattgttctctctaattgtccatcagtttaagggtgaaaagctatactgaatttcagttgtacccatcgctctctgaaggcttatccaaaattgtgatgtaaactttggatccctgtcaactaatggattttggagctccatggagacgaactatctctctcacatataactctgcatattgatccactatataagttgtttttaccgatagaaaatgtgctgacttcgtgaaacggcccattatgactcatgctgagtcatacattctcgtggttctaggcaaatcgactacaaggtccattgtaatatcctcctacttccactcaagtagtgctaatggttgcagcaaccgtgttggcctttggtgttcagctttgatttgctgacatgttaaacatctaaacacgtaattcactacatattttttcattcaacaccactaataaaagggtttcaaatcctgatacattttaatagttccccgatataacgaataaggtgtagtatgagctttgttaagtatctcctttttaagctcatcgttgtctaaaacacaaaccagagctttataaagtagcatcccgttattcgagatcaaaaagtccttaggtcgtccggctaatacctcatcctaaattttaactagctcaggatcttccaattgtgtctttctgatcctttccaacaaatctaaatgaagtgtcatgttatgtaacttcccaaccacaaattcaattttaaccttaaccatttttgaaatcttagagaatcctttgacaaaacgccgataatccctaccaaaccgaggaaacttcacacttctgtcactattcttggccttaaccaatttt

SEQ ID NO: 35514 - DNA, 1815 bp, Cannabis sativa
atatatatatataaaagaaaaaaaaaagcagtttggattccttgcaatacttatcatcatcataatggaaaaagggttaagggattcaaatagtggattcattaacttcactacatgtctgtaagtatctttagtttaagctctattatgattaatcaataagaaacaagattttaggttatattacatgttcattttttaatttataaaaaaaaattgtgaaaataaaatctaccctagtatgtattttctcgcaactggcatgaaagttattgattcatattttatttccatgcatgaatatattaaaaattgttagtgattcgtttatttattttttttttggagtgtttcgtgtttaaattttaaagcttattgattttttttttttttttgtaaaaattagcaattttaggttttttagccttgattctatgaaaattaatttttataattgatttggtataaggaactaatactcataatcaacgtgaccctggggtaagaagatcgcgaggcagacctcgaggtttaagaaccaggagacaagaagcaaatcaaggaaatccccaaaacacctaggaggaacaacctgggggtactagggatgttccagtggatgaacagcaaaataatcaagagcaacatcgagaagttcctcaaagatcccaaggatttatgaaacaaggcaatgaacataatgatgtaccagaggcttctcgtaggaatgaagacacgagatagccccaaactagggaacaaaaaatccctcgtaataatgagagaaatcctgggactcaacctaggacaagtggggtgccactgagacaccttcaacgtctttctcgatcagagagggaaggtgtacacacgtatctaaatagaggatgtgtatctaacctcttctaaaggagaaggctagtacaagacgagccaagttctcgttcgggacactcaaggtctcgaggacacagtcaatcaagaaggcaaacgcgagaaggaagtagatctcggtgttatgctgattaagaaagcatgagcaatacgcaaagctatcaatctgagagttattcagagacaacatctatgagcaattatgagtaaagacaacttgatcttcgcgaacatttgaatataagacaacccgatcttcgcaagcaattgaatcaaaatgcacctgacttaagaatcattgagttagagggtaagtttagaaaatatcaggatatggaacatgggaaattacctggatatgactcggatgaagaaactgagccatttcatcctgatattctaaattctgaattccctcggggattcaaaaatctacacttcttgtagtatgatgggactatggatctagtcgctcacctaaataactttcataccataatgtgagctagcaatgtctcgaataatttgcaaagcattttattcccaacgtccttgactggggcagcgagtagctggttcgacaagtttaatcaccatttgataacatcttgggaacaactatccaaggattttaagaaacaattcaagctgccagagatagacgacctgaagtatcatccctgactaacataaagtagcaaccaggtgagtcacttaaggcttacctgagccgcttcacgacaaccgctgcaaaggttagaaatttgaatgacagtattcatcttactgctcttcaagcagggatcacaacctacctttcaacagctgggggcaagttgtgggatgacttacagggtcgtccaataagaaacattaatgaattcaacaaaagagcgcaagtgtttatgcgtaaagaggaag

SEQ ID NO: 35515 - DNA, 1782 bp, Cannabis sativa
ttaaaaacttaagaactaaaccaaaaaatgtgaaaaataactctaatttttagagttatcaaataacatgcatgagttgcttgaaaaaaagaaaaattaaaaaaaaaaagagttaattatgacagtattgaccaacctcacaatctaggcagctagtaaaattaatggcgatacctcttgccatcaggtgatctcttgttaataagtaattatgagaggcttgctaaaaaataaatctatgctgataatccacactaaatcattttgtgattatcaactttagcataaggagtaagaaaaagagtcgtaaggcttactaacccaaaatcttcaccatttttcagcatccaaaattgttaattggtacggataatcgagtaaacacattcctaagattaagaagtttgcgctagtaccaactcacatcactcttctgaacaaccacccaaaattctaagcgttttaagtatatggcattgatctaattaacccacaaaacatcttgtttcgtagtaatagcccaaatgtaatgagcaattgaagccttgttccatttggacccttcttgaaaacccaagcctccatagttcttaggcttgcagataagatcccaagaagctagatgcatcttactagtattatctttctcacccacaaaaagtctctgcagattttattaacatccttaactactttctgcggcagtataaagatactcatccaataacaacgaatgcccaacaacactgaatgaactaattacactctatctgcaaaagagagaggcctgcttacccaactatgaagcttcaattgattcttcttaagaaaatgattacaaatcactatttcccatttagttggtctcattgtcacactgagatacttgagagaaaaatgtccctcttcataagggaccaaatcccgaatagccaatttactcatcaaccccgccaaagtatatgtgagacttgtttgggttagcatgaaggcccgaacaactactaaaggtagaaaaagcttctttgatgacccaaacgactttatctgtccccttacaaaacaagatcagatcatcagcaaagtaaagactaaccatctttaagaatttacacattggatgatatttaaaattcgaaccaccagccgtagcaaaaagtaataaccgagtaagatattccattaccaacacaaaaaataaaggataaatgggacccccttgctttaaaccccttttttcttgaaatctcccttgcacacgaccattaagaactaaagagtaggtagaccctcttaggcccatcatgatccaattaataaacctagtatggaagaggtaacaatttaggaactcttaagaaatcgcagtctatagtgtcataaaccttgctcaaatcaactttcatttcataaataccctttgttctatgtttatttacaattttataccttaaggtttttatttacaaaaataaacttataaaattttaaaactataaaaatacactttgctcagcagaaagtaaaaaacaactaaaaacaataaattaacttcacgataactataaatcaactataaactataaaacaaccaaaaataatcataaaacaatttataacaactataaataaattataaaataactgaaaaaaatgatttattatttttatttatgcagtatttttataaataaaaaaaatttaaagtgtaaaaataaaaaaaaattggtattgaaatatttttgtaattttgttttgaattttggtcctaaatttttctaa

SEQ ID NO: 35516 - DNA, 973 bp, Cannabis sativa
  modified_base (759)..(765): a, c, t, g, unknown or other
tttaattattatttttatatatttcaattctgtgatatattatttattttaaataatatttaattaatttttgtttgattatatataatagtcgtatataattttattgtcatgatatatatattttaattctggtatataatttagttagtatagtatatatattagcaatatactttattattattattattattgttataagtatacatattttggtgaatgatatatgtattttttgttatacggtatattcttttttttaaatgatatttaagatctatttttattgtactttcgttgacataacatataattttttagcatgctatatatatatttttatttgttcttattatatatatttatatatatacttttattgtaactttgtaagatatatatttttcgttatatagtatataagttttattgtatagtatatcattttattttagatcatgtttatagcttttattttattatatataaagatggtatataattttgtaggtatgggataattattttatagttatatataattttgttaatatgatatgtataatttttttaataatattatattattttattttagtttttattgtaggtatatatgttgtattgtatggtatatattttttgttgtgtatagtatatcatttatttaagatgatgtttagtttctattttattattatataataattatatataatttttttagtatggtatacatattttaatagtggtatnnnnnnntttgttagcatgatatatatttttttgagtattaaaatattatgtttaatattgttataatttatttgtggtatatatcaataattttattattacgatatattaatttttagtgattcaatatattaaatagtaccgtatatatttatgatctaatatatattcattttgttacaatatatcacaatactaaaatatttataaataa

SEQ ID NO: 35517 - DNA, 1537 bp, Cannabis sativa
  modified_base (592)..(602): a, c, t, g, unknown or other
tgtaatatttttttacaaaaaaaaatggtgtcttgtgtaattattcctaaataatattggataagtaccagtggcggagccagcccaatattttagtggggataatttttttttttgaagcattaataaaaaaatataacttttattgaaaaaaaagataaaatcaaaattaatatatgtaagaataaaagtgaaaaatataaattttatgaagataagtataaaaacatataaggacatatatagaaaaaaaatatttttatgggtcagaatataagatacttaaaaatttatatgaacaaaaaattgagaaggaagagggggtacaaaaaatattgcctcactttgtgtcgttattatctttaggttgcttttattgtgttttatttcttttgtttgggaatacattgtctagctcgttagagttagagatttgcaaaatgtgctcattgtaggcgtgttcatcaaatcgcccaaaccgctcaaatcgcccgcactgtaccacactgcaaaaaaatgtggtttgaaattttttgcggtgcggttgcggtttgactttttcctaagccgcgcggtgcggtttgcagttttnnnnnnnnnnnatgcggttcaaaccgcaccgcatagtataaaaatactagtttttatatttatttaggtccattatgtgaatgttcaacttaagcctactaattattgtatcgttgacacttaattttttttttcatatttattttcaagccttaaagtattttaacaagttttgctcaaagtttgttgtatttgtgatagtttaattatttagtgataatccaaaccgcataaaccacaatgcggtgcggtttttaatttcacggtgcgggtgcagtttgggaaattggaaaaaccgcatatacgggttagtttgaaaaaatagtcaaaaaccgcaccacccgcaccacgaacatccctagctcattgtttattgtttattttgtgatgtttcaagttcaacctttgcagcttgaggcaataacttggccgtccaagttgtagtgtgtaattattgtggaagtggaagaaacctcttcaacaatttcatttgatttttctatgtgttgggacacataacataatcaaatcattagcattgtgatatttgttttcttttgaaagtattgggattatgattttaattaatatttttcagaaaaaaatatacatatacatctattattattaaactgatggtatgtcagtcttaatgtatatgaaacttataataaaattaattttcgaaatccctacataaatagtttaattattattaaaaagaattattttaatactttagtgtagtaataacacttttcaaagctctttaagagttggaagttgggaatttatctcataatctcttaatttaaaataacaatctctttcgcgtcaaaaaaaaaatactctctaccactacactgaatattattctgttatattgtcttattatttctgtaacgttttcgctttaagtacgagtacgttattctagatgttttct

SEQ ID NO: 35518 - DNA, 1869 bp, Cannabis sativa
ttgtttggtattggctactaagaatttttctactaaaatttggcagcaaaacaataaaatttggtagctaaaagatatttttcttgtagtggtagtggattaagagtggatgagggatggacaacaagggatgaggagatgggttcagtcgtacattgatgcgtcgccaaccatgaggcgaagttaggtaggtcacacgaatcacatgggatgagagaattttagatttagtttagtgtttttttaatgtgttataatttttgtctgggcatctaataacatttttatatctatctagcttctaaggttatttctcctataaatatacgactatatataaacttgcattttgataattatttgagaaaagaagaataaccaataaaaaatattagagatgtagagaaattagggtttcattcaattgcaaagtcaaaagtgaaagagtccaaataataagaaatctttatataggcaactaacataaaagactaaattgatcctaaatagttatgtaaccaccctccctcaaactcacgatggtattgcaagaagcatcgagagtttacctaaaagaaaacgaaaatgataaatcgtatgcaacttagtaaaacagtcagcaagctgcaatgaagaatgatcaaaaggcaaagcaatggtgtccaacttcagatggtgacgagtaaaatagaaatcaatctcaatatgcttggtgcgtttataaaaaactaagttgtgagcgatctgaattgcactttgattgtcacaataaataggagtaggacaagtgtgaatgacacccatatctgcatgtaaccatctcagccaagagtctcttgagtagtagatgccatggcacggtactcagtttttgtagaagactgagaaattacagactacttcttgctcttccaagaaataagggaatctcccaaaaagatatagaaaccagtgacaaaattttcagtttgtgggatcataaccatgatctccatcccagtaagcttgcaattctaaagaggaggtggaaggcagtagtaggttctgaaagatggtactccgaagatatcgtagaatgcgaagaacaatatatagcccagtgagtagaagtaggagaagcaacaaactaacaatatgaacaccatatgcaatgtttggaagagtaatagtgagataaactagactgccaacaatggtgcaatacaaagtcgtcatcgcttgttttatcttgttttgaatttttttgttattattaatagctttatttttttggggaatatgttcaattatagtcgttatgttgctaaaatttcggtataattatgataaaattatttaatttaagtttctcttaaacttggttgttatgatttttatgttaattttcattatggagagaaactaagcgtcatataagagtttaggtgtcaaaaattctctattggtaaaaaagagtcaaacttattaacccaagatctccatcatgttgttacaataagtttatcagctgagctttacactaaagatgtttacattttcatggagcttatcacgttagtaattaaaggacaatattcaacgtttgggtttttgtttttgtactaaaagcttaattttttctcatcatttcattcatataatttgttcttttatttctgtacaatgtttttttttacgtctcatacacacatcatcattactgggaaagatgtacaccatgtgacattatgtgactttattggaagttgttagattatatgtcttgaaatgtgtaactagtttgttatgtgtaacctttgtgttttcgagttgtaagtccaactgtcataactgtcatctcgacaattatgacagttgatacccttagtg

SEQ ID NO: 35519 - DNA, 1006 bp, Cannabis sativa
tacttaatttatattttaaataatagatgacaaaaattagttataatgtattgtgtttggaagtatttaatgctaatttaactacaattattgtaatagaatcgaatatatcacaaaaataatattaagaaaattctacaatacacatcttagagatatcatgatactctcctatctattttggtatttaagagaattttttagtttattttttttataatcgtgtatgtagtagttatttaaaatatttaacaaaattttaaggcgaaaaaatttaacgaaaatgaaaataaaatttaaataatctattgcatgcgtgtctcagaatattttaaataactacaacacaaccataaaaaaaaatagactaaaaaattcatccactctttttagagtgcattgtaaacgtactaacttatatataaaaatatatattgtttaacacttgggaattgtcccttgaaaatatatgcccataattatatatccatttaagttagaataaatatcgaattataattctaaaaatcattgcaaatatctctgcaattgtattcttgtcatttattgataaatacataaaatgatttgcataatttaagataatttttgcgagaaaaaatttaagaagtaaactctacaaatatcatattcaagagcaaaattctattaattctttaaattattaagaaactaaatatacatacaaatgaaaggtgaaactacaaattattattaaatttagagattaatcttcacaaattacaggcaaaaaattgtgaaaccacaattattaatattttcctataataataatatagctaaattaatttgccaatattattattattatatatatatttagatttatactaataataaataataataataagatcctatagtagtgaagatgatttaaaaatgctttccaccactgcctctagtaaatcctggctttctattagcagctcttgttgtaattacaactctattattctgcata

SEQ ID NO: 35520 - DNA, 962 bp, Cannabis sativa
gtctgttgactcatcagtttgctaccttgtgtatgtaagagaaaagcaaagctggagaaacaatgagatggagctcggcagtgattgtacatatcgcggcagggcaacctggagtgtttcgatctttattaatttgagtctgtattttgaagttgcctgttggcgtgtttcagaaaaaaaaatatatatattatgtgtacatattagtaaaatacttttaaatcgtattttgatactcgggatcccgacccatattagtatgaaattataaaatgtgtcaaattgtcttttgagtttaaaaattttaaatacgggcgttacagcttagctgtgtaaaaagtcattttggcagtttattttacactacaaagacccctcaccccacccatactcaacttaactaagcatctaaaaagttggaaaaagaaataaggggttagaattcattgagttaaactagaatgtcagatctcaagcttgtcaaaaaaaataataataataataatcatatatcaaccatatccattacctttgtctctcacctaactctcatttagtggtagcgttttatggaggatttacaaaaatattggattttatatgttgctagaagagtttgatcaaatggtctttaatgctagggtggttttgccactttttggagggaagattatatgcaagtatatcttgagtttgagggattttttcctattagatgtttatgacaacaccaattatctaaacaaaaaaaataaattaatgaatatttttattacctactctttccattgaatgtaatcagctatgtataatatatatatacgaatatataaatatatatatgtaggtatgaagataataaatgtaatcagctactgcaatatatatcctagtttttatcttggaggaattgttggtgtgatgatgtgagactaccaaatcattgaacaaagctagtactt

SEQ ID NO: 35521 - DNA, 1199 bp, Cannabis sativa
attgggcatattaagccattgagaaagtggaaaagaagtatgttaaatggagtgtgaccaagtttcccataatggtaaattagaaaactctggagggccagcagaaataggacatgacggcgagcaacttcgcacaactgatcaacattaaggtatgttcttttatgttttgcatgttttgttttttaggttttttattagtttttagtcatttagcaacttttcgtgacataaactgatataggtttgcgatgtcatgttgtattttcattttaaatgcttttaactgttaacttgcgacgtgttttgacatatcgcgatataagatggacacacatgttattgcaacttggtgtgttatttagcgacactttgctatttgcattgcgacttttcttgcaacatattacgagtacttgcgacttttttgtaacattttctgatttcgatttctatgtgtcaaatttagcacaatactatatcttaagtcaaatttagtataacttttagtatgagctaggatcggccctaggctaaaagcgggctagacacgcgcctagggcccacccatcttaggagtccatataaaaaaatgttttttttttaaatgtacatatttttttaataatttttaagaataccatttatttttataataacgactcactttttttctaagcctatttcaactcaggggtcgactggcatgagccaaatttaacacaccattggagagctaattttttaaaaaaatactaaaatataacactataccactattttaagccctcttgatatgctcaacgccatttatttgtacttattaggagtataaatctaattcgctcagattttactaattaagattacttctttgcacttgtttttaactactttttcccttttaattcatttgattcagttagatgtatattcgaaacttaaaagatttaagaaataaaaatttaccatcattcttttttttattactttttttatctaactctcaattttacattagtttgtgcaacatgatatcttctattctatttattttttcatatataaatagatataggtgaaattgtactgtgattaatatgatgtacaataaaattaaataattttatattaaattgtgttattgaacaataaaaataaaaaaagaaatcattttacacataatagaatttataaga

SEQ ID NO: 35522 - DNA, 2539 bp, Cannabis sativa
  modified_base (767)..(778): a, c, t, g, unknown or other
  modified_base (1578)..(1588): a, c, t, g, unknown or other
  modified_base (1685)..(1696): a, c, t, g, unknown or other
aaaaaaaaaaaaaaaataggcaggaaaagtaaatgtaaatatttctatgtctaagtataaatgtaaactttagtaaaaatttaatgtatgatgtattacaatgcacttacttaaaagggatgcactgatgtattcttatttgttttggtatctgaaataattttttagttaaattttttctcatggtcatgtacgttatacttatttagataatcttgtgcaaaattttaataaatttaaaaatatttaacacgccaaaaataagttcaaacaatgtgttacacacgtgactattttattttatacgcgtgtgaaatagattgtttaaatactgctttctatattgtaaattattcttaatttctcaaaattttgtaaaatttcttaaataattataatagtgtacacaaataaaaaaaaattagactaaaatattcttttaaatgccaaaacagttaaagagtgcatcaacacatcccttttaagaatgtgcattgtagcaacagtctatggtgtaaatatttttggaaaattctataatgtacccccttaaaagggatgcaccgatatatctctatctattttagtatgtgaaataattttttaggtaaatttttttttcatggtcatgtaaattattgttatttaaggcatccagtcaaattttaagaaattcaaaaaaaattaacacgtcgaaaactttgtacaaacagtgtgttgtacgcgtgtaaaatagactgtttgaatattattttttatattgtaannnnnnnnnnnntttttaaaattttgtaggatatcttaaataagtataacttacatgaaaataaaaaaaaaattacactaaaaattattatgaatactaaaacaagtaaaaagtgcataactacatcattttgaaaaaggtgcattagagaggatcacccaatatctttttttctgtcctttactataattatgataattgatgatagcgtatctcgaaatcaattaaaattttcttattaaaaaaataatattttcaagttgtgaattgaaaaaaaaaataataatttgtgttgcaaatcatcaaaacattttcaaattacgaattgaaataaaattaaatcatgctgcaacttacagttgtaaagttctttctcaaatacctattttaaaaaataaaaatgaaaagatacagctgtgttattttgtcattttcttttgcatgtggtttgcacatttttcttgtgggctctcaatcattgtttttatcttctaaaatattctaaagctgaatcataaagcaacttcccaacaagtgtgctttttttcttcttttctttttatttcaatattttagaaaatcaatttcaattaataagaaaaattaaacaataattgttatataaatttctttattataacgtggcatctatttaggtaacacgtgtaacatatttcataatttgaataaataattttacttatagtaggtcgtacaaacaattatgatgctcaaagttacacatagtgttatattattttataatataagtatagttcaaaatacaataaatatattattatgtgaataannnnnnnnnnntgtatggtaaataaatgtgtaacctataattttataacctacgtgttgtaacttggagaggaattacaattggttgtcatttataactcttgtgttnnnnnnnnnnnnttagtgtaataaaagggttgttactcaatttggtttaagaaattcaaaattatgatgatatagttgttgcaaaatggattaatactaatttataggagagaaatgaggtggtgtgtttgaattctaagtgtgatcacctaaacactataaaaaaaagtctttggtgctcatttgggatgatcaaattttctatcaagaaagcactttgctagaaaactctaaaaggcttgataatttctaaagctatttctatgagagttcccttagtgcttagagataagggaaataagtttttggacaaaagtgtaataccttgttcaagtcatggtgatccccactattgtacactcaaggttgtgagtgagtgtatacatatattgatatatatatatatttatatcttcttctaccttttttatatataatatatagtctatatatattgtatattatgtattgtaacatttatttaatctctttgttggctcttgtattatattgcaatagagttgtaatatttttattttctttcattgtaataaaatctctaacaatcaaaagtttattccttttcaatggaagaggaaataaatcaaaattttgagaatacaaggctaagagattttgtgaaagctattcatgggtgagcatggtgtcgggaaatgtagtgctccaatagaaatatcaaactaacaagattacaactcaatgacaaataatacaaaggagaaaacatatattaaataatgttacaacactaaacaaaataaacacataaaatagagagaagagaagaattacaactcaaagaaataagccacacataaacacaatatataaata

SEQ ID NO: 35523 - DNA, 1581 bp, Cannabis sativa
  modified_base (575)..(575): a, c, t, g, unknown or other
cataagtaagtgagaagtgatactttgaccaggattcatcttcgcacttttgagttcctttgcaaatgcgttaagtaaaagaggattggggtgaggatcgtcaaacaaaattttgacaactaaaaatatcaataaataaaaaactatttacttggttcaatataaattcatacacatattaaaaaatattcaataattattgaagatatgttaatataaatacaaaataaagtatttttaaattattttccaaggtttccaactagatgatatacagtgtccttgtaacgcccgtatttaaaatttactaaactcaaaagataactttattatattataactttataactatatgggtcgggatcccgaatttcaaaagttccataaaagtattttactaatacaaagtctactagtgatatattatttttttaacaaacaacacacaactaaaatataactcaaaatattgaaagatcgaaacccttcacgttgcactgctgcgatatgtacaatcacaagcatacaatcacatatatgtaatatttatgctatcttacctcgttccgttctcnagtgtgccggtcagcttgagtggaaacacagctccacgcttttcagggccctaaaccataatattcaatattcgatgagagatgcgctaaaacatctatcggggatttaaaattgaaactaaggataaccctatcgataaatagaatgctaacacccttagcaacataaaaacgggaaaaactagggttcgggaaaaagccccaaccggtagaccggttcctaaccagaagtctggtcctgggcaccaaccggtcgaccggttgctacatgtcctcagaaccgaaattctggttctgggttgggaacccgaaaattgctcccctcaactcaaaattaacccaaacattctaataacctctagtatacctgtacacatcatactaaactcaattcaagcaattaatctcagttttaaacttggaaactcaattcactattagaggtcaaagtttgagttctcaactcaaactttgccaaaacattccacaatcatgctatccatcaaaattaaactcaattacactcaatctaaccccataacataatgaactaaccatacatctccatattcttacaaattcatgcataaattaattcaaaactaaggttgagataaagtagagaagctagggtaaaataccttgatttgtagctcctaactcttgccagaacttcaaggattagagatgaaaaccttactttccttgctgcagcttggtggttaaaagaaaaagagaggaatgaagaaaggaggagatggttctagggcatactagcttaataccaaagataaataccttgcttttatctaattaatctaatattgagattaaatacccacaaaagacaaaagacaacttagataatgactacattgcccttaacatacttccaaatgcctaatatcaactaagggtagtttggtcattttcaaatcccgacaaatccccaacatttctaatgtctgataatgataccccggtaataatattctaaaacatataa

SEQ ID NO: 35524 - DNA, 3069 bp, Cannabis sativa
cagtctcaaattgagctgagaaattcattttgtgcctctttattaaaagtttaacttggtatcagagcatctccaaccatcgccaatgtctacaggcaattctcagtctcctctcttccctgccaatcccaaccaaagtaaccccggtgttgtcactggaaatggcagtaactcaaacacgtattcccacaacttcactcagccctttaataccctaaaccaaccattctcactcaaactcgatcggaataattatacactgtggaaaacaatggtatcgaccatcattcgaggacaccgactcgacggcttcatcaatggcagtcgtccatgcccaccagaactcataccagcacctacttcgactgaggaaaaaccagaagtatgcctaaatcccgactatgagcactggattgtcagtgaccagttgctcatgggctggatttacagctcaatgactgaatctgtggccactgaagttatgggatgcccctcatctgctaccttgtggagtgcactggaaaacttatttggagctcactctcgagcaaaaatggacgataccaggacactgattcagacgacaagaaaaggagctacttcgatggtggaatatctcagacaaaagaaaatgtggtcagacagccttgctcttgctggagatccctatccagaagcacatctcatttcgaatgtaacttctggtttggatgctcaataccttgctattgttgttcaaattgaagctagatctaacatctcatggcaggaaactcaagacatgttattgagctttgacagcaaactcgagaggctacacgctgtaggaggaaacagcaagaacaacaacacaactggacttggggctggaccttcggctaatcttactgctgctaacatacctggaaaactagcaggaaattcgaatcgaggaagaggaaatcatggcaactatcctggaaatcgtggtggtgcatctaccaatcgagggggttatcaaggccgaggaagaggaagatcaagcaactcgaaaccaacctgccaagtctgtggcaggtatggtcattcagctgcgatttgctataacaggtacgatgagtcctatatgggtcatgatcctaagattcagcaaaaccagcaaggtggaagtggtcatagtgcctttatagcttcaccagaaatagtggatagtgatcattggtatgccgatagtggagcaagcaaccatgttacttcctcatccaacaatgtcaatcaaaagactgaatatggtggtaagaatcatctcactgttggagatggtagtaaagtgactatatctcatattggtagcagtaagttacaaactaattctgccaatgacttggtcttaaaacagttgcttcttgttcctaaaattgccaagaacttaattagtgtgtcgaaacttactgccgataataatgtgttcatagaatttcactctaattcttgttttgtgaaggacaaggaaacaaggagggtgctgcttcaagggacacttaagaatggactgtaccagcttcaaccaccactttcaaaacatgattactgtcacactattccccctgtcaaagttagtcaaaaccagtgtaacatgtttactggtgtctctgttttacataaagaaaatgtagctcaatctgttgttaatgagcatttagtttctgttagtgatatgtggcatagaagacttggtcatccctctagtaaggtgttgaaccaagtcttgaaatctgttaatggtaatgttgttccttcagtcaatgaaaatcttcatttctgtgatgcatgtcagtatgggaaatcccatgctcttccttttaaaaattcagcaaatcgtgcttcaagagtccttgatctgattcacacagatctttggggacctgcccccatcatgtcaaacacaaattacaaattttatattcactttgttgatgattttagtaggtacgtttggatttatccactcaaatccaaatcggatgcactcactgccttcacacgcttcaaagcacttgctgaaaatcaatttggaacaacaattaaaactatcagaactgattggggtggagagtaccaatcttttactgacataacccttgaaaatggcataaatttcactcatccatgtcctcacacctcagctcaaaatggtagagctgagaggaagcacagacatatagtcgaaatggggttaactctcttagctcaagctcacatgcctctcaagtattgggttgatgccttccaaacagctgtgtacctaattaataggttacctacacctgttttgaatcacaaatcaccacttgagatccttctcaacaaaaaaccagattattccttcttaaaggtgtttggggcagcttgtttcccttgtataagaccctaccaaactcataagttccaatttcactcactacaatgtgtgaatctcggttatagtgagtctcacaagggctacaagtgcttgagttcaacaggaagagtttacatctctagggatgttgtcttcaatgagaaagaatttcctttcaaaggtggttttctaaatacctatgccactgaacaacaaacaatcattcactacccacaatggtcacaacttcctaatttacatccctttaacattgaaaatacatcacctcctgctgaatttacccctgctggtgcagttccacacttgcaaagatccgtggaagcagcatcagccaggagtacaccagaaggtaatgaacatattaatattggtagtatgcacactgattactcggataatttacctgcaccagatactgaacaggaagcacaagaacaacaagatgttgcaccagcagtgcagcaaccaggtccttctcaccctatgataacccgtgccaaggctgggatttttaaacccaaagtctatctcggtgaagctaaatggaatccaaatactggtgtgcctagttgcattgaggaggcactcgaatcaaaagattggaatgatgatatgaacagagaaattggtgcacttaaaagaaacaacacatgggtgctggtgccaaa

SEQ ID NO: 35525 - DNA, 3475 bp, Cannabis sativa
agagaaggagaaagggcagcgaactatccaagcatccttcatagccttagcaacccagtaagctttgatatttttgggggacaagattctggaaactagacagaaagactgaggggaagcatcagagcgaaccgaaatgttatcaaattcatgaactaaagcttcttcatcagtgaagtttaggctttgttcatgggagcgagatgaaaggtccatggtgaaaggttggtcggtaaaaacagcaatgtagaagaaaaaggatagcagagaataaaagggtatggcagaaagctcataaaaaagaaaccttaaatagacaaaagaaggtaaataccttgataatgaaggcttcatctcgaacctaggagaaaccagattaggggagcctttccctagctctgcacctgaaaaagaggatcttttgctgcagaataaacccaaaaaaggaggatcgacatgcatttaatggctgataggatggtggagaaaatttaaaccaaagattatcacttgcagcaataaatggaacttgagaaaagagggttagcagccaaaattaaatgctaattaaaagatcctctttgcctctcaaatcagcagtataagaaaagaaacaatgcaaagaaatgatgatgaaaaaacatcaacaataaatgctaaggagagaaagagaaaagaaagaaagattaaaagagaaattttttggattaatcggactggaagatgaacaccagacggagagggagagacccctaggaagtttccagagcaggctggagagactattcaggttaacacatttcaatgacacattattggcaaaacaagtttggaaatttttttccatcctatatcattgcttagtactctgcttaaccattgttacttttctaatacagtttttttttggaagaaaatgttgggtctcacccttcaaggacgtggagaggcataatatggggaagccaattacttataagaatgacactactataaaattgactcttcccaacagttaataaggagatcaattataaaaacagttggaaaaagtaagaggagatttttcccaactgtttagaaccgaagtaaagaaaccgttgggaagactaatgccaacactgaaaaactgtgggcaatcccaaatagattttttttttttttttaaaaaaaaagaaaataataaatgccaactgtttataacggttgggaataataagtatttcccacaattgtaaaccattgggaatactaagtatactcagcagtttataaatgtgggaaatacttattattcccaacaattataaacggttgggaaaagttattttgagtatgttattttaaatcaaaatttattatatttttaataaataagtaaagaaataattaattaagggtaaatttaaataggataataataatcattcaaaaaataggataataataaaataattaattagaggtaaaattaaaatagggtaaataataaaataaggtgagttttatttgaaccccataaaatataagtacaccatattattaaaaaaaagaaacttaaaatactttttaaaaattactcttaatatttttaatttttttctcacattattatatattaatttcaatacttattttaattttattttcatattttcttttttaaaatcatgtataatttttttaaagaaaatttcataattttttttgtcgtaatattaaatatattatttatttttgtttgacatgtatattttttaagaatataaattggaagaaatttttttaaaaaaatataatgaaagatatatattttagtaaaataaaaattattaaaatgaagtatttttataaatttttgaggtgtaaattaaattttcttaaaataattaaacggagataaaattaaataaggtataattaataatataattacatttattgaccgaaattttcaaaaaccaattaaatgagataatgataagagcttttggatgattagtgtagatgatttttacgtggttcgggcattaatgagccgtattccacgagtctctgttattaatgagagtatatatcttttacagtgaatgttcttggtgtgtttttctctctgcttttttcgatcccccttctcatttttctcagggctatttatagagattggtgggaataattaaaaaggggtaacttgtctttgagtggtagctatgggtaagaacaagttcccaaaagatacaaaatagggcatgcattacctatatagtaggtgtcatagagattaggtgagattaaccttgatccttccttgattgattgtattcttcataatggagttgtcactagcccctttaattatcgtgtaattgcctaaataaggcttacgatgtctgacacgtcctcttatgggcattcccagatgcttctcccttgctgtattaaatgtaaggtgactgttcgaataggcccttctcgtctcggagatgccttactatatgtcaactctcggagaagagggcgtgccttttgcactggtccgggagactactccccgagccacacttattctcttttgtacaattcttaactaatatctagttgaggtgtcctcttggtccacgtgtcatacatagccgtggccgcatattttgggaaaaaaccagggcaacatttacccccaagtcttatttagtagtaggtaaatgagacttgtgagccatctccagtcttaataaataaagtggcacgtgtcctaagcgcgtgggcagcatttatgattgtcatcatagatttttatttccttttgcaggtaacgattcgcttcccgtccattgatcgactcttccattaatgttggtgtcagagaggtactcaaatgcttccaccgctctttcttctcttcatacccattaatccatctcgttagatcacagaattcaaatcactacgaatcttcacagtacgatggtgcctgatcaatgttgtgttgcgccccttatggcctataaaagccaacattttctctactatgtcaatttcaccaccttgcaatttttagtccatccaacccattcgacaaaattccaaacacctcagattatctcctattctttcgttgctgctgtcaaatgaaatattaccaccgaagatcgtcaacctcttccttacagcctttatgtaagtttttgttcagacgctctctatttgttttccttttgctttttagggcaaaataaaaatgatgatattttcatttgattgtgcttagtttctgtggcatggtggctacgatgatggtcgctgtgatgcccccctccgaaaatggggcattcgatgaccactgctatttgttgttttttttatgcttttttactactttctctgtaagtgcactgccatctttcttgagagtagaaagtggtggttttttgtttgcttgcttctgggtgtttgaagcgacttccatacccttttt

SEQ ID NO: 35526 - DNA, 1250 bp, Cannabis sativa
taatgccccaaccacataaaaattttctcttctaactttcattaaattcttcacacagctttaattattagttgccgaaaatctcgggatacatatattaatataaaactatttaaaattaatacataaataaataaataaataaaaagtattgttattgggcactagtggtacccaacactttttataggtgacaccccacggtttattagcgatatcctctaaaagctattttcttaaattatgtggaacccgatacttaattatattagtagcaatatgacactgagggtactagacaccagtggtgccttttaacaatcctcataaacaaaatactatcgtttaagagtgatgactttgtttaaaaaaaaaaaatgaggaatttatgtttccaagaaaacagaagtttgagaatcaatttattaaaatataaaatttgaggctaacctaccaaatttatataaggaatttttttaataatatacataatcaataatttatttacaaaaatgacattatacaaataattagtaaattataacgttccatgtcaccaagaataccgtatatatgtattcagttatatactattaataaaagtatacacttgactcattgcacttaacattgacctttttttttaaaaaaaaaaaaacaatatttatttctctctttttgttttaaaatggaattttaattacactactaattattttgtctcaaaaaaatactgttgcaatctattttttaaaatgatcattttaatatatgagaaacatatattttttgtcaataaaaaaaataaaacaaaagcatcattttagtttctttaatatttagtaaatcaaagagtaattttttttttacttaatattcaaagtgcaactaaatgacttacacaaaatttattataccaactaatttttaaaagttattagaaactgttctattatttaaaatttaaagttacaatttaatatttaaataaatttattttatagtgtaactttgataattactcaaagggccagtttggcacagctgtgctgtgagaaaagcagctgtagctgtactgtgggaaaaaacagctgtagcagaactgtagaaaaaagttgagctgagtgtttggtaaattataatttttcaagtgctgagagttgttaaaattatattataataatgataatgttttaatctagttcattataatcacaaatatatataaaaaatatgttatataaaatttt

SEQ ID NO: 35527 - DNA, 1078 bp, Cannabis sativa
tctcgaactttgaacctcgggcccaccacgcctgagtctcgatcttggtcctgggtccgagtctaaggtccgggtcaggggttcaggaccggttctgagtccaactctcggatcctgatctggatctcggtataagtttgagatcagatctaggtcgaggtccaagtctagggcagggttggagtcgagtttattgtaaagatattataattttacataacttattaattcaagttaataccatacatagtattatataaaataatactaatataatacaacattgtgtaccaaacaagctttaattattaaaagatttattttaatatatttcttttgtgtattcaagagagcattttttttcttttcttttgagaaaccaaaaaatgtatttcatctaatcaaccatgtacattctaacaccttaaaaggcctgatatctctatatacaagcttcactttgtaaaaatatatatattgaagtagcttctcaaaccataaaacatcttcttcacctatatgtttatagtaccaaatcattattaaaattctattttttacactttcaactgtctttttttacaagtatatccaatctagataacttgagaccacattaattaacttcattttttcctctctacaagtgataaaccagagaattagcaataacaaagtggaaagtgtccaagaaaaagcaatagtgaaaacaaaatcaagtaattctttttactttttctttcaaaaaaaattcaaattaattaagttgcctaaattaattttaaaaaacacacttttagtgaaaacatatagaattaattaagagaaataaataattgatgactacattaattatagtggggtatacactctagagagatagagataagaacaaattaagaagattaataattataaatactttatattgatgtgaagataagaacaagatttatttaattaagttatatatcgaatataattaaaaataatgtatagatagagagagtgaatgtaaagttatatagcctaactcacatattttcttcgtgtggtatttattaattaatgattgatt

SEQ ID NO: 35528 - DNA, 3037 bp, Cannabis sativa
  modified_base (1708)..(1721): a, c, t, g, unknown or other
cattaatatcagactctaggggcagttagtttagttcaattaagcacttatctctgaagtttcagacaccagtaggtgtgggggtagtgcaaggtgatcaaatgctagttcgcgaatgctatcgcatagtgctgcaacatagagaagccggtcaccaactaatggcagtcttgactgatgaaggtgagaaggatgaagatcctgatcctcagattcaagatgaaagaaaattattaaaacccattgaagagttggaagaagtcgttctagaatcaagaaatcccacaaagtgtgtttacattgggaagaacctggatgaacaactgaaatagcagctaataagctttttgaaggcgaaccatgatcaattcgcctggagccatggagatatgatagagattgaccctaagattatatgccatcattttaatgtcgatccgaattacccagctaagagatagaaagggcaaccctttaattccgagagacaaggagcactctaacatgaagtggagaagttgctggtcaacgactttatacgcgaggcattttatccctcgtggatatccaatctagttctcgtcccaaaacccagctaagagatagaaggggaaaccctttgattccgagagacaaggggcactctaacatgaagtggagaagttgctggtcaacgactttataagcgaggcattttatccctcgtggatatccaaccctttgattccgagagacaaggggcactctaacatgaagtggagaagttgctggtcaacgactttatacgtgaggcattttatccctcgtggatatccaacctagttctcgtcccaaaacccaatggaacttggagaacttgtactgatttttctgatttgaataaggcgtgtccaaaggattgctttccactgccaaggattgagcagttggtggatgcaactattggggatgagcttcgttcatggatgcatcctctagatataacaagataaaaatgcatgtcctagatcaagaacatacaagcttcgtaaccaacatgagactttattgctataaagtcatgccatttgggttgaaaattgctggggcaacatatcaacgacttgtgaatgaaatgatgtttgcaaaataaatcaggcagagcatggaggtttacgtcaacgatatgttggtgaagttggtaaagagtggaagtcatacaacaaacctcgcggagtgctttgaaatattaaggaagtacaacatgaagcttaacatgaaaaagtgttcctttggagtttcctcgggaaagtttttgggattcatagtcaacgtgaggggcactaaagcaaaccctaataaaaccaaggctttgataaatatgccatcacctaccaaacctaaggaagtctaggccctgacaggaagaatggcagcacttaacagattcatttcgaagtcaactgataagagtaccatttttcaatatattgcgaggcaacaagaaattcgaatggacagaggaatgcaaggaggcctttaatagcattaaaaggcatttgtcaacacctccaattttggcaaaaccagtaactggagagacattactcctctatttggttgtctcagagagtgtaatcagcacaacaatagtgcgagaagagagaaagcaccagcaacctgtttactatgtcagtaaaaggtaactgggggcagaatcgaggtatcnnnnnnnnnnnnnncttgccttatgcctaatccacgcatctcgtaaactacggccatacttccaggcacatccaattaaagtgttaattgatcaacccttgacacaagttttatcaaaactagatgcttttggaagattgataaaatggtcaattgaactggggtagtttgacataacttttcacccacgaacatccatcaatggccaagctttggcatattttttgataaaaggaataaatccagaggaaaatctgcttgttaagcgagacgtggatacttggagattattcgtggatggtgcatccgacgagcaaagctcgggtgcagggggtgatattaatttttccagaaggctttaagtttcattatgctttgagattccaatttgacgcgttaaataaaaaggctaaaaatgaagccttgatttttggtttgaggtagctgaagcgttgaaggttaaaaatctcatatgtcatagtgattcacaactgattgtaaattaggttcttggggaatacaaggctaagcgcctaaaaatggccaagtatctagagaaatttcggaagaacttggaaaagttcaattatttcaaaatccagcaaatataaaaagaacaaaactctaatgccgatgccttagcaaaattagcctcgtagaatgacttggatgaactaaacttggttctagtggaaatgttaaatgagccaagtatatgcaaaaaggaagatgtcgagatgatagatagctcgcccacatggatgactcccatatttaactatctactcaatgaacaacttccaattaacaagaacaaggcacgaaaactcttgtattaagtgctacgctacacgatagtagatgtcaagttgtatagaagaggctattccacacctctcctttggtgtgttcttcccacagaaccaaatgagatcatcagagagattcatgaaggcttttgcgggcatcatgcgggttggcaaagtctttcaaaagagatcattagacaaggatattactggccaaccatcaacatggacacccatgaatttgtcaaaaagtgtgataagtgttagagattctcgcatatactttgcgtaccaccaacggaactgagaataatgaccttgccttacctattttctatatgggggattaacctaattggagcacttcccacagggcaaagaggagccaagtacgcagtgctagctgtcgatttaatcactaaatggactgaggttgaacctctagtttccataacctgtaagaaagtcctcgacttcattgtcaaaaacattgtttgcaggtttggaattctaatgaagat

SEQ ID NO: 35529 - DNA, 1108 bp, Cannabis sativa
  modified_base (102)..(105): a, c, t, g, unknown or other
aaaagtttttcttagatgtcgaagcagatagaaagtgcatcggtgcacctcttttaagggatacattgtagatcaccctaatatatatatttatatatatannnngaacacttcttaatgggtattatccattaatagttactaaggaaatttgactataaatattaattttaagtatactaatccgttagattttgatctaataacaaataataaaatagaaatttaagttttatgctcaatttagatatttagttaaaaaaaaagtatctcattttgtactatatcaaaaatatgtttccaaaaaattatatatgtcaaactcaactttttcttatcttatttttttcccaaatattattttttattattattatttctttcagcgaatggaataactctagcccatataatgtaaaattgagatatattttttaattagataaaaaaatttaaattttcataataatattcattcataggtaatacccattaagagtgcccacatataaatgtatatggattatttattaatgagtattacctattaatgagaaatttcaaaaattaacgataattaaatattaatttttaaaaattagattttaatccaataatagataataaaagaaaaattagagtttttgtgcttaatttactatttagttaaaaaatctttttatttttatactatatcaaaaatatgtttatatttaatattacttttattgaaaaaattaaattatatatccacttttcatagtctattttatttttttacctttcttttactattctttaatttatacgtatttttataggttatattctcattatgtgcattaggagctttaattttaataagttatgtgaagctatatatagtactttgattataaaaaagagtatttatcaattaaaattattttacaattatatttggttaattaatgtctaataaaaaaataattctcaacttattccacttttattactctctctaactcaaactcaatcctttttacatttctcttttagcttgataaaataatctcaaatcatataatacaaaattaataaaatttctttaattaaataacaaaattaa

SEQ ID NO: 35530 - DNA, 2083 bp, Cannabis sativa
  modified_base (124)..(150): a, c, t, g, unknown or other
tccaatgtatacttcatacatccgatattggtaaactttgtcaatgccgtggaacggacataacacttatccaaggtataagtatacctatcacaaattttcgatctttattaattagtaaatnnnnnnnnnnnnnnnnnnnnnnnnnnnagggcacaaaacccaacaggtgcatggtcgagtgacttgcaagcttggtgcatggccgagtgactttcctcatgcatggccgagtgatattcctcaagccatggctgagtggccttccccatgcaatggtcaagtgacattcctcaagctatggccgagtgaccttcctcatgctatggtcaagtggccttcctcatgccaaggtcaagtgactcatgccatggccgagtgacattcctcaggccatggtcgagtggccttcctcatgccatggttgagcgaccttcctcaagctatgtccgactgaccttcctcatgctattactgagtggccttcctcatgaaaaggccgagtgagtttccatggagcatgttgagtgactttccctcgggcatgccgagtgactccccctcgggcattgccgagactcatatgtgattatgcaagatcacacattcggggtaactctttgaccgtgtcttcgctaatctcctgattagttatcggctaatctcaagggttagccttgcttattttggggattaacatcctctattcaatattttatgtgtatattttgtttagtattgtaacattatttaatattttattattgttgttttattattttactttgagttgtaattttgtaatttatatttttattgaagcacaactttttcagcaaactatgttttctacttttgaaattgataaaaaatatataaataaattttttcctttttttataaattaattagtataatagtatattagatatgataaatagtgtaacttaatggtaattttaaaattaatgtgatatattgtactataaaagtggcacaatatttgttgaagttgaagctctcaatcgtgcgttactttggtgtcaggcagttcggtttccccttagatctattgtctctgactgcttgactttggttcgtcgtcttcagaagcgctcctttgatcgattggctctatcgggttttattgccgctattgcttcctctttgttttcttttccaggtgcctccattagttttatcccaagaacagagaacacaatagcccacaatcttgcaagagaagctcttggaacggacgaagagatgatttggaacaacctcagttcctctttgtgaagatcattgtaactgttttcttgtcaatctttggttactgatctttgtatttcaaaaaaaaaaagtggtgttccttggaaataaaagttcattttttattttttaactataatatgccttaaacacttattaattaattaatacaactaataatttaaaactacaataatctatttaaagatcattttatttattttaaaatggatactagatacatgtaacattgatacaagaaactgtgtttacatatatatattaaaataataataaaattgattataaagttattagattttatttttttaataaaacattaattagatattcacattaaaattttgtaattgtacattggagcaccaagctaaaatttggtgtacagttaccacaaaactactttttgtgccaaatataacacaatttttacatctcctattggagattgtctaagtgctacatcaatatatactttttaaaaaataaattaaatataaaaaaatgacacatttgttatagtttctatagttcaatagagatcgtacaaaaaagttaaaggatacaactttacaaattccataattcaaggatattttttagtatttcaaatttaatgaacacattctatttttattatggaatttgtatttcacgttcgtagtcattgttaacatgccattggcacatacactcgtttaagcttaattataataaaagtttatgaaataatataatttaaagggcaaaattataaagaaagagttgataggggcatatttgttaatta

SEQ ID NO: 35531 - DNA, 2725 bp, Cannabis sativa
  modified_base (341)..(347): a, c, t, g, unknown or other
aagttttaaaattttaaaaatttaaaaatttaaaaatttaagtttaaggaaaataggaaaataaaaaataaatataaaatttaagaatattaaaattaaatatacacctaatattaaaaatatataagaatataaaatatctttttataaataaaatgtggctattgttggtttaacaaaatattttaagaatatttccttaaatttaacggtgttagtaggtttagttttattataaaaattaatattattttttagatcatttaaaatacatataaatattaatattatttattttaagttaattgaacttataccaattttaaattaatttaaatatnnnnnnntattaatatattatttgtaacattatttttttttattgttgtttttaatattagatagtatgtttaattttaatatttttaaactttatatttattttcttcaaatttttaaaactttaaatattgaaaaaaaaaaattaaaacattaatttgtttcctttaatttataaaatttttaaaaatacacataaaaaattaaaattataactaaatatatatgtaatgcacgtaacaataacctaatatttctaatacacctatatacagatagatagtacgtagtactatattctatgtatagctgaaatattattaattaaagttaaaaatatttattgttatattagtgcaggcatattttttttttgagatatatatatttcttaaatatatattttttttgttaagaaatctcttttatattaaatgtaactatttaatgagaattattggttgaggtttctttttattttcttgttaaagttaattaatagttaaaactaacaccgttaaatcaatcaacatatgctattattaaaatatctgtagctaaaagtattagtcacaaaaagttaaaattttttgtcactaaatgtgtttttattagccaccacacttgctgtgaataaaatttaattagtgacaatttatctctaaatactattttttagtaaccaacagttgttgttgtgactaaaaataatatttagtcacaaaaaaatctatattgtaactaaaaaattatcactaaaagccgtagcatttttggtagtaacatggattaaatataaatatattctttttttgttttgaaaaaagtgttcatatattagataaaagatagttagacctcgcggtcattacaaaaaaggtgtttaggaatcgaggtaataggtatatctccatatctctggtgggaaaacgctcacttagccacattatgggcaacaaaattacaatttctactaatattagaaaaaatacaactaataaaagagggagaggacttaatactaaaagagacatagttctcaagctccacctggactcagtcctgttaaaagcattgataactaccctcgaatcactctcaactataataaacttcaagccaagattcttcgctacatccagcgcagagcagcaagccgccacttctacacatagagcatcaacaaacactactctggaagtataaacccatatcacgttgtcaagatgatcccttgcagcaacaacagtacacatagtgtctaaccctactttaacatcataattcagctttatccaatcttgcgggagaggatgccaatcaaccatcaagcacggaggagaacaagggaacaaaaaagcatggtgaactgtaaaagaagaacgaatactatcaatacaattagttacatcaaaaagacagttattatgtaccttatcgttcctgatccgccagatggtgtcaacagttaacgatgcataaaggaagacctcattagaattgatgcctatatttttaaggtcctagatgaatttgacttagtcccacatctggatgcagtatcacacacaggaaaaatgccccagggaaaggacctccacaagtggaaagccacattacaagataagaacaaatgttcaatattttcattctgtgtcccacacaaagggcacaacacctcctcaataggaaattttctgcagatcacagaacgcactggaagagccctggccagtatccacaaccaaagagtcttcagtctttcagaaattttactaatccagtggggcaacctcacaaagaggtgctctatcaagaacttgggcaagatacgccgatttgctcgagaaccgcccattaccttccaacgtccaaattcatttattgtttcctagaatagacgaattacccccttttaagatatcagatgcagtttccttgtcgaaaagactgtttaacaatgggatattccatccttcattatctaacataaggtctgcaactttgtttaccccaaacgtggaggagctgttagtacgagggaagaaatcttttctatgagtgaaccaagggtcatcccgaatattaatatccttcccgtccaccaccaacttacatgctcctttttttttacgatagagttggatttaaccacatttttctgaaaccacaaatcaaaattcttggatgtacaattaagaaaaggctttccttttagctatttcgcttccaggatccgacagcaaaggattggttaccatttaaaaggttctaccacccatttagtcaagaaggcgaggttcatttctctagttttatagaaaccaagcccccctaatgacttaggaaggcaaagcttatcccaagcttttagatacaaaccatg

SEQ ID NO: 35532 - DNA, 1575 bp, Cannabis sativa
aaaaaaaaaaagagaaaagaaaatgacaataaaaaaaccttcataaaagttgaaataaataaaaaaatcagtaaaaataaaaagtaaaaatatatatggataatataaatataaaaaatctcttactataatataaatgtaaaatttgaaagaaacatattggcttcataacttaaaaaatatttttgagtttttaaatatagaaataacctttaaaaactaataggggtcgtttggcctaattttttaaagccaattttttgataattgagttttaaaaaactagaaaacagaaaacatcaaagtgtcattttctatttataaaaatattttttttttttgtcagacatattcttttatacatttttgctcacataccgggcccctggactcggacccggacctgaacccggaccccaaaccacgaacaacggacccgcaccccagaccccagaccccggacaacagacctagagtgagacctggacgcaaacccctaaccccagacctgaaccaagacctggagctgaaccccgaaccttggacaacacacccggaccctggccaacgagcctagaatcggaccccagacccgaaccccggagcttagacaaatgaaccggatctcgaattcagacgcgaacccggatgcagactcagacttgaatccgaacccggacccaaaatctaaattcagacccagccccagacccggaccaggacctcgaacctagccccgggtcttgggtctaggttctggtccaagtcatggtccgagtttgggttgaggatcagggtccgagtctaagtttgagttcgggccggggtccagggtctaggtttggatccaggtctgggtgtaggtccaggattcagtttgaggtatgatgggttcatgtcatgatattgttgtaggatattgaatgttttctttttagataaaaaaatctaaaattagttttgaaaaacctcacccaaacaccattaaattttttaaaatgaaaaaagaaacttatttctattcttattttaaaaacataattctcaacactaaactgaaaaacacatcaaaacaatattatataaaatccactaacttgttctctagccacatcgtttcatttattcaattgtttttcagagcagcccgcgagtgccaatgtaaatacatttgtataaggactcgttttgtaatttggatagataaaagagggacaatcatgtaaatatgtattatttatgagagtggattgtgtcctatataaacagactattgtatgtatatacgagttaaaactatatatatctgccttgctacatatatacgtactcatacattctcacatcagaaaatctccggcaatttggtttaatttatattacaaatgtcttccggagacgaccagaaaactgagaaaaccttctcaaaattttactgtcaccattgtaaaagaaccatctatttcgattcctctcattctcaacctcgttgctttcactgcaataaccatggctcttccgacgatcaaatcggaaacaccattgttcaagaatcttcttctccaataaacacca

SEQ ID NO: 35533 - DNA, 1240 bp, Cannabis sativa
  modified_base (311)..(311): a, c, t, g, unknown or other
  modified_base (418)..(428): a, c, t, g, unknown or other
caaattgggttccattatcggataatatcttcatgggaattccaaacctacagataattttcttgacgacaaaatcaatggctttcttacaggttatagagacgaggggctcgacttccgtccatttagtgaaaaagtcaactgctaccatcgcatacttagctcctcctcgcccaatggatgatgccccaattaggtcgatcccccatatagcaaatgggtagggcaaggtcatcattctaagttctgttggcagtacgcgaggtatatgttaatacctctaacacttatcacatttcttgacaaagtcntgtgtgtccttattaatcgttggccaacaatatccttgcctaatgatctttttagactgactttgccaacccgcatgatccccatagaagccttcatgaatttctcnnnnnnnnnnntttgcttctgcgggaggaacacaccaaatgaggggcattgaatacccttttctatatagtttgccttcgatcatcgtgtagcgagtcactgtatacaatagtttttgcgcctcgttttttccatttggaagttgcccatcgagtaaatagttgatacgaggtgtcatccatgttggagagctatccatcatctcgacgtcttcagtttcacatatacttggctcgctcagtatttctaccgaaaccagatttaattcatctaggtcattctgcgaggccaactttgctaaggcatcggcgttggagttttgttttcttggaagttgttcgattttaaagtaatcgaatctttctaagttcttttgaactttttctaaatactttgccatttttaagcctttggcctggtattcccggaggacctggttcacgattagctgcgaatcactatgacaaatgagatttttgactcttaaggcctctgcaatctttaagccggcaattaaggcttcatattcagcctcgttatttgatgcgtcaaattggaacctaagagcattgtgaaacttaaggccttccggcgatattaatatcacccctacacccgaaccctgttcgttggatgcatccacatataacttccaggtttccgcatctcgctgatcaggtgggatttcttctagagttataccttttattaagaagtcagctaaagcatggcccttgatggatgttcgagaatggtatgttatgtcaaactcccctagttcaatcgaccattttattaatcttctagaagcatctggttttga

SEQ ID NO: 35534 - DNA, 1972 bp, Cannabis sativa
gttaaggtttgaagtggggacgttacactaagtcacgtcaatcaagtcaatattgagtttgttatggccgtttactaatggctgttttgggcccagcacccaggttgacatgtgacgtcaacctagacgttgggtgagttggaaaacatgacaaggatgtatttttcgatgctaagtgatattttgacatcactaagccaatttttgcattcaggagaagctagtcacgagttcttagagatattgctgttttgcagaaatgggagacttgaaactcccaatttctgagtaagtcactttgccaaaaaaagtaaaaatatgaagttgtgaatttgactcttctgacttcatgactccaagttattatgaaaaactagacaaacagttgagacggaattagaatcagataagtagaacccggtgcaccagaccatatgtcaacctgggtgctaggtgctctttttgaagctttcgggatgtcatttttacactttcaatgttattgaacttgaggataaggtctcctaccttatttttgaccattttgtatagaatgcttggagcaaaatttgcattttagtgattgaaaccagcacaccaagttaattatcaacctggacactaggctcaattttgatgcccttggaactatcgttttctcctcgagtttacttgtatatttgttatttctaatgatggaaaaaattactagaacacattttcgaaaaactacttggaaacagcccaggttgataatacgtcaacctgggcgctaggtctagtttaaggcctcttgaaagttttgtttgctcccaaggaatagttgaatcttaatctttgatgaaaacaaagaatatgccaggaagacttttctataaaattcctcagaattggcctaggttggcaaattgtcaacttgagcgttgggtgcccatgcatccggtgctcaaaaaatgaaggttctttgaatctgattatgatgcctcaaatatgtctgtaatatgtctagttcatgtcccaatgcaaagtttgacctatttgcattaagacaattatagaaactaaaacactagttggggtgtcaacttgggcgctgggtgaaaccctaggcggccggggtgatttctgaagtgttgttttgtgtgtttttagctcccgaggcctgaaagataatactgaaagatagtgagttggaaacaactcatgtcttcatggtacataatactgaaagatagtgagttggaaacaacttggcaggacccaaacacccattctggagttctcagagtcaacctggatgcagggctagagacccctccctggtcgactgctatgactcgggactactgaactccgagatgttatctttcgtgccacatgtcaaacatttatgtccacgtcactatggaacgtttttcggttaacacacatgttatgttttaatttttccatataattttaattatttttattattataaaaattaattaaaattttaaaaaataaattaaaataataaaaataaataaataaattcttcctcttgcccatatcattctcttctcaaccaaccaatcgtcaatgactaaccaaactcttctcttctccctatctctcagcctccttgttccgggaacaactaaatcccgagaaccccaagaccctaggcgacgagaccccaaaccgcgagacccctgagacctctcaccctctccttctcacttctctctctctgtgaagaaccgacattgacccctagacccctggtttgactagtttagcgacaatgaaccctttagatttgttctctctctcctctttatttttgattggtttttcttcgggatctaaatattgtggtgagatttggatcttttattttgcaaggagatttcaaaaatgggagagggttaattaagagtaggcaacattgatgtttctaaaatgttcccaaagattccattttatgaat

SEQ ID NO: 35535 - DNA, 1401 bp, Cannabis sativa
tgatttcatgttcttcaaaatcacactcatccccattcttcattgtattaaaaatcaaactaacctctaattcaaatccagataaagctcatggcattcatcaatttaaatctaaataaatccatacctggacggtggagtgtggtggtggctgatgcggcacggtgggagaacatggctggtgcatggtggcctgggtgcacgactgatggcctgggcgcacggctggtggtggcttgagcgcacggctgctaaggcgaggttgactgagacggttttcttttttttttttttggagaaatttttgtggctgctgctttgtgtgttagggttgaatagagagaaaagaaaatgaaataattaattagggttagggtttttttatttgggctgggctggtgtatatatatatgtaattttttttttttttttttgcttgggctgggctgaacggttcggtttgggttcattgggttagaaaaacccccggccgaaatcaaccctatagcagcaggttagagttttatcaacccatatgtattttagcccataaaaaatgaccatgtttcggcccatttcgggttgggttggccgggttggtcgactcattttcaacccatgctcagccctactagagcccacaaaatcaagggttcatttcctgtgttagacctgggaaaatgcacacagcactaaaagggacatgttggttttatgatacatcgtattgttaattatcattgtaccatattttaatggatctctaaatgtgtgtacattaaatcaaaacataaaatactagtttagaatatatacttcttgaaggctattagggtatcctcgaaacttctcgtattttgtatcccttaatccaaataatagaatttgaactcacacaagtgtcttccaaatcgatcatcacacacaaggaataatgttggctataggataaagtgtatagatttgttcttgttgagttctcaacacatgagcaagagccattgagagaaaaaatgttaactttctttactctttatactttgaaaatatatatgtcaaagtaagtgttgtgatttctcaaatcagacttctatttatagtagttaataaccctttaattaaatcatatttggttatttaaataaataaatatcttataactgaattcggttagtgatatttatgagagaatctctcaactacttgagagaatatctcaacaattttgaaatatctataaccacttttcaaattcgaatatttatctaatttaattaattaatctaaaaatatgctatatgttaggcacctacccttgtctatttaggacaatgttggtgtcttttgtcctaacaacttttgtctcaataaatcttgtcctgacaaattttgtcttaacaa

SEQ ID NO: 35536 - DNA, 1495 bp, Cannabis sativa
ttggtagcaaatatggtccgatggatccgatgggtggtccaatgggtccgatatggggtccgattgtgtctgatgtggggttcgatggggtccgattgtgtaaataggggagatgtaaatgggagtattttaaagatattatagaaattgttatatcctacaaatattagttattatttatttaggaaaaaatttttaaccaaatataatcataaaaaatcaaattttcctaataataatcaattcgtatgtacaaatttaaaaataataatcgtgcgtcagttgctgttttttttttttagcatacgtcagttgctgtttgaactacagtaaaacaccatgtgggttacaactccctaataggccaattcacatgtgattgttgatgttatatatgaattaacattttggttaaaaaaaatttgaaaaaatccttacagattagatatacattttgatttttgtttaaggggttactttattttttatttgtactttaataaataatccatatatttatttaagaagagaagcgtgaaagtcaccatgtggctctggtagtccataatgcatgcaggaatcaaaatggagaaggtgtaagatttaaaaatttgaagttggatctctcttctctcatctcaacatcatatactaattaaataatcattctatttttctaattacccacttttgtctgcatgcccctgtcatttttccagtcccaatttaatcccaactggcaactaataaatgttttcaatgaaagggccattgactcatttgtcattttatttccttattttattcactctccaattatcgagggcatatttattaacgaccaaaaacgtgttacatttcgagataataataaacaatcttaaaggaacaccccaagttcatggctactcaggtgggccccacttttaggagtatcattcacaaatcacaatattaatatgagaaatactaaatggtatggggcctagtacctttctatgtgtcaatatcgatattggtctaactaaatattacgcacatcattattatatcatattttacgagtaatgatgcattgattcaaaatataaagtgaaattcactcataacgaattttgtaaccatgtttgaaaaatataatatgtttttgtttgtccaatttttatttatatgtatatttttaatttttttttattgtactgagtttattataacgatttatgctatcgtttggttatacttttattttataatattttaatcacaaaataaaagtacatatttgtttttaaaaaataaaaataggttttgtaattatttttgtttttcaattgtaaaaacaaaaatcaaagatgtattctgtaaagtttatttatatttttattttttgactttatttaaattgggtctatgtctagagtgagattcaagtttgggttagaggctaagttcagcgctagggccgtaagggaatttgcgtagggatctggtcgga

SEQ ID NO: 35537 - DNA, 1636 bp, Cannabis sativa
ttgattttctaagtatagaaaatcaaatttccctttctatttaagtatgggaaaggcatgcagtatatatgaatggatgaaaaaaaaaggattcacttataatatataaagagggctatagtctattaacagttctaagtcttcttttatagcctattaaagaacccatgtctcctgcatgttttggttacgactcagaaggcaaaaaatgtgatctctaaatttaagtgagattataaataagatttcttcctaaataaattttatgtctccaaaaaataaaagattaagaagatacaattatatgaactacgtttgatttgatcttattttgggtacgtagacaacttaattgctaaaattaagtacaataacaaatcttcaaaatctcaaatgaggtcattcactcattaatgattcatctcaaaaatcctaaatgaggttatttatctcaaaatatccaattgagttaattctccacaaagttatcgaagatacaaaatcttttaacactcttgaactacgtttgacttgattcctataaaaagatacgtaagcaacttagttgctaagactaagtgcaaaatggtacaaaacacaaatcttaaaattccataaaaattcgtatatttaggaatttttttctaaattttcaaatagtaaagaattcttgaaagtggccatctaccggaattcttatattcaaattcaaaaataccgtattccgaactacaagtggcttgatctttcataaaaaaagtatgcaggcagctcagttaattaaattgattgagtttagttgcaattccaaattcctctaattttctcaaaattcacctcaatatttcatcgtaattagaatcaaagggtgtttcctttaaacgaaatgagattattcttataatcttagattggtcgaactaaaattaataaactcttacactataaatttggcatatataaaattgtattttacatttatttttaacactctagatatgaaatttttgcttagcactcatcctcgtattcttcatcttgttaagtaatcactcacaaatatttattcgtgacttctgttaaaataaattatatcacaaagggatatatgagattacaaacacagcaataagatcaagattatacatgagagtgacataagcatcaattctcctttgcatttgatatcgtctatcaaccttttggctgcgccacaagattattagttggatgtttatggaagtaagagaatacttggtaattagaaaagtgtttggaactaaccaaattgttacaatacaatttcaaaatggaattgtaatgtactagacgacatgttgttaacatgtcgttgaataacatttgctaggcaacgtgtcatcattgccatttatacacgtgtaactactgtattatacaacgcacttttcatgttcaaattaaatgtgaagcttatttacacacctacaaggcaagttataaaattatgtaacttataattacaaattctcttatttaatttatttaatcaaataaacattccattatgagactacctctaccaaattgtaattcaatacatatacatcaagtgatacacaattataatttagtcaaccatgtaataagatgtgaa

SEQ ID NO: 35538 - DNA, 1647 bp, Cannabis sativa
catttatttaagtttaatactctacaaaaatatcgtccttacaagtttaatacaattaaaagtttaaaataattaaaacaacaacattgttaaataataaaacggaactagaaaatatgaaaataaatacacaaaatagtcaagcattccaaattttataacaaaaaacaaatagctactaaaaatatatatatatatatatattttggttttttcaatatttttattaaatataaataagttttttaatatatataaatgttattggatagaatcaggttttaattagattttgagattgacatcccaataattaatctaatccaattagaattcaacttttagaatataattcaattcaattatagttggatatccaattttttgtaattgaatcgaattgaattggttcggttcaatttaattaaattagattgaatgttgtctacccctatcgtctctatcacaaaattactagtgtctgtcaaagtaaaaaattatcaaggttgaatctttccatggttagataattctaatgctggaaatatatttaaattcatttttttaggctaaataagttttctccctaattaaaagtaatttgtattattatgaggtgacactttataatttgttaatgattttttataatttttattaaagtaaaatataagaaccaatattaaattgcactaataaaaatattacagttattaaaataactttagcatttctcttcatattaatataagctttcaaaatctaacttagtgatcttagcttaacaaaaagaaattacaaaagaagaagtagatttaagtacaagctgatcaaatatgtttaattattaacttttaactcacttgagattaagatttatgtcaaaagaaagtgataagaaactattgtagctgtaatggtatgaaataagaggtccaaatttcaccaaatgaaagtctctctagataagaatagaatccacaaatcccaattctattggtccatattccactttgcctccacatctatattgccaattttcccattccaaccaatcaaatcaaaacctcatctctctctctctctcccaagcttctttctactcagattaatcttcgaatcctaaaacagagagccactcatactcatactccaacaatggcagcaaccatggcaacaatggcaatcctcaacaccaagtgcttaaccactaacaaaatgataatgatgatgaacaacaacaacaacaaccccaccaagcaaatttcatcaaaacccaattcccttttctcaatccaaaacctccccaaaggattaaacgacaagtcgtttaatactaccatagcaggaacagccatagcaggagccatattcaccacactaagcgcctgcgaaccagccatggcagttcagcaaatagctgacatagcagcggaagccaccagcaacgacaaccgcggcttggctctgctccttccaatcatcccagccatagcttgggtcctcttcaacattctgcagccagctctgaaccagctgaaccgcatgaggagctcaaagggtgtagccatcgggctcggacttgggctgggagccgcggcttcagggctgatgggtgcgcaagaagcatcggctggggggctggcg

SEQ ID NO: 35539 - DNA, 2473 bp, Cannabis sativa
  modified_base (1364)..(1370): a, c, t, g, unknown or other
gctaattttattagtaatcccatttaggggattagggtttgtaagtatctttggtagcatgcctaattatttagggcgttacagtttacatggacgatatgttggttaaatcaacaaagagtaagaatcatacctcagacctcgcggaatgctttaaaatattgaaaaagtataacatgaagctaaacccgagaaaatgttcctttggagtctccttagaaatttttttgggattcatagttaacgcgatgggcattgaggcaaatcctaagaagatcaaggcattaatagatatgccatccctgacaaaacctaaggaagtacaggccctgacaggaagaatggcggcacttaacagattcatttcaaagtaaactgataagtgtgtaccgttcttcaacatactgcgaggcaacataaagtttgagtggacaaaagaatgcgactagtgcagctgtagagacgccccgagttttggcaaaaacaatccctagagagacgttatttctttatctagatatctcggaagatgcgactagtgcagctatagtgcgagaagagggtaagcaccagctgcctatttactacgtaagtaaaaggttactaggagcagaatctaggtatccccctttagaaaaactcgcgttatgcctagtccacgcgtctcgcaaactacgaacataatttcaggctcaccccataaaagtgctaaccgatcatcccttgagacaagttttatcaaaacaagatgcttctggaagattgataaagtggtcaattgaactggggccgttcgacataacataccatcctcaaacatccatcaagggtcaagatttagctgacttattgatagaaggtataacccaagaagaaatcccatctgataagcgagatgtgaaaacctcgaagttatatgtggatggtccatccaacgagcacggttcgggtgcaggggtgatattaatatcgctagaaggctttaagtttcactatgctctgaggttccaatttgacacatctaataacgagtctaagtgtgaagccgtgattgccggcttaaagatagcagaggccttgaaagtcaaaaatgtcatctatcatagtgattcacagttaatcgtaaaccatgccctcggggaataccaggccaagggcttaaaaattgtgaagtatttagagaaagtttggtagaacttggaaagattcgattactttgaaatcgaacaaattctaagagaatagaactccaatgcggatgccttagcaaaattggcctcgtagaatgatctggacgaactaaatcttgtttcggtagaaatcctaagagagccaagtatatgtgaaacagaagacgttgagannnnnnntagctctccaacatggatgacgcctattgtcaactaattactcaacatgcaacttccgaatgacaaaaacgaggcgcgaaaacttttgtatacagtgcctcgttacacaatgatcgaatgcaaactatataaaagagggtattcaatgcccctacttcggtgtgttcttcccgcagaagaaaacaaaatcattagagaaattcatgaaggcttcagcgagaatcatgcgggttgggaaagtctctctaaaaagatcattagacaaggatattattggccaatgatcaataaggacacacatgagtttgtcaaacgatgtgataaatgtcagagattttcacatatacctcgcgtaccgcgaaccgaacttagaatgatgacctcaccctacccatttgctatatgggggatcaagctaattgggtcattacccattgggggaggaggggctaagtatgcagtggtagcagtcgacttcttaaataaatggacgaaggctgagccccttttatccataacttgcaagaaagtccttgacttcatcgtcaagaacattatctgtagttttggaattctcataaagatagtatccgataatggaacccaatttgatggcgacttcttcactgaattctgcgagaggaataaaattaacaaaagcttctcgtcagtatccaggccttaggcaaatagacaagtggaagccgttaataaaaccctaaaagattgtatcaagaagaagttagacgctgccaaagggaggtgggttaacgatctatctcaggtgctctggagacttcaataaaagagtcaataaaagactgtttaatattgtagacttggtgttaagacgagtctttgcaaatacgagagatgcatcagcaggagtgttcaacatgaattgggagggtccatatgtcatcgaagcagtagttggagtcggagtgtataaattggcttgacttgatggctcgctaataacaaaccactggaaaatagagcatttgtgaccctactatcaataaataaatgatgtaacttgcattactgatgtaatctttaaacttcagttatgaattaagagaatcatttatattaagtaa

SEQ ID NO: 35540 - DNA, 1680 bp, Cannabis sativa
gctactgcaacctctgcccattcccgaacaagtttgggaggatatttcgatggattttgtcgagggactgcctatgtcgcatggttttgactctatcttggtggtggttgaccgactgaccaaatatgggcattttatcccactgaggcacccgtacacagcagccacagttgccgaagtgtttgttcgtgaggtggtccgactccatggttttccgcgctccattgtctcagaccgagataaaattttccttagtttgttttggaaagagctcttccgcttgcatggcaccaagttgaagcaaagtacagcttaccatcctcaatcggatggccaaaccgaggttgttaacaggtgtttggagacctatttgcgttgctttgctggagaaaaacccaacaaatgggggaagtggctggcatgggcagagtattggtacaatacatcttatcacgtatcggcaggcatgacccctttcaaagctctttacaaccgagaacctccacccttgcttcgtttcgaaccagctagcacaaaggtttcggaagtaaagcagtccttgcaagcccgagacgccaccttggtgttactcaaagataatctccttcgcgctcagcagaaaatgaaggcacaagcagacaagaaacgtcgggaagtgcattttaaggtgggagacctggtctatgttaaactccgcccataccggcagaggacagtggccaaacgcctcaatgagaagcttgcaccgcaatatttcgggccttttccagtcctctcacgcattggtacagctgcctaccgtttgcaactacctccaggtgcatcgatccacccggtattccatgtatcattgctgcgtgctgcacttggcccaaaccagcagtcagcccaacagcccccgaacctcacttctgatcttgaatggttgctgaatcctgaagccgtgctgtccattcgtccgggcactcacaaaacgccaccacaagcactcatcaagtgggagaacctaccggcaactgaagcaacttgggaagactttgctgtcatacaagatcagtttcctcatttccaccttgaggacaaggtgaaacttgtaggggggggtattgatagacctcctctgacttatgtatatgcacgcaggggtaaaaaagggaatgtgagcaagtccacaatagactaattgttgagctggcagggggttgttttgagagctttgtttgggtgtgggagattgtaattacactcggtaaagtaaataaagggtgtaggggaagtattggtgaggtgtgaaggaattaagtttgaattacaattgtattgggagagaaccaggctctcgaactcttgggtattaatagaaggcaaatctgccaatttttcttcttcttcttcaattcttttctgttcttcttattttctggtttagatctcaatttgactggaaattcctatcaaattggtatcagagcaagatcatgggaccaagaaaggatgctactatggagatatcggaggaacggctggaagctcttcaggctgaggtccaacgagaaatggcagaagtgaaatctcaattgggcaaggaggtttcggagactagagcggaagtgcagagactaccggagttgatgatggctcaactgaccaaattccttacggcggggaagaccacggtcg

SEQ ID NO: 35541 - DNA, 2480 bp, Cannabis sativa
  modified_base (2314)..(2317): a, c, t, g, unknown or other
ggataaagaattgtataaagatattcaaagaaaatctatttttaattggcaaaataataaatattaattttgtaataaatagataatttgttaaaaaaaaattaaataaagaaaatacaaaaattgctaagacaaaatttgtcaagaaaaaagttatcagggcaaaagacaccaaccttgtcctaaagacagtggtaggtgcctagcttgttcctatccctatgggatttgtctttttgggttaattaattcaattaggaatatctaatttgaaaaatggttaaagatatttcaaggttgttaggatattctcccaagtagttgagagattccctcgtaaatattagtaaccgaattttgttatagatattgatttatttaaataattaaatatgatttaattaaagggatttaactactataaatagaagcctaatttgagaaatcagaacatcactttaccaagtaaatttcaatatctatagagagaaaaaaagaaattatttttttctctcaattattcttgctcatgtgttgagaactcaacaagaacaaggttatacactttatcttaatagcccacactattccttgtgtgttgttgatcaatttagaagacactggtgtgagtccaaattgttaattcctcatcaactggattaagggatacaacttacgagaagtttcgaggataccctaataggcttcaagaggtatactctaaacttatatcttttaatgttttgatttaatgtacacacatatggagattctaggagctatggtacaatgataatcaaataatatgaaactcttccactacatacctgatttagtaccataaaaccaacatgtggagcatttcccacatcactactagagtgcatctccctcttcagaattatttcactgacttcctaacatttttcggcatagccacttccaactgatctcgcaaggttataaactcattgcaggttagtatatattttgcaaaatgctagactttgatccacccacctagctgaagttcttgattgtagcaaagatggattttactggctaaagaggtggagcaagaaggtgaagagtcctcacatctcctgtagccaccttttggacatgagggaacactggttcttcacgtctagggtcctactccataggtatttgacactgatgtttgattttccagagagttggtaagttcctatcttcctttcattttctcgcctttactgggcggtgcttgtgaacccttgataaaagtctaactttttttttcattgcgtttatcctaatattagggccttatgcgcaaacaactcctcccatccacatttttccttatgaagtagtgtacaaggaatatgacaaggatgatctggaggttggccacatggtgttggatgtcaaccttaaaacctatggcctgatttctcaacattagagcattgtgcctcctagttttcgtggcctgcaagtgatttcagagaaatttaaggatggactaatcaagatcatggccaaagatgttgctaaagaagtaaagcgtgacgagattcatcttcactagttgggagaagaaggggtggtttggagcgatgatgtggagctagccaactgttctagggctatgcttctgaatattggcgcttcgggtgccagtacgtcaggagcaggtaacactccgtttaccatcaataacgctcattttctagaggacttctccttcataagatagaatggatttgatccttatttcctcaatataagtttgtcccaatatcctgccaagggatttcttctccatgttgatgagataatagagtcccacacacttcattcctccctctcagaaaattagggtaaacatgtttacttattacttatcctagattatttgcatacgaaagtttcttaaagcgtgaagacatacttgctttgtcttcaaaaaattcagaaggctctagttctaactttgggggtcgatctcggacctttaattcacactcagactttgctctctcctttgttttttatgcacaaaacatcatgtgacttttgctaacatttgatgttttccttgcttgcaaaattgatcgcaatgaaggtggtgaaggaattctgcgccaatgtggctaaaccaaatgaaggccttacaggaatagaagggccttgcaaaaaggggagctaacgccaaggcatccggttctcaggcgaagaaggatgaccagtgtaataccctagaattaagtaatagattagcaaaaccctaatttgagaattgtgaataattgaggaattatattannnnatagttcaatatatgtgaattaatatgattttataacacgttaagaccccgttggtgagccgagggcattttagtaaatgtgacctaggaagggtaaattgatgaaattaatttagttacgtgcttaatagaactatattattatatagtatgcctgtgttgt

SEQ ID NO: 35542 - DNA, 2698 bp, Cannabis sativa
tcattgtcgttggctaaaagcgaagtcaacaccttggaacatatttttcaattcgtctagctgtgcctgcatagctggattaacctgctcaacattctggtcgatttgaatcacatcagtatctttttgagcgggaatttgagcacgggctctaggctatacgatcatcatgacaatctgattgtctactcctctccttttgagattgctccttaggtcatgagtcatccccaacctatcgaatatagaagcgcctggctgtcttagtgattgattcgcttggttgacaggtggaatgacaccgttaacctggttggaactatcaggtatgacctctcctgatgaactactagacacactactacaaaaatgaatttttgcttcagtttttaagtacatataaagtatttgcttcagttcgtgtaaccgacgttataaccgtagacgcaaatactgatttttttgcttctattatgaaccgatgctaattagttttttgcttcggttatgaaccgaagcaaaaaagaaagatttttgcttcggtttataacccaagcaaaaaattagtgcaccgacgctaattgttttttacttctgttctgaattgaagcaaaaatattttagaaaaaaaaatctagaataaaacaattccgaccaaaaataaatacccattataaattcctacattaatcaaccacaatattttctgaaataagcaattgcaacattaaaaaagaaagcaatttcaggatttcccaaacgcaaaagttgaacaagttcctttggtacaaagtctctttcttttgcacctccaaacatgttcaatctttattgaacaccattctaatttcgttaaaaagaaagaaaatgcacaaaaggcaattaatgatgatattttaactcatttgctcattgtttattacaacttgcttcctgttcatattcatatggttctactctttcatctttatatagtttaagtaaaaaggatatattaaattgcatcaatccaaaaccacttgatttataactataaaaccaaatgagtactccaaaataagagaagtaattataaaatcaaaaatagcaataggatgccaagagtaaagacataaaactaaaaaccataacaaaattttgtgatcatcatatgttattggttgttaccaataaattacttatttcttttatgatattaaacaactatacataacaattctcaacccctcaaagagaaaatgttgatattacatggagagagttcaaatggtttaacatcttagtagccgtcttctaaaatgtgacaacactcaatttagcaatgcatcataagaaggaaacaattaatttagtagactaacttacagagacttcgcaattaatacagagcatgatccttcagcacctgaaactatggaatatgaaaatggaagtaacgtatgccagagtacagtctaagttcatgtggacaaatggcatgcaaaagttctcctcttttgcatcatgacaacatgtaagatacacaaaaagtaacacaaaataaatataaatagatcaaatgtatataaaaacatgtgtgagattgaaactgatacaaaaagaaattacaaacagtaaagaaattcaaaagcagtcatggtctactttatcagaaatggttgtttctaagtgttactactttatcattgatactatatgcaaggctataattcaactcaaaatagaataaaatagataggaatgtcatggtttgtctaatgttcatggacttagggttgtttttacatatattaattataaaaaagtctatgaaaactaaacatatgtggaatgttctatttaagacttcataaatgtattattagtatagtgagcacatgcatataggttgaaagtctagcggattacagaattataaatcaacatttgaactaatatatattgtggaatttcatttgctacatattaattttctttttatttagatgctaattattagttattaaagcatggagtaaaaccataattaactaacagtctttttagtgtcctgtgtccttagtgctctctttatggtagtgtaaagtagcataagagtaactaagaactattaattttataaagcctacagaatataattttataaggcctactcaatggcaatagggacatttttcatgtttgatctattctttccaaagcatacatataatacacatcaacgttaaacaagattatgaaccaaaggaacaaagaatggagaatcctttaccacaaattaagcctagagatatcaatttttttttttttaaaaaaagactcaacccttattgttagtcatgtaatgcataaacagagtacctatagtagagctttatgatactaactaacctgaaaattagggttgactagcacaaaattcgagcggcatgttgatgtggtgggccaaaaatttcaaaccataaacctaaattatcattaaaattaaatggcaaagacaaataactaaaccttagtggaaattaaaacaaataaccgcacccattgcattctcctcaatgaatgaaaagttaaatgtagtcaattgacttagcacaacgaacactatcaagttgttagagtctgtttggttagttattagttagttgagagttagttggatcattgtaactaacttctgctgctatatatagcagag

SEQ ID NO: 35543 - DNA, 4730 bp, Cannabis sativa
tgatgccatttgtaaggttcctagtgaaatccaccataaatgtgtgaatttaatttacattttaattctatacattattaccaagcagaacaacaaaacaaacaatgagaaatatgatccccctcctcaatttgtgtaatatgaaaagtcttcaaaaaatcttaaaaatcaaacatcgacagaagtacggccattgttagttttataattttattgttaaagttttgcttgagcaagaaaaatccatagctattaaacctcaataaattaaaagagaacccatacatgatattaaaataaagagtgtgactaatagagaaacatgcatatttatgtatctatacatataaatcaaatgatatatcatttataaacaaattcctatcttatataaattaatttaaaaataagaaataatatatctgtcaaaaacaactagaactgtctaataaaatttataactttcacatagaatttatcatataacaaaattaatatatatttcatgtgtattatatcttagtaatcatgtttgtcattatatttccttttctgtagtaattgtacaattttataaaactaacataggctaaaccaaaacacaatattaactaatataaaatgctcaacaccatcttatatataatatttatgtgttaattatacaagttcttcactattcttatattcctaatctttcttgttaattaaaatttagatgaacattaaaaaaataaaaatgcaaggaaagaagatcggaaatacattaccaagagtttttaacccgtttgctcgtgcacaaagctagtatccttgccacactattatcttaaagaacctaacttaaatattgacaaaaattatcacaatcatattgatcaataacacatatcagccaatacaaaatattcaaatatattgagacccttgaaaaaataagggagagagtagccttgatatctacccaattgagcttcctaagagaattgattttgcatgtactctttaaactctttctttcttcaacattcagtttcttttcatgtcctcttgtagctgaataaaagaaatcgctcttatgggctacgaccactggaaaataacaaacactataatcacaaggaaataaatggtacaagcactaactactaagtctcattaaggccttctaacaaacacattatctgcaaactacgaaagaaaaaaaattatggcaagtgtcacacaagaataagaccacaaaaacaaaccaagaacaaataatcacaaggaaaagactaggactagtaatgtgggatttagaacacttaaacaactaactaaccgccttgacaattgtcagttatttcagttagtgtgtgtcctaactaacctactgctataaatagaagacattacaactaacagaaagagaggtgatacacaaagaagaatgagagctttattgagatgaattctcttcaagtttggggtgttacaaggttgttcaggttcaagattttgactgcctttagtgagctcattttgtaactggtgtgaatcaccattagtgtgctttgtgttcttgattctccattgttgtaatttgtaatctttgccattcaataataaaatcatcacaaccaatagagttgtttctacccgggaattaggtctaagttttatccaaaacttgtgactgaacctcgttatttcttgctaccaatttactttctagtttatagtttctagtttaatgttctaagcctatttcttttcttgcattgtgttcttgtttgtgcttgagtgcacaacaaatgttatcagagtactagggagatcagggatcagattcaagaaacatttacaagaaaatcaagattgatgcaagatggctttcaccaaatttgaggtggacaaattcacaggcactaatgacttcagtttgtggagaattaaaatgaaagcttttcttgttcatcaggggatttcagaggctttagatgatgatgctatgaaggagatagatgacaataagaagaggaaagctgagattgaaaataaggctcacagtgccatacttctcaatcatggagatgaagtcttgagcgaagtgtctagtgaagaaaaggctcttggattatggaataaattggctaccatttacatgaaaatctctggccaataaactatatctcaagaacaagttgtatactcttagaatggatgaatccaaggagcttcgaaaaaatcttgatgattacaacaagattattcttgatctgaataatcttggagtataaattgaagaagaggaccaagcaatcatcctacttagttcattgccaaaaatgtatgaacactttgttgacaccatcttatatgggaaggacaccttgacaatgatagaagtcaaggttgcattgtgttcaaaagaaattcagaggaaggatgatcaagcagataacagtggtgatgggttgttcattgcaaaaggaagatttcaaaagaaagactacaaggggcacaagaattcttacagcaataacaaagacaagagtgacaggttcaaaccaaaggctgtaacaggtaaacaatgttattattgtaagaaagaaggtcacttttgtgatgattgtttggcaattaaggtaaaactgaaaagagagaaaaatcgtggaaagaatggagaagctgacatagaagatggctatgaatcagttgtggttcttgttgtgtctagttgcacatctgatggggcctggatcttagattcaagatgctctttccacatgacacccaacaaagaactatttagttcttttttagatgatcatggaggtactgttttacttggtaataatagagcttgtgaagagaaagggattggttcagtagaaatgcagatgcatgatggtgtttccaaggttgtgtaacatgtgagatatgtgccagatttgaagagaaatctgttatccattggaatgtttgacaagaatggatatgcagtcaagattgaagatggaatgctcaaaatttttagaggttcaaaagttgtgattaaagggatcttgaacaatagactctattaccttgatggtaaaacagtggttggaaatgcaacaccagcagtgagtcaaagttttgaggtgagtacaaagttgtggcacttaaggttaggacatgttagtcaaaggggtctggatgagctcaacagacaaggtatattcaagggtggcttgaagagcacacttgaattttgtgaagaatgtgttcttggtaagagttgcaggattaagtttggaaaaggggaacatcacacagttaagaaactagcctatgttcactcagatctatggggtccttctaaggtggaaacaattggtggggctagtcataagcatcataaatgactatagtagaaaggtgtgggtctatctactcaaaagcaaagatcatgcatttgaaacatatgtcaattggaggacattacttgaaaactaaactggcaagaaattgaaggtgctaagaacagataatggcctagaatattgctcaaatttgctcaaagaatctgtgccaaagaagggataatgagacacaagatagtgatcaaaaccccacaataaaatggcttggctgagaggatgaataggacactacttgaaagagtgaggtgtttactacttggtgctggtctagaaagaaaattctggggtaaagcactcaaaattgtttgctatcttgttaatagatgtccatctgttgcaaacaagttcaaaactccacaagaaatgtggacatggcatgttcccaaacttgatcaccttagagtgtttgggtgcactgcctatgcacacataaaacaggataagctacaaccaagagcattaaagtgcatgtttcttggttatcatgatggagttaaaggctataaattatggtgtttcaagaaatgcatcataagtagagatgttgtcttcaaggaggatgaaatggcaatgaaaaccaaagctctcaatgatatacaacctgctataccagttcaaagtcttcaagttgaggtggaccaacctgacactcaaattgcaaaagagaattctgaaaccagtgcagaaactgatacacatgaaggtacaactgattttaagcacctatcaacttgctgtagatagggtgaaaaaagaaactagaccaccaagcaagtttggatatgctgatttcatagcatatgcattgatcactgtagaggaattagaatcttcagaaccaactaactaccttgaggctacaacatgcagaaataggttgaaatggctgaaagctattgatgaagagatgacttcacttaagaagaataaaacatggatagtggtcaagaaacctgaaggaaagaaattggtaggctgcaaatggatttttaaacagaaggaaggcatccctagtgttgaaccagtcaagttcaaggcaagactagtagcaaaagggttcactcagcaagaaggagtggattataatgagattttttctctagttgtcaagcaaacttcaattagggtcatgatggcaaaagctgctaaagaagaactgcatattgagcaaatggatgtaaggactgctttcttacatggaaaccttgatggggaaatatacatgcaacttccagaagggtatgaaagcaaggatcctaatcaggtttgtttacttaagaaatctctctatggtttaaagcaagcacctaggcaatggaa

SEQ ID NO: 35544 - DNA, 1677 bp, Cannabis sativa
gctcaccctagagggattgcttacgggcgctccaaagtgtgacagtgctggggttaaggtgagattatggttgtatcctcgagtaacgtagaacggtattccgcttgtttagggagcagcagggcgtggagccccgggaagttatgctcttggtgcatatctcgacactcctgtcgagtaaagccactatttgggcctcctccaggttaatgtatttctggactctcttttgtaattcttggaggctagccactccttcatgttgcaattcgttccagaaatgggttcctatttggatcccgacttggaatagggctaattgttgtccatcgttcacctttttggttttcgaagcctcctccttgaatctctttatgaagttctttaaagtttccgtgggcagttgttttatattggtcaaggcattaacttcaaggttgatcttccttggtgtcacaaactgtcgcaggaaactaacttataacttgttccaatagtccaccgatcctggctctaatttcttgaaccattcttgggcagacctgcttagtgtcaatggaaagcatagacactttgcatcattgctaaccctcatctgttaaattgggatagatggtcattggggtctaaatcccctgtgtacgttgccatttcgggcattttgaaattttttgggagttccgcctccaggttgttcctgtcgcagggctcccggtcctcgcaatcaaacttggagtcatctcccttctgcctccgagagactctaacaatgtctttactgaggatagccaactcggccaagattccttcattcaaggcgtctcccaacaccggtatcatttgctttttcctttcaggtgctttctcaagtcaccatgtttttcattaattttttgcctcaagtcaaccgggggatgtttccgacttttcctccctttttccccaggttcctgatgcattgatacgctctttcggtcctttcgatcctgagagccaagactctttcgagggagcttgcccctctacaaacctttcctttttgggaaatcagagtagacctttcgcgaatcttgggcctttttgtttcttccagggattgaagaaggatttttcttagggttcccctcgaaaggataccgtatgggacttggctccctaatcttgggcttttgggtggttggcgaggactctttttgtgtttcctctagtccttaaggcacaactttgggatgcacatggatttcagctgtctccatgaccttttgcatggcgatcattatttcttgcatccttctgttttgttctttttgggtggctagttaggtctcatgatcagctgctttctgccataggaccagtaactcggtatagctaccatcatcataagcatcgtacccttttgggttttctttgtattcctcgtcctttgattcgtctcgttctttagaatccacatttactcgtgaggtcgcctcttcgtcctttgggctctgagggttctgggggggacgaggttggcgcgtgtggtttcgagtttccaccattgcagcttagatcttttgttttcgcttttcggacaatgcttcccacagctctcaatgaaagcaccaaaatattgaccgagattttcggcaaccaattaaataagataacaatgagagctttgggataattaat

SEQ ID NO: 35545 - DNA, 1197 bp, Cannabis sativa
  modified_base (1163)..(1166): a, c, t, g, unknown or other
agatccttgtaaaataaattccaacaagaatctcactgaacgaccaggctgagcttattaggaggccctcccatgaggaaatcaggtctaccctgtttgccatgagtagtaacaaagctccatgacctgatggaatgtctgttctcttctttaaacactagtagggatttgttgagaaggacttttgcgaagctgtctcggatttcttatggaaagggattatgcataagggagtcaatgctactaatatcgtcctaattcccaaagttcagaacccgaaaagacctaaccactatcgggcaatctctctttgtaatgtgctttacaaggtcatctctaagatcatagacaataggattaaaccactgttacctaagcttatctgtcccacccaagctgcctttgtgcgtgggaggaatatagaggataataatgtgattgcctaggaaatagtccactcgttcaataggaaaaaaggcagagaaggtttatttgcaataaaaattgatcttataaaagcatatgataggatgagttggagattcattgatcgtgtgctttcgtgttttggggcgcctcaagagtttcaaaattgggtgtcttagtgtattactaccacctctctcaatgtctgcctaaatggaggtccctttggcaagattatcccttcttgtggtcttcgacaaggtgaccccctatctccctatctctttatttgggctgcggaattttttgtcaaggcttttggaggattcctaagccaagagaactatcagcagtatcatgctcagtaggggtggccctattatctctcatattttcttcgctgatgatctcattctagttggaaaagccaatttagaggaggtcaaaggatactgggagtgtcttaagaagttttcctcttggtcaggatagaaggtcaataaaatgaagaccttgatcttcttcagcaagaatactccccatagtatgaaacaaggaatcaaggccttgttaggaatagaatcggtaacgttaattatttggggcttcctttatttagatctagacaaaaagatgcagactttaactttattttggataacctgacatctaaattgcatggttggaaagctaagacactttttaaagcgggtcgtgctgttgggttttatgccctnnnnaaaactctatttcaatgtaatccagattatt

SEQ ID NO: 35546 - DNA, 1360 bp, Cannabis sativa
acatatttttttagtgagcttaatatacacatttttcaactatacttaatggtgtagaattatagttaaggttaaagaataaatttattaggaaaatataattgcatgtacgaagcttgtgtcttccataatcattttctgatcatttctcattttaattacttgtttaattttttaaaatcattttctcaatattctcgtcacattcaaggttcttgttttatgctcgtgaaattactaactgtccttttgagtgtatttttcctccctatggatacgacatacagcccatttactaccgcgaccggagtgtaactaattgggcgacatcaatcctcttattggcgagttgaattgttatgaccagcggattgacgtgaggatatctcacgttcttctcatcttcctctgtgaatgtaatgcggtgttcctcagttttcaccttcttggaaggttttggggcaaagactgactactcgtactttatctccttcacatatctattctgagcgttattgcattcctctgcgatatgcggccctcccgaaataaccaggatgtcctctccttcctcaagaataggttgtaacgcccggttgtttaggttattaggctgactgggctggttgtatccctagccttgtctattcacatactgtttaaaatgaccacgagagatgagactctctatctaatctttcaattggtgacattcgtcggtcgtatgcccaatatctttatgtaatttacaatatttgttaggatctcttttgctcctcgaattcctcataagctcgagtttgcagaaggctaccttctactcatgtgcgaggtaaatattttcacgagtttcattaagcttggtataaatagtatacactggcacgtatttttcatgcttcttttgtttctttctaaccttcgactgttgcctaattccgtcctttattttcggaccagaagcccccaagttattaattcttgtggaagtagtcccgattgaaacattgttgggtttacctcccgagcttgttttcaacaagttcatttactttcgagcttcttccttctagacaaacacctgagccctctagttgaactcagtgatgcttcttactagacatccttgtaaatcatcccacaactcgcccccgacagttaatggatcagtggagatcctcccctgaagggctgtaagttgcgtgttgtcatccaagtttctaagcctagcggtatctgtgctaaaccgacttaagtactccttaattgtttcgtcaggctgctgctttatattggttagcgaggccgctttgggtcgcctatccctagtggtttggaatcgcttcttcaaatccctgga

SEQ ID NO: 35547 - DNA, 2091 bp, Cannabis sativa
ttttttttttgagagagagaaaagaaaaagttatttattagtgatgaataattttggtatctttgaattattattttctaattttgattctttttattttctaaatttaataattatatgaagtagtttatgtattattcttacaataatttatacatatggtttagattttaatatataaaaattaaattatttttttttaggtgaaatgttagtagaattcaacatatattcaaagctttttaactatatgcagatttttaaaaaaaaaaaatgaataaatataagtgatgagtgcagtaaaattttaaaattattattttgtaattttgattctttttattttataaaaattaatgattaaatgatctaatttatgtatttttcttgtataatttgtacatataacttaaactttaatatataaaaattaaattaaattatcctaagttttattctagtaataatttttttatgaagatttattttaaattttatatacaattataatgatttgcttaatttagtatttttatattcaagtttattcatttaattttactatgtaacaatctgaagtatattatttttagttttttttttaactagagtatatataagaaaacataatatatactattttatgagcaagtattactattttcataactattttatggtcaagactcaaatatattactttatggtcaagtatctttattttaagagataactatttttttttcttccatacataatataaaatttaaaagaagaaagcatccaatgcttaatcaaattttgtatgtttaaatatttaggataatgcttgagtagaggtattaaaaataactttaggtagagtcattttttttttaatacgtgtcattattttattttattttcattaaaaatattattttcttatttaattttttttacatatataattatttgttaaaaattactatcattttcttaaaaaaaaactatcattcacttctctcttcttctccttcatctttttctctaaaaattcttaaaagttatttatcaaagaacctaaactataactaaaactaagaactttgatttttttttttaaaagaaaaatagaggttgagactcaaaaattctctaatgacgaggtcaaagaacaatacaaaataaagttgtacatatctctcatctcaaattatatccaccaaaaaatattttttttttggtaaatatgaatatttttgacaaataattataaaaaataactaattaaagaaataaaattaaatatggaaataaaatgaaataatcacacctattaaaaaaaatgactatataaaatcatttttaatacctctactaagcattatcctaaatatttaattatgtagtttttttttttttgaagggattaccttgataattttttaactcaataattacatatatataccccttaataaaaaaataattacacatatataaacagagaattttaattattgaatgtgtatataactaaatgtaaatatatttaattattttttttttctaatagccgtttcattgttatagtaatgtctttcttctagaaagtcacactctttgttgcttctttgaactagacggcgttattttcttaattttttttttttttggtttaatgaaattgtagtagtagtatatcttccttcaaagtaattaatatttaaagaaaagtaaatatgtctcacgtgcgtagcacgaataccctaactagtgtcataaaatatgataatttttgggaaattttttttaaaaatcgaaggctaaacaaaatatcataaatacatttaataagacttccaagaataatcatcactaaaaaagtcattgctaaaaaattattgaaagtcatcaaagttgtcattactatcgaaaaagtcactgaaaattcgttgaatttttattgctaccgaaaaaatcatcaaagttatcactgtcaatagaaactcaccggagttaaggtgtcaaagttgaacgttagaatttgacatagagaaactaattacgtttattgctaattacaaaatttgacacaaagaaaccatt

SEQ ID NO: 35548 - DNA, 2550 bp, Cannabis sativa
ttcccaagatggtaaaggatttcacagtcataatccttaaccaactctaaccaatgcctctgtctcatattcaaatctttctgaataaagaaatatttgaggctctcatggtcagtataaatttcacatttctcttcgtagagataatgccgccaaatcttcaaagcaaacaccaccgcgacaagttctaagtcatgtgtcgggtatcgctgttcatattctttcaactgacgggaggcataggcaataacccaaccagtatgcatcagtacacaccctagaccctgtctgaatgcatcacagttaactacgaacttttctttatctgatggtagggctaatacccaagcggtaatcaatctctattttagctcctgaaagcttgattcacacttgtctacccacacaaactgctaattctttttagtgagctctgttaagggtgtagaaatcttagagaaccctctacaaaccgaaggtaataaccagccagacccaaaaaacttctaacttctataactgtctttggtcttggccaatccctaatggattcaatctttcctgaatcaaccttgattccctctttactaataatgtgtccaagcaaagacacctgagatgtccaaaactcacacttcttgaatttggcatacaatttatgttctcgtagccgctgtagaaccatccaaagatgttgctcatgctcctcttctgattaagagtatacaaggatgtcgtcgataaatacaataacacagatatcgaggaaatccttgaatatcctatccatcagatccataaaagctgcgggagcattggttagttcaaaagacataacaaaaaatttcataatgcccatacctggtgcagaaagccatctttggaatgtcctcctctcggattctcaactgatgatagctcgatcggagatcaatctttgagaagactattttcccccaaagctgatcaaaaagatcatcgatcctaggtaaaggattcttgttcttcacagccagtttattcaattctcggtagtcaatgcagatacgcaaagatccatctttcttcttgacaaataatatgggagctccccagggtgacacactaggtcgtgaaaatcctaggtcaagcaacccctgtagctgaatttttaattctttaagttctgttggagccattctgtaaggtgccttagtaaccgattttgttccaggtgctagatcgatagtataatcaatttctctctgcagtggtaaacttagaagttcattaggaaaaacatctaaaaatttctgaaccaccctgatgtgttctggccgaactgtctcaggccatgtggtatccaataccacggccagaaaccctagacatccatcttgtaacaattctctagctattaatactgaaatcactagaatctcgaatctctgaaccgatcccacaaaaacaaacagttcctcaccttctggttggaagattaccatttttcttttataatcaatattggctgagtacttggataagaaatccattccatgtataatatcgaagtccgctaaacccatttctattaagtcagcactcaactccctatcctcaattctgatcggcataagcctaataaacattttggagatgactaattcttcaccaggtagtagagttacaaaccctttgtcataactatcatgcagtctatacaatttattaaaaattctagctggcacataagagtgagtggcctaagagttaaataacacagagaagtaagagttattgaccgagagctgacctgttacaactgaggggctagcctctgcatctgcccgagttagagtgaacaccctagctggagtgggttttgctacagtcttttgttcttctttcttaagctgtggatagtctcttttatagtgccctagcatgccacactagaagcatccttgctctctacactctcccagatgatgctttttacaactggggcattctgggcaagtgtatcgggtttcgaaaccaccctcacagttgcctcaaccctggttccctcggaacttcttgttctgacttgagccactgttggtgccattctattcttatcagtggttgagccactaccacccctactataatcagaggtaggaggagcaggagcctcaccaacgatctgagtcccacgagattcctgagtgcactccactgcgccttcagctcgcagtgcctttcccaccatgtcagcataggtggtgttgtcatcagtggtgatcataaggtcatgtcttatctttgaattcaatccatctaggtatttccttccttactaaaatcggttggcactattctcaagaccattcttgccaatcgatcaaactgagttgtgtattcagtaacaatcatatattctttctgggtcagctgagtaaattccttccttttcgcacttctgactgcttcattatagtgcgtcgcattgaacaactcctgaaacttttcccaggtcatagtggtaacatcacaagtcagggacaccatgtcccacaaaactagagc

SEQ ID NO: 35549 - DNA, 972 bp, Cannabis sativa
aataaaactcaaagaaactgtcttgtttgaaagttgcagactcattatagtttagaattaaatgatccaatggagctcaaagaattctaagtgtgatatatttgtttcatataatacagaaaatcttgaatcacattctaagagcaacagagatgaagttgtaatttttcgcactggaaaaaggtcgctcgaaagattctgtaggcacaagtaagttatggtctattttctttttggttgctcctatatttctctaaagaataaaaattattttttttatgcttttcttgtgctcttttttcaggtgataatgaagttggaaaacacctgatcattttggagtgaatggagatggctttttttatggaacaaacaaaacctactgctattaactatatttgtgagattatagattatttttttattgaatcaatattcaaataaactttagttttagtgtttagagtaatggagaaggcaggtagtcatgtgaatttagttttttttttcttttgttttcttgaaatgtatgatctaaagttgtatttagttccaaaatgaaatgaaagttaagaattatatacaaattgtatctgtccatatatatatatatgaaataattaatataccaggtaaaagaaatgacataattataagcatatggaaattcaatatttgttttgcatcaataaaactgttatattgcagatggtcagaaattgcagctgagctaccaagaagcaagaacaatagataataagattaaagtatgtaagtttgcagatgagctaccaagaagcaagaacaatagataataagattaaagtatgtaattcttgcattaagaagaagctgaagaaaatactcacaagccactatctaaggtagataatgacattcataatggattagagaacaagaccatctacaaatattaacaattaaatatgtcagcaaagccaactataattc

SEQ ID NO: 35550 - DNA, 1815 bp, Cannabis sativa
gggattccagttgtaattggaacctgagtatctggaagtgcagtctgtgggtcttgaggttgactcgaagatgacgatggtgcaacatgggttcttcttgtgttaaccatggcgcttgatcagatacgatatccacgctctcaatgaaagcaccaaacttttgacctcaaaaagtaatcaaccaacattggggtcatatagatctgatgcttatcgggtgttgcacaaataagaatgaaaagtaataaacacatagatttgttatagaggttcgcccccttgtgattgcaggtaatggcctactctccttttagttgtataaatatcgagggttaatactacccagatcactatagatgggatctattgtagcacccttaggaatacaatgtattaattaagaattgcaaaactcaagtgttgagataatgcttgtatgggcgtgtgagagaggaagtgaagaagagagaagttgtcagacttaagcttagagcttggaggtaggtttcaggcttagattcatcttaggttttttaggttagagttaaggcctttatataggaggcttaaaccctatattacaacttgaaaccctagatatttgtatattatattatttaattacaaaagaccaaaataccattgaatctggatattatttagctattcatttgggcttttagggcccaatttgtagcctagaagatgttgtccacatgtagaagtgcagagaaaaccttgtagaacacctcctggtcggccaggtccttacgggggacagtttaaccggccatggtgcagtcccaaggttgcacgaccatggggttagccaggggtggccgaccagctcgtgtgagggagctggtctatcacttgatgcccatttgagtgctgggttctctgtttgcttaggtgctaacttggccctcttattggtgagttgtaccgccacgtggcactgattttgtccatgtaagcataccacgttaggagaataaaaattgggataacaaaggggtaaacgttttcatacaaagtcaagagatgatgctcgagaggtttaaaatagtggcataagtatcagaaacgatgcattttgcaagtgcaaaagataaaaaccctattttaggtaccatgacgtattatggggttattgaagaaatatgagaactcaattattttgcgttttgaattctactttttaaattttcttgggttgacaataatgttagagtaaaaactgatgagcttggttttactttgggtattcaagtaagagagaaagcaagaagattcattcatcatgtctacccaagtagtacaattttgtacatttctaatctaactaatgataaatggtctattattttatcgatactagagatgaagttcttagagaatgaagtggatgaggaggatgttgatttatgttatgacgacttcattattgggcaatcaattcacgaacaagttatggaaattgatcgtaaccttgaagaagacaatgctggatacattagaaaggatatcaatgagaaaatatgggtcaattgttattcaggcaaagacaaacgaaaaaaaaaaagaaaatgtgtctaactggtaacttacttgtgataatgttagtttatgtagttactatttgttataacttagttgatcatgtttctttatgtagttgctctgttacaactaacttgtgattatttttgttaatgatgtagatattgttagcccaagatatgtttccaagagggagtgaattggaaatttaagctaattttagaaatttaaaaaccccaaagacaattcatg

SEQ ID NO: 35551 - DNA, 2105 bp, Cannabis sativa
tccagaggaaaatctgcttgttcaccgagatgcgaatacttggaaattatacgtggatggtgcatccaatgagcatggctcaggtgcaggggtgatattagtttccccaaaaggtaatgcattgagatttcaatttgacacgtcaaacaacgaggctgagtatgaagccttgatcggtggtttgaggatagctgagatattgaaagttaaaaatctcatatgtcatagtgattcaaaactgatagtaaatcaagttctcggggaataccagcctaagggcttaaaaatggccaagtgcctagagaaagttcggaagagcttggaaaagtttgattatttcaaaatcgagcaaataccaagagagcaaaattgtaatgtcgatgccttagcaaaactggcctcgcaaaatgaattcgatgaattgaacttcattcgggtggagatgttaaatgaactaagtatatgtgaaaaggaagatgtcgagatgatagatagcttgcccacgtggatgactcccataatcaactatcttctcaacggacaacttccaactgacaaaaacaaggcacgaaaactcctgtattcagtgcctcgctacacgatagtagaaggaaaattggataggaggggctattcgatgcctctcctacggtgtgttcttcccgcagaagcaaacgagatcatcaaagaaattcatgaaggctttctgtggggaccatgcaggttggcaaagcttgtcaaaaaagattattcgacaagggtattactggccaaccataaataagaacacccatgaatttgtcaagaagtgtgataagtgtcagagatttttgtatatacctcgcgtaccaccaacgaaactgagaatgatgcctcgctttacccatttgcaatatgggggattgatttgattggggcacttcccacaggccgaggaggagccaagtacgcagtggtggctgtcgatttctttacaaaatggatggaggctgaacctatggtgtccataacctgcaaaaaagttcttgactttgtagtcaaaattataatttgtaggtttggaatacccattaagatagtatcagataacgggacttaataagaccttgaatgatactatcaagaagaaactagacgctgccaaaggtagatgggtcgatgaactacctcaagtacttttggctcataggactactcagaaaacaacaacgagacatactccattcttgctagcatttggctcggaggcaatgttgccagtagaagtaaatatcactactcacggaagatagttttataatcaagaagaaaaccaagaacttttaaaattttccttggatctacttgatgaaaaacacatacggagagtgtcgccaaattactataatgcagcataccaacactgagtgacgagatacttcaaaaagagggtgaaaaagaggctcttcaacgttggagacttggtgttaaggcaagtatttgcaaattcgagagacgcatatgtaggagtatttaacccaaactgggaaggtccttatgtgatcgaagcgatagtaggaactggggtttacaaattggcttggctgaatggctcgctaataaagaactgttggaacgtggaacatttgcgaccctactaccagtaaattgatgttgtaactcatatttctaatgttatattttgaacttcaattattaataaagttgaattatttttcaagtaattacaaagtgccatcttttaaaattacttgaggggcatatgtgtacgattaactggaatctatctagaaatacatgatatattgcaaacccattactttagaatattttttttttaaatttttaaagtttttgattaaagaacctttctgatgagaaaagaaaatcaaaagttgtgaatgagatataactcataagctacatgcgtagcatactaacggctcgcattttgtgggaaagtattaaacgagacaccaagatgtcttgaaaaagtacttaaactcaatatatgaatagaaggcataactattctattcatataagcaatcaaaaatatacaaagtgatgaatcattaaaagtatattcaagtttgcttaaaaca

SEQ ID NO: 35552 - DNA, 1379 bp, Cannabis sativa
  modified_base (557)..(559): a, c, t, g, unknown or other
atactacctatatcaacaaggcacatcatgcgtatgagttgggacaaaacacgctgaaaatactcgtattagtctgcacaacccaatagaaacttaaagtggaggttgtacatccacgttacttatgcaaaatttgagataacattaataaaacttatttatttgctttagaaaaaatacatatagtttttcattttgtgaataatttattatatatattataaatggctcgttaaaaattactcttattatatactttttttatttttaaaattagaagagaaaagaaaaaaaaaattcaaactttgaacaacttgtacactacgctaatgatgtgcttccacattttacactaaaataacttacattataatttgtcttagtttcagtggtctagcagttctataatttgtaatttatttatatacacatatggaacactatatgtatatcatttaaatttggtaatttaatctaaatggttggtttaattgtttttttttccattaaaattgacagttaaaattaacaccgttaaattaattaattaattaatnnnttttttaaaaaaatttaaatatctaaatttgattcatttattaaaatattaacttaaaataattatttacatgtatccacaaaattaaataattatttttataacaaagtatcttaatttaattgattaatcatattttataacaaatttattagtacaactctaagcaaacatgcatatctattgttggtttaatacgacgattgtctatatactaaactgtatctattgattttttttttgaaaaaattgtgttcattgaacttttttttttgagagagaattgtgtctattgaagtttgatatgtatcaaattgtatctcttaaatatttatctatgtaggcgcccgttagtaaaattgaacaaaattttttaaattcaataatattaatagttcaataattttttttttttaaccacatgaaaaattggaaacaaaatttagttggtgacaaaatccatattagtcttttaataagtaattagatatattaatgtagtcaaatgatatttaatatatatttaattcaagaactaaactaattatggaaataacttttgtttttaaaagaattaagagaatattctttagaatattattttcacaaaataagaaagtagtatgaaaaagattgttagaaaagaaaagtacatggaaaaaagtacactacattttgaatagagggtgatacgggacactaaaatgtccaagactaatacttttatgatataatttttttataattagttagtgttgtttcataatttttattaaaataaaataaataagattaatatgggacactaagatgtctaaga

SEQ ID NO: 35553 - DNA, 1479 bp, Cannabis sativa
agaagcgaatcgggacccaggaacaggaccagtaccatgacctggacacaaacccaaaactgtaactggaccaaggcgcaaactcggacatagacccacactcggattctgtgtctgggttcgggtctaggtctgggtctagatcggggtttgagtccttgttcgagtctaggtccaggtgtgaatcacgatttgggtctgggttcggtccaagtccgagttcaggtccctggtgcgggtccaggtttagatttgggtctggatctaggtcccaagtttcgatcttggtctgggtctgggtttgagttcaggttcgtaccttgatccctatctaggtccgagtctgtgtttgggattgggtcccagatttaggtctaatccaattctcggttccgatctgggtacacgaccatgtctaagcctgagttttggtctcggtttgggtcttgggcttggtccgagttcggttctaggtctgggtctgggtctgggtcttggttaggatcctagtcttgttacacaatcctggtctgacagttcttgtttaggtgctagtttcgggtcctgggtctaggtgtgggtttgggttttggtcctagactgggttcgggtcctagtctgagtcccaaattcaaacaccgactactagtctgttccaagccccatttactagatttcgagtcaagatctagatccctgtcacgggtctaggtctggttctggtcctgggttccaagtccaagtttgggttcgggattgagaccaggtgcgattctaggtcctagccccggttgtgtgtctcgagtctggtttcatgtttgggtctgagtttgggtcagggttcgggtcccgagtccaggtctgggtggggatccgggtcagagtcccgattttgggtctaggtctaagtttgagtctgggtcttggtccggttatagttttgggtctaggtccaagttcggttacggttctaggtccaagtccgagttcttgtcacatttctgggtcaaggtcaaattccgattacggttccaatttcaggtcacaaggtacagtttcgggtccaggtttgggtctaggattgggttcaggtatgagttttggttcgagtgctggtctgggttcgggtccagggctgtgtcccagatccatacaccgactatgggttcgatccaagccctggctctagatccagatctcgatctcgggtcctggtctggttccattttgggtgccatgtcatgagttgggtcataggttcatgtccatgtctggggtcgggtactaggtttcggtcctagttccgttgcccaggtccctatcttgatgctaggtctaggtcccaattctggtctatgattgggtcccagtctaggtttgggttaaagtccttctcaattcgagtttgggtctttgtcttgattttatctgggtagggttcgggtttaggtcctagtcctagtcctagttcggttccag

SEQ ID NO: 35554 - DNA, 3050 bp, Cannabis sativa
  modified_base (1363)..(1365): a, c, t, g, unknown or other
tgtggagaagcagcagcttgttgtgcagcggtttcgatggctatggaggaaggttttaagtttgttttgattgagagtgactcgagagtagttatcaatgctctcaatgggacgaagtctcattgggcgactgaaaattatatttcattttgtgctaagtcatctccctcttttatttgctgtaattttgtgtatgttagtagaacttgtaattttgcagcccataatgtggctaattgggcttttattcacaagttgtacgggattattccggttttttcggttccagagaacttattatgtaatgaccgcgaggtttaactttgattattaatggtacgattacgcttattttcaaaaaaaaaaaatgctaacataaatatatatatgagggtagtgtactatttcggccggctcttatagtgtgcaagttgggttactatacaggcctaaaaaataaaatgcccaatatattttttcttttaatgcccttcaattttttttaataagcctaattttttaaagagctaacaacttgttattggtcactttcataccaattatcaaaacctattttcaattttattactgttttaagcaaaaaaaaaatcattattattatttattatctttcaaaatttttatattttttttttctattattttttggttgtattgtaatcaataatatttctaataaaataattggaaatttttggtgttttgtaaaatatataagtataagttaatatttaaatatatttataaattataactcttttttagggtaccaatttttaaaattagaacaagctatctaacatgtttaagacgatcttgtgtactataaatacataaatacatatacacttaactatttaattaagtaataaatatcttttaataaaacattatgatatacatattattaataacaagttagagtactacatagagattcttttaaaaaaattatatttaaaaaactaattaaatttaatgttttttaaaccttttttgaatacataaaatgtgtggtatatttatttcgataatgctttattttttttttttttttttgagataattatttcgataatgcttaggcaaatacaactttaaaaataaaaaaaagaaaaagaaaaagacaactaaatgacttgcattcattttggtgtactaagaggactacatataataaattaacaactataactgtactaggattttttttttcattttataaataataatttataagtcaagtaaatatattttaagccaatgatttttatttttatttttatttttaatatttttttcttcttgggtaaattaggtttctttcaaaaaataaaaaaannnaaaatatatatatttttttttacaaaaaaagtgtaactcaacaattatttatttgaaggagacttttatttactaattaaaatagaagtattcatatgtaattaaaaataaatttataatctaattgaatacacgaacccaaaaaaaatcctaaaatttcaccatgttatcactaattaaaaagagggatttttttttaaaaaaaaaattccatgcacaaatagagaaattttaataatttttggttcacattagtggaaactggaaattagaataataattataaatatgtaaaatcaaataaaataatgatgtatttttttttatgcagtaaaataaaacatttttaaaaataaatgaatttgatgaataataaatatacttaaaatttattagagttttttacagctaaacactctcaactattacttcacttgtacttaatcttacaagctcaaattttaacggtaaaactctccaaactacttaaccgcttgcaaatttaaggcgtcatttattttttactattaatcgccaatatagaatacttatatgtacacttttgtacatatgtcaaatttatattggtacacctactattattattttaaaaatataaaaattatttcaaaatttataacatttcttataattgtattaaattttgaaaatatttttaaaataataatatcaagtgtaccaatataaactgtcatgtgtacacataaacagcatatagtaacagttaaccgaatgacaccttaaattttttacaaattcaataatttaaagaatttttctgccaaaatttaaacttaaaagattaaatacaagtgaaacgacagttaaaaaaattttaccttaaaaaactcaagttattacactggtcataaataaaatatacatatatatatttttttgtaaaataaaaaatagaaaaacataatactgcaatttgaatcattaaagcaaggaaacgacgtcgtcataacaattaaaacattcgcaattacttaaataaaataaaataaaaacattcttcaaagtcacataaacacactaatatttaatacagaccaaatctaacgttttctaacatgaactaaacaaaggtagtgttgtacgtaccttcctataacaccaaatttaccataatacccctcatcacacacactcactttaatttaaaaccactgattaataacactaaacatcattaattaattaattaataataattataataagataacacgtaagcaggtacggatttcgcggttttccaaaaacctgaaatccacgtcggcgagtgggccccacgcgcggccgcaatcagtaagaccacatgcagtcgagttcggttgctccgacgttcttaacgtcttcgttgaccacagccggcgacggccaattcccgacggagttacagccggagaactctgacggcacagtcacggatcctccgctgccgtagaaggaaatccccggcgacggagaaggaaaaagaaacggaagctgaagattctcctgaagcgacctgagactcggaaaagccgacactcctccgtcgcatgcggcggcaccggtaccggatacagcggaggttctggtgaaaaccggcgccggaaactgatcaaagcagttgttgaaaccattgttgttgttgttgttgttgttgtcgttgc

SEQ ID NO: 35555 - DNA, 1694 bp, Cannabis sativa
  modified_base (1628)..(1629): a, c, t, g, unknown or other
caattttgcttttattttagaggtatttcttattttttcgatatatgaaaaaaattatgtatttttttttttttgagaaaaagactattatattaattcaggagaattacataagagtcattagtggagatggaaaaaaattatgtattggagtatattataattatagtacacattctatttattttttaaaaaattttaatactttaaaatattaaaaatacgattcaaatagttagttgcatgcatacttattttattttatacacttgtaactaaatattttaaattttattattaatgtcataaattattcaaaatttatcgaaaaaatacaaaatacactataactataatgtatactgttatatatgtatataaaaaaattaaaatataatttctctaagtattaaaaacaaaaatatcctttcgttagggttaaaagtgatactcacataagaagctacatacatatatttttaaaatagtcttccacacattttgtcactctcgaatcagaaattctagacttttgtaagaatatttaaacatactattaaaaattctcgacactgtataaattttaaatctatcgatactactaaatatatatatttatatatatacccataaaatatatatatctagtttaggagaatgaggagtgatgagaaggtattaatgttaccctattatttttggatgaattttaaataattgaaagctacttctccaaaagttgttcttcctttcctttctacaaaggcatccactacaataatccagcaactaactagggtgagtacatattcaaatgtcaaatatatagggtcaattcatgattattaataaaatcaattttattttattttaaaacaaaaaatatgaaagtgattaaacagaaattcttgttgtattatgtaaatttaagatataatgcattataattatgatgatatatatagtagtactagccatagctatgttcctcctttttgttactttatattaatttgaacaaattgaatggggttagttttggagatggttacttgtcattatttgttgacaaaaagtgggtttatttatataagtatatctaatccattcatatatatatatagcatatatatatacaaataatatatatttatatatccctatcaacttcatttttgcactaagagattgtgacttaaagcactattcatatactaactcaaagccttataattaggtgaagtttgaattagaatttatgatggtggctttattatatttttttatttttgatgtaaaaatcatgcactttttcaaggtttaatattaataccaatttttgattggaagttggaactctgaaagttataagctagcaagtcatttctaaagaattgtgtatttattttattttattttattttttctataaaaaataattgtgttgtgatgtagatgagggtcacacacaactgtccaataccaatctttaatatgaccccacattaatttaatttataacactccggcaaaaaaattaatcacaacattggaaaatccttcttctaaatttatattatatttatgtcaaataataatattattatgagcattgctattgggcaccnntggtgcctagcaccttctaaatgtgtcgacttgcaattggctagcgatactctataaaaattatt

SEQ ID NO: 35556 - DNA, 1401 bp, Cannabis sativa
aattcggggtccgggttttgttctcggtccaggttggggtcggggtccgagtcttggtacgggtgttttggaacctagtctgggtccaggtctgagtccgggtcctggtttgggtcctaggttcgggtctaggtctgcatctcagtcctggtctaggtcccgtgtttcgatcccgatctaggtttggtttagtatttgagttcatgtctgggtttagtccatgtcaaggtccgaaccctgttttaggtcaggggtttggtctgggtacaggatcgagtcccgagttcgagttcgggttcaggtttgagtctcaatcctagtctaggtccgggatcgggtctgggattgggtctgagcccgagttccggggctgggttctggtctagttctgggtcacggtccaggtctaggttctggtcacggtcttagtcctattctagggtcttggtcacgttctggttcatgtttgggttttgggtcccaggtctaggtctgggtcagatctttgtccagctttgggtgcttctctgatcccagaccaagacaccgaatatgggtgttgtctaagcccgtcttctctaatcccgggacaagatctggatctcaatcaagggtcctagtctggtttaggttcatgtcccatgtcccggtctcgttctcagtctaggtctaggaccgagacatgggtgcagttctgggtctcaatcctaatcctgggtcccgagtcttgttccatgtttgggtctgagtttaggtcttggttcgggtcctgagtcctggttggggtttggttaatgtttgggaaccaatcccaaggttggtccatgtccgagtccgggtcctggtccggttacattgatgcgtctgggtctaggtcatggtcgtggtcctgttcctgggtccaaatcagcttctagttttggttatggtttcaagtcacggggtacggtttcaagtcgagtttgggtctgagtttcggttcgggtgttgatttttgtccagggcaaggtttaggtctgggtttcggcctcggttagggttcgaggatgggtccagttctgagattgggtctgaataaggtcctggtccagttctaagatccccgtacggttccagttcaagtttcaatttttgttcccgagtctgggtttgggtttgggttctggtctaagtcccaaatcaagacaccgactactggtttgatccaagccccgtgtcgagatccagatcttgatctcgggtcctggtctgattccattttttgtgctaggtgacgagctaggtcctaggttctagtccgagtctggggtcgggtactaggtcccagtcctaattctgtttcctaggtccctatcccgtttttggttaaggtcccgattcttgtttaggtttgggtcccaa

SEQ ID NO: 35557 - DNA, 2389 bp, Cannabis sativa
tgaagaccaggctagcataatagaggtgttcctaagctactataaatagctccttggcacaaaattggcaaacagaaggaaagtcatttctagtgttcttagaaatggacccaaagtaacaagtcaacacagagacattctctagtaacagatgaagagataaagaaggccatgtttgacgtaccaggaactaaagcacccgacccagatggttactccagttattttttacaagataattggaatttagttggaggaaaaatttgcaatgctgtaaaatcttttctccaatctgggaagattttaaaagaaatcaactgcacaactctcacaatcataccaaaagtcagatgccccaatacactaggtgattttaggccaattgcttgttgcaatgtggtctataaagctccaacaaaggttatttgctccagattaaagcatatccttcctgacattgtggctcaaaatcaagggggatttgttaaaggaagattcatagcgcataacataatgatctgtcaagatcttgttaggcactatgggaggaaatcgactaaggctaattgcatgatcaagcttgacttgcaaaaagcctatgacaccattgaatggggcttcctagaagaggttctaaggggcttgctctttcctgaacaatttattatgcttgtaatgaattttgtcagaaccccaaaattctctctttttttcaatggatctctccatggattctttgaatcaaagaggggattacgttaggaagaccccttatcccctcttctctttgtcattggtatggagtacttgacgagaatcatgaagaaagttggcagcaaggggggatttgctttccatgaacgatgtgaggatctaaaactcaatcacctaagctttgcagatgacgtattgattttttgcagaggggattattcttatgcttcaaggactgaaactcttcttggctactttaggtttgcagccaaacaattccaaatctgcaattttctgcagcaacatggatgaacatgaggtatgctgagtgctggatgtatcaggtttttcaaggcaattcactccttttagatatcttggtgtccctatatgtgctaagaaaatatctaagcaggagtgttcggtctcgatagaaaaaatgacaactagaattcattcttggagcactaggaatatatcttttgctggtagagcagtcctcataaactctgttctttcagcaatttatgcatactggtgtcagatactcaagttaccaaaacaggttgtgcatgagattgaagctatatgtagagccttttttggaaagggcaacacatgatgcaaggaactggtttaatagcttggactattgtttgtcaatcaaaattagaaggaggatcaggttttaagaagctagcagaatggaacgtagcagctctctttaaatacgtatgggcattggcaaacaaagcagacaatctctggtttaaatggatacatagcgtgtacctcaaagaagaagaatggtggggataccaagtttcgagtcatggaagttggtattggaaacaaattgtggcagcaatagacacaatcaaaactcttactgctacacaacagtttgcacaaagcaggtaccatattttggaaggttataacttactttgtacaattcaaaacagtgtccattggtgtgatgaagtttggggaagaattaatatccccaaacacagctttatattgtggctagctgtacaaaacaggctcaagactaaagatcggcttcagaaattccaaattacttcagatgctgtttgcactctctgtttgcagcatgatgagtcaattgaacacctgctatttagatgttcttatgcacggtattgtgtggagaaaatcaaagagtggctgtcatggagaacaaaagcttatgatctacataagctcctcaagtggattcacaaaagcaaaatcagcaagtttaaaaagagggtattagctgctgccattgcccacttggtatactcgatttggtttgtaaggaatgataatttgtggaacaaacacatagaaaataaagatcgatgtaactatacaaagaattaagaatagtgtcaagcatatagtagaattagtttggccaaaaaagattggtcaagaagatagagattagtttcaaaagttgtaaaagttgtacaaaatttgatatgagatcttttttatcaaaagatgttctctcattgtaatagaatgtaaaaagttgtttgtggattaataataaacttcttgattataaaaaaaaaaaaaattgaatgttcgagatatgaacataatgcactataaaaaacaccgtaatttttttctataccatcttatttatttatttttataa

SEQ ID NO: 35558 - DNA, 1453 bp, Cannabis sativa
gggtatttttaacgaccttaaaaggtcatggggcatgatttggtacatgtcaaagttcaggagacaaaaatcctaattagcctaaaattatattatgtttataagaaagtgttaggaggtataatttatggcatttggctaaaccaaaatttatgtataaataagaaaaaatgtatgaatccaagttgtattgatagtagatttaaagagagcttcaaaaatagaattaattttgtacaagaaaagaagttatctagcatgaataaaagtgagttgtaagtttctcttttgaagaggaatcctcttgtggatgtaattggctcagttgaatcaatataaattatcttttttgataaaaaaattaataaaacaaattaatttaaaaaataattatggtagaattatgtatctaaataaattagtggtgaaagtacttaaataattaattatgttatagttaattattagtgtaaaaaaattagcaaaatttgtaagtaaaattactttttaaaaataaatacctatataaaaataatttaaattattattttattttttaaataaatatataattaaatattattataatatctataaagttttaattgtataaatgcagtcctatcgtaagagtatacactttacattttaataaccacatgagtcaaaattaatggtcgaaaaaacttccatactgataaaaaacttaagctaagttctaccgtagtcttgttttatatatatatatagaaagacttacccttttatacattatatattaatttttattttttattatgtattaaattaataattttttatgctattggtgctaggtggttgcgatcaggagcaatgaacaagaatggtggtactgcgttttcgaacaatccggcgaataacgattcttgtcaacaaggtggcgaatcttctcacagcggtagccagtcaagacacaatcaattgggattttcaatcactaaaaatcagggatctcttctgtctcaaccgagaaaagaggtccttaatgatgggggtgttgatgggggatctattcctcaagctgtacagttaaccaatcaaaagattattgacgtaccaggagaatctcctaattatgagaaaaatgtggaatcacctcacattactggggaggatgctctattagtattggacaacaagaggagaagaatgggcttgggaaagaatattgggcctgctgaacatagtgagttgggccaggttggtaacactactaaaacacaaagtgggctaccaattatggatgatgtagaaatgactaatgaggatggtattattgcaaaaaacttgttggggggcgggtctgtgaacattatgaatgtgttgagttggaattgccgtgggcttgggaaccagcgggctattcaattcctaaaagagattgtatctcaaaagaagcctaattttattt

SEQ ID NO: 35559 - DNA, 5884 bp, Cannabis sativa
ttttttttttttttttttattgctcgtgtgtcaataagttccgtccatatttatattactactacaaattgattagttaggggttttttttagaaaatttacaaagatacattttttttatattggggacgcgaaattcgaacttggaacctcttctttataaaaaaaaatataaaaccactaaattatgactataaccacttaatacattataaaacaaataattacttatataccttattaaatttaatataacctcttttattataaactatacccattttcttatacttaattaccactttatgtcactatcatatttttttttaagcattcaatttatttcctttttttagttttgttctatcttttagttttttcctttgaaagttaattccttcctttaaaagaaaaggatggtgtttaataatcttttgtttaaaagaaaatatggtctttaaaagaaataatggtgtctactctgaatcttttgtttaaaagaaatagaatggtatttaaagtatctaaccgttattagatttcatttagcagtaaaatattaacattttgacatatcttaaatgtaattttaatagtgttgcaaaaagatgcttaaattgagcctatcaaatttgacacacaatagttgtttgttaccttttttactacatttaataaaaattaaatgaaaattaatttacaagaacacaatataaaacgaactttgagaggccatgccaaatatcaaaaactgcattataataaggtaagttaatacaacgtggtacatacacaagaaaacaatagcctttaaatcagggttgaagagggttttcggctaaggtacaacattacctttcagttagtaattcatagaagaacaaagttttcacaaagggaaagattattagaacaggcacatatcaattaaagctacaaaaatttcatcattgaacaaggcaggcactattgtcctacatttcaacattgtcccagtcgattgacctgtcatcgaaactaaattctgagttttgaagcctgttccgagctaacctgctcatcacagcaagacctgcgggcagaaaagaaaattatcaagagcaagcattcagaattaaccagaactacaattcttttgaccggaaaacggatattaaaagttttgttactaggtctaacgaagaatctaaatgcctgaaattcccccatgcaaccgaaaatgccccatgcaagttttcaactccccaaattgtatgatggtttaatgtgaacacgtttgtccagttacaataatccagataactaaactatacctcaaaaaacaaagttatttgcaagttcaattattttagattacttatagtgaagttccctttgaaaatttaaagcaaacatgcaagtgagggaaaataaatgtaaagaactgcatccaattcggcgtaaatgaataaaagtcataaaataccttcaacaactcggtaaagagcagaccaccatccatctctagagacctgatagtgttctagagactcttcgatagctttgtcatgtttccctcccaaaactccctgcagcgtgatcactgcttcctttgtttttttaagaatattgtcctcatcttcgatttccaatctttgaagatcgttatgtgatgaactaagactcacagaaagggcaaattgggcagcagcagtccaccgagaagaagctatccatttcctctgtccatctaaccgtacactctcttctcttcccagccgatttgcatcttccctttcacgtactaggcttcgtaaatattgagcattcgcagctcctgtactttgaaccatttttgagaaagcactgttctctcttgacagcagttcctcaggggagtcatattctaaaacctgaaaaacagtttatccacatagaattacatcaattattattatttttttcaaaattaaccttgttcagaatataatgtagacaacacaaataacatcaagaacccatcctctcttttgagagtataagtacataaaacaagagcaaattttacatacccggccagcatcaagcagaatgattcggtcacaatcaataatggtatttaatctgtgagcaataatcagcattgtacatgatttaaattcttctcgaatagttttttgaatgagagcatcagttcggacatcaacagctgcagttgcttcatcaagaaccagtatctttgatcttctcaacaatgctcgagcaagacttaatagttgcctctgcccaacactgaaattctcaccagcctccgataccttaatatatcacaaggcagtttagtctagtgaacaaatacaatagtactaataataataaaaaaataaaactatgactgataaagcatggacattagtcttgtggtcacaccattttttccaacaagtatcacaacagtaaacttcatttgatcaaaaaaagttagatatatgtgtgtgaaatacgaaatctagcatgtgagataatttactaattcactttgaatactctacaattgctcagcaaacatctaacaaactagatgaatcttacaatacatgctcatattttcatataaataaatattatgggacaagcatgagaagagagaatgataggttacgaaaataaactcatactgttctaattttctaccgagtgagttatacaacctatcatttttcctctgaggctctgaccaatgtccagaagttcatcaagtagtagccaatctaaaagatagaaaggcctaaaaggacagctaatatggcatagtgcttgggtttataattgcaaacataaattttgaaaagataagccataaaaggagcacaaaatccagtaaaaggcaaacttgagcacatacctcagcatccagtccaaaagaattcctcctaattgcatcctttaaatgtgccctttctaaagcttcccaaaggtcagcgtcattatgttcattaaaggggtcaaggttgaatctcacagttcctagaaacaaatatatagtaaattaagttgatcattattacaatattgacattacaaatcatattatcatcaaaatgaaagattactactgagataacaacattgacagaaattagacaccccacgaaggaatcccgaacttttagttgggtctcacatgctttttataagatacgaactagttttattaagtattgtataaacaaaaacagaagataccagatctcgtataaaccaattactttttattttctttttacctgagaaaagaacaggtgactgtggtatgattccaagaactttccgtagatctgtgagcccaagttttccaatatcgcagtcatcaatcaaaattcttcctctttctagttctacaatccggaagagagcattaagcatgctagacttccctgcaccagtccttccaacaattcctaccttatcacttggtgatattgcgaatgacagcccatgtaaaactggaggaagttcgggcctgtaacgtagaacaacatcctcaaatctaatagacccagatgaaggccacccgggaggggggcggttactctctataatagatggagcttcagatggcagatctatatatgtcccaacccgctctacagcatttaagctattctccgccagacttgcaagtctcagtactccagtcaatagactagtaatgtttagagcatagctaagaagaagacccatagtagaagcaaattcttgctggttttctgccctcccgttctgcatgacagcaaaagttgcagtaaaccatatcatgaggcctcccaacgtttccaaacggatagcaagccagcggtttccactcatattgaccaaggtgaatctgatattgttgtcaacagaccttccattaatgtctgacatccgatcataagctttgtaagcacgaatagttgataggccattcaatgcttctccaaattgtgcataaacaggagacctgcttattgagtctagacgcttaacttcacgagccatgctctatacaaatagcaaaacatcactaatgtaagaagatatgtaacttcataaaagtactatgatgctagcaaataaaaatttcgatcaaatattcaagtggttggaaaagctacatttgcctaaagcacattaccgtaagtcaatgtgttagggatttctacaatgattataggagaaataatgcaacaaattaggtagaacattattccaaattaatgatagacaaaaataatgatgcttccttttacctgataatagagatatgccgcataaaacaaaaccaagagtggcattatagcccacaaggacatggtgctgacaaatccaatcaaaatgaatgtggaaagcaattgtgaaacttgattcagaaacatattcacaaatggagcaacattccgatcaatatcaccgagatcctttgcaaatctattgataatccgtccaaggggattagtgtgaaagaaaaccattggagctcttaatatagagccaagcatggcctcatgcagccttctggcagcataaagacttgaaataattaaccaataggaatttcccagcattacaatgacctgaaaccagcaaacaatgatgataaatataccattcaagcagaattttaacacaaaacaatgaaatctctaattggtcggtaggcaaacaagctcctactataaaaatcctgtactctatatgaacttcaacaggcttacagaaaaaccttgagacatcttttgccaccaaagtatcaatcttcggccaatagtgaacagacagtgatattcaaaatgagaagcccaaggagcaactaaccagcatgtgaaaatttatgaccaaattgtgctcaagattacttagccttagtatagcataatgggtttttttttttttttgaaaaagagaccaaaggtcaaatgtcttagactgaccttctcccaaaagtataacacaatgaaaataattttaaaacttaagctgttaaaaaaaaccaatcattgtctgttattcccttacctgaccaaatgatagaagtgcatatatcagattgtagaagccaggattataattatcagcaatcccttgatcagtccaatgactcaaccaggtgctacttgaaattcttagaatctcagtcaggatgtagcaagtaaagagaataacaaccacccacaaacctcctagagcattcttatacctgcacccgaaaagtgatggtagtaagataatatgataagactctagtaggaatttaagcaacaatgttatccataacactagaaaaggatttgcagaggtaagataagttaccagaacttatattctttttaaaatgacaaaacttcgactaaggacagctaatttatgttgcttttcatagaatttgatgcatcaaaataaaagagagaatttctgaccttgataagactttcatactgaccacacccgtttctcgttcttcctgtttaataagaatagattttcctggttttgttttacccacgtcatttgcgtttttcacatcattgggaaccccattggccacaggtttcgaagcactaccatcaatgatttcattatcttcattttcttcagcatattcttccatcttccctgcattttccattaacttttggaacagcatgccattattagaaagttcatcaaatgttccctcctctttcactgtcccttcatggaccagtattattctatcaacttgtgaaagaaaatgtagctggttcgtgacgagtactcttgttttccctcttaattctccccgaatgcatttatcgaaaacctaagaccaatgagtgtgcagaagttagttcagcatatagtaaatactaaaagatgaagaaag

SEQ ID NO: 35560 - DNA, 2141 bp, Cannabis sativa
ttatattatattattaattttatacaatgatttagcttacgaaaatttaaaactattgtaaaaaaccgcgcgaagcgcggattagttccctagttaaagtatactaagtttacaaactaaataaacatatatgagtttgactatcaactaaacatcctccaataaaaatatataaataattatcaatccaattttgactacaattttatcacatttttaattatatctcttaaatatataatttattttaaatagataattaaatcaatttccataaatataaacttttttttttttgagggaccataaatataaactttacgatgtatcattatacaaaaaaatcttatttttagtcacaataaaatttatgacttagcgcgcgtagcttgcttgctctgcttctcccatggcgaagaagaagaggcaagttcgaaagcctatcagtaaggttgatagagctggtgaccgacctgtttctccagctgaggatgattgcgattcgactgggaagggttctgaggttttcaaggaagccgtcgacgatttgggcgaggaattaggtcagaccgagattcgtttttctcctggactaccggattttcatactcctcaggtcagttcgagctgggctaaagaagtggaatatgaacagggtggtaatggtggtcaggagttgtttcaagattctgccaagagcctgtggcaatcttttgccaaagaaaaggtaacctcccgtgattcaaaactctcttttactgaacctttatttcaagatggtgtaaaaattgcacaagttgatgttgaggaagttagggaacaatctgaatcatggaattcggctgtgatttgtatgatactgggtgctaatcccccattaacagtttttgaaggttttctaaaaagagtttggggtcatcttgggatagttcagattgctaggatgtcaaaggggctggttatggtgaaatttcacgatgaggcgactagggatgaggttctagaagcaggagttttgcaatttgataggaaaccagtcattgttcgaccttggacaactgatttgaatgctgttaagttagtgaggtctgttcctttatggattcggctacatgatttgggtctccaatattggggaaacaagagtcttagtgctttggttagtacgattggaaaacctatcatggtagaccaacatactaaggatcgcactaggattcaatttgctcgtattttggttgagatggatatatcggactctcctccgaggtcatttcaatttcttaatgaatatggccagcttattgaacaaagaattgattacgaatggttacctgtcaaatgtaaaaactgtttggggttcggtcatataatggcggattgtcgtagggatgagatgaagaagaagttgacttctaaggataaaccgaaaccaggttttgctcagcagcaggttactgatgtggtttctaattcggtttctgaacctgagaacaagttggatgaacccacacaggtgcaacctaaagctgaagttaatggtcagggggtttggcataaacccaagaagactattcagggaaatattaagaaaaatctgactggtaatgatgaattacagcagcagcaggtagttatgaattcttttagtgctttacaacaaggcagtagggaggaagctattctagatcatgagcaagaagggcacaagatttctactcaattaccccatggatagttgcaagatagcttgttggaatgttaggggtattaacaataaggagaagcaagaagttgttgctgaattttgtaaagttaataaagtaggagttggtgcttttttagagaccaaactcaaagagaataagattaaagagatgatggataataggtttgtcaattgggattattacacaagtgcaactatagaaggaagacttttgattgtttggagaaaaggctatgttcgaagtttagttattgctgaatcttctcaattggttcactgtttcatccaaatgtcaggttgtgaagaagctttttgtgctacgttcatctatggatacaacacttctgaggaaaggaaaactctatgggcggatctgaccaaattaaagtttcctgttaagccgtggcttata

SEQ ID NO: 35561 - DNA, 6460 bp, Cannabis sativa
ggcaagatttcccttttgcttacactatctataattagaaagaatagttattacataattagaatacatgaaatgggggattgagacagcctgcatccctctaaattaatcccatgattgtagggattgccttcgtacttgggcttcacgataacattttgaagtagtcaagtcttggtacacagctcgaaaaaccaaaatcatcatatgctcggatactctgccatttatcctgctcggataagcagatgttgtgcgtgtaggtatgttacctaaaacccgttcagaataccttttcgtccaggtgcaaggaatgttggacacgtgtcactcgtacatgctgccatgtcatagtgcaaaaaatgggataccattttccccccaagtctgcgcaggacttctgaagtcgcacgtggacttcacttgatatggatccttacttgaacgggtggcacgtgttctgagcatctgttggtgatccaacgtgattttgaaaaagggtctcttcaatatttggctcattaatgctgactgacctgtacctcaaattactcccaaaaaatagcacgctttgacggttgcccttcatgtaattgaatgcctaagatttacttttggggggaaactgaggtatttaatttttgaaatgattgcacttccccactaattagcttataaatagggtagaaatctataataaaacacatttatcattttttattcttgaagatttcagagcaagaaagcttttcctctcaaattcttcgaagaatctctaggaagtgttgatcagtgtcatccgaacaactcgaaagcttcaaatagtgagtaagttcttcatctctttcctcttttatgcttaaatatgtgattttctaagtttgcactttagaaaatttgatagttcttgaacttgttctaggaaaaccataaaaaatctaggtttaggaatatgagattttgactatgcttaaccatgtggcttaactgtgattgcattctaattttgattccacaatattcagtttcacttgcccattcatggtttagtgaaaattaacccttaattcgaagttttgaaattatggattataaacctaatatcatgcaaaatccccttttttaatccttcgatcggacctagtcggtatattgaatttgtttttgttcgatatcccgatcaaatactcatcttgtgcctaccttttgtagatgaaccctggtgaattttgggaagacgaacatcatatcgaccaggaccttctacaacttttgtacgaggatcatcctcgtctttatgcaagttcatcctcatcaagtgacggtctttccaactcgagcttcgaagattgggagataagcagcgaacctacaccttctccaaaacccgaggtgcaacaccatttttatctagatcagatcgcaggtgaaggctacaaacgttttatctaggagcttaagaaggggtggaggcaatatttgccgtccaattagacatacattgtccgaccgaatatagttgacactaactgcaggtcgtccaaatcttatttctataggtacgcctataactacttttgctgtgacctttgccagacataccaatcaagcttcgttcagggatagaatggttgcacgcaccaaacaaacagtacgataatcttctttgactgatcctcacgtggctcgacttgccatattgccgagcgccgaacaggctcggcctactgctgaggaggaagacagtgagggggatgctgaagtccaagagatggaagatcagggcgaggtctgtcctgatactccatttgaagttgaggaggagagtgttgttcagaggttgccctttgggggattcgacgaggatggggaagctgtgtctgagtccggtgaagtcctggtggagggtgaggactatgttactgaggaatacaccgaggtagttcctcagagaaggaaaagtgccgcaggagctcggtgggtttctcctccatctatagtaacctaggctaagatgatgaatttggagaagcacgactacttggaggatgttgaatgcttccttccctctccaaataactaggcaactagtccaaggcaggggtattgtgcctggtcgggcgcttataccaagaagggtgcactgctgcctttgcttccgtacttcaagaagattgcagactactaccacctctggccgactcagttcactttaaagggcatcaaatatccatccgccatgttcatcctttacgcctcgcaaggatggggcgagccatccccgcacgacaccaactggcttttcgacttgaagtcaactcccaagcagagcaggtcaggagatttctacttctctcaactggatgagaagtggctaacgggcactgtggacaccgatgtcaacaaaataggacattttgtggactagtactactttgtttagggtatggatactgtccacactcggttctagcagattccctcgtagtggcgccctcctttcacattgggactcagggagagggcacagaaaattcttcaactgctagatgctgtacgaaacatcaccctgctggccactgaggccaactatgttaagtacaaactcttcccaggggattttattccaaggcctgtgaaggagaagaagaaaaaaaggcaaagccaagccaggctggtgggaccgagtaggaaaatgagctcattcaactcaggcgtgaggctaagttgaagggagacaacagagtgaagcagtatgctcaagaatattcagaaaaggagaggccgagcaagaagataagaaggctctcccaaatgaccaagcaccagtagaacacgttaaaccctaaaccctaaaccctaaaccttgatatgcctgctcggccatccgccccagtggaaggaaaagggaaagccctcctggtggagcaggaggaagactcttcagatgatgatgccccgtttgttctcattcgggaaaatgctcctgcccacatgcagggtatttttatcttgcatttacttctttcataacatgctctacaccacattttcttctaactgtgtcattttgtttgtgcaaaaatgtcttagaaggtgcttcaggccttgacgaagagagtgggggatagcttgggccagactcttccgcccaaaagatctaagggcaatgagacctcgtccaaagagaaggggtcggtcgaagagttcattgacctttctgaggaatggcctgccgtggaccctctagtctagaaggtttcaaagtcaaagagttccagaggggggagcttggacgggtctgattagattaagaccccttcgacggccatggcgctgagcacagaggcaaagaagggcaaggacgtgctccaatattatctgaatcgatcacttcctgaagtgagcaatcagttttctggggtggacaatgagttgtcttcagaactggtcatgggaggagtattgaaaaaggctactcaggtgagtatttctttctttgtttttagtcttttttttagttcgggctttaatattttttcgtgcaggtcaatttgaagatggcttgcgcctattcgcgggcttagtccacaatgaccaaaaacccttctaccaccaatactttgtagagggaggtagatgcaggtaaaaaggagattcaagacgtacgaaacgagctcatagaggtgaacaaaaagctccttactgcaaacaaaagggttgaagagctgaccaaggagatttaggagatgtcgtcaactgcccagttggaggcgaacaatgacgatttgtctagagaggtcaataagcttaaagattagagggagaatctccgcactcttctctcaaagttggagggagacgtccagactaagcagagcagggaggaagagctcgagaaagaggtggaaagcctgaaaactgccgcccttgaggtcttctatgaattttaaaaggctaaccccagagaaaattttgattaccttggtgattccaaaggtatgtatcttgattactgtgtaggtcagacagctaaagaaaacctaaggcaaccacttctacagttccaaccgactagagcactgaaactcctgctgctcagaatgttggacctctggccccacagaccaaaccgatccgtacaaagagcctaggacccctaccgtctaaaatatttttcttttttttttttatatgtctattcggcccataggcctttttaagagacaaaaatgaccggccaagtagttttaaacttgggttatatattttattttaagataactagttgactatgcagcctttaatcttgggtttaccgtgctttgtttgtccttttcaattgatactatcccttgttttgataattatatgtgcaactgttatgttttgtttttttttttgagcttgttatctacttttaccagtgctttgtatgggtataattgcccccaagtaaccgagtagacttttgactcttggtcacttttatttcccaagtataatttttttctgttcagttctttggattcgagcagacctttgtacgcatttaatggtaaatttataacttgctaatagaattgatacaatcagaatttaaatagacatctttattcattcattggtcggaatttttttgttaccgtagtaacttacataaaatccattatatgatctaatccgatcattaactaaatttaaacaaaacaaattgcacttacaaaagaaattatactttaaaaggtggtcatccgacctgagtacttagttatttcgtccgaacccttgggcgggatccgcccagaaggccatttacttaaaagtaaatgttctttggttttgtacttatagtggtcatcagacctggtacttttactgatagtactttcttaaatgttctccattccaataccttggcactagaacgagttccatatttttgtcaaaccgcccaagtttgtatgctcttgattctagaacctcaaccacctgatatggttcttcccagtttggtccaagcacaccagccatgctgtctcttgtgttcagaaatactctcctgaggaccatatctcccataaaaattcatgtgcctttacttgcttattgaagtaccgagccaccttttattgatgtgctactaactttaggtttgttgaggcttatttttcttcaattttgtcaagtgattctgctaggagggcatgattagccttttgatcataggtcaatcttctgtggggcggaagttctagttctatgggcaacatagcttcatagctataggccatagcgaatggagtctatccagttattgtttttttaattgtgcggtatgaccatagtacttctggcagtttctccggccaattccccttaacttctttaagtcgtttttttaaagtatctttaagtgtcttattgactactttgacttgaccatttccttgagggtgtgccactgcggagaagctttttacgattccatggttcgtgcagaaatcagtgaacaattggctgtcaaactgtgtggcattattcgagactattttgtacgggagtccgagctgacatattatgcttttcagcgcgaagtccaatactttgttagatgtaattgttgccaatggctcagcttctatccactttgtaaaataatccactgcgaccactacatattgtactcccccttcacctctaggcaattgtctgattaggttaattccccaaatagcaaaagaccaaggattttgcatctgagttagttcattgggcggtgcacagggtatctttaaaaatctttggcatttatcatatttctttacataggcctttgaatcttccatcatgaccagttagaaatatccttgccttagtattttctttggtagactttgcccgactgcgtgatttctatagaatccatcatgtacttcagacaaaagtcgtgtagctttttcttgtgtaacacatctaagtagtggcatgaagaatccccttatatacatgactccttctacgatgatatactgtacaacttttcttctcatattttgagcttcatttcaatcatttggaagttctccagtattgagataggctgctcttagtgtcatccaatttgaaaatggtcaatcatctcaatttcttcagcacaggtgatgctgggttttttaagaaattgaattgggactcaattaaccttattagttatattgttgctcgcaagtcgggctaaggcatatatatgaattaggactaaattagtcttgttagttatattgttgtctaatataatgtttttatcattttagtatatatatgaaaaaagtccgaattaatatacatgacatgtatagattgtcttctttttcaataaatagtcgaaaaaaatagaaaatgtaaattataaataatatgtatttgttttcaccaaaaacaacaacaataataataa

SEQ ID NO: 35562 - DNA, 3341 bp, Cannabis sativa
aagatatgaaaaattttcacaaagcctttttcactattcagcatgtaaacaagtcctaatcctagcttgatcaagaaattactatcctagatacaaaataataaaaattcaaccaggagttagagtacttacgtgttgagtagaaagaagatgggttgctgttgtaaaatctcgtctggagccttcgaacctagtccgttaaactttttcaactagtttggaagtcgaagccttcgtttggaaaggggttcaggtggtcgatttgaagagtttatatctggaaaaagcctcacgcaaagatttagcagtaattgaattaaatgctcacactcttcttgcattcactagcgaaagaacaatgagggagaggaatttgcaaggaaaattcaaagtctggtaaaggtgtgtaaaaagtgaaaagaaagccttcgatatcaatttatacttcaagaagaaatcagaccttttcaaaatcgatggtcgggatctcctttacaaacacatcatttgatccaatggctggggagttgaaagaactgaaaagcatttatttgccgtgattttccttgagtccaacaaacaataaagaagcttcttttcaaattaccctaccgtcaattttacctttttctgacagatgagcctcaacacgcacgtaagaaactgactagtgcatttaatatgctacataatcgccaccttggtaagccctaacgttccatctgcccttaataagttacaactcaccaaaaagatgcgtccacaacactaatagttagcacgtgtcaaaggtcagtttcatggaagagaccacaagctctcagaattcaaagagtcctaaaagcttggggggtaaatgttatccgtgtttttgagcaggagacacgtggcataattagggaagaagatttgttaacctctcggattaacaaagatgaccattaaggttccttatgaagatgccttgttaatctgggaggagtttttcgaatacttgatggggagagccattcccagccaagtagcatcttcgagatgcggaagaactatatttttcccccactccaagaagtcttggaacacggtttggctgcctgattttcgagtaaggacttctacgggctggtcacaaatcttaactactgcaccaaggcaaatggccatgttagcttcatattgaaattgacctacaaatatggttatacctttttataaaacaggatcaaatcttgtcccccataccagtcatggtagtgtgtgtatgtaccttaagacatgccttttacctaccaaattgtctagagagtaatttgtaaaggagaaacctttgaacaatacgtgtccctaatccatatggtactagtcactacccctatacaccgcacaatgaagaaggttctccaaggtcagacagtcatatctaaagttgtattctcctgcccttgcagcgagttgtggtacgaaaccctaagtaggtgaaggaaatgcccttacccacatgtaagcctataaataccctcactttttatgtacaaatggtgaacaatttgatactagccgaacctctacaaaagttcctacaagtcttcttcttcttcaagagaaacaaaaagaacacagagctagggtttataacacaaacacttgtattatctaaatactcgcccaaaaggtcaatacaactaactcgtggactagggatcattaacgcctgaaccatgtaaaaattacttgtctattagttatcatttcaattctttctgaagctctgtttaattagtttctgaaaatctcagtaaataatatatatatatatatatatttcaagaaatactttatttgaaagaataagaaataaagttattccttcattttatttgaaattagttttatatttttatagcaaatctgttaggtagtatttggttggaggtaatgaaatataataaaaatgaaaggaaacaatttttattctattcctttgtttgtttgcatattaaagtattgaaatgtcattccaatagaatgacctttctaccattttagtggaatgactattctattttgaaatgaaaggaaagacaatttcaataaatgatgagaaaaaaattaataattttttttatcaaattttaatgcattttagattttattctattctattcctattcctatttccattctcattcttatattttcaatcctctcaaccaaatgtcaccttagtgttttgaaacaattaatggtatcaaaaaaattattaacaaaatcaataaatctagtacaacatgattgtgatttgtttgaatagaagcataacatctccaataaaaatgcaaataaatgatataaagctaaaatacagttcacccaagaaaaaatatgctccaataatgtgccaaaaggttattcaaatttggcacatagcaaatattaggccaaatttggcacaatatttgctatgatgcaaaatttacatcaccaaaaatgtacaattttattattaacttttatgtcacttttattattttattgatataattagttgtagcattaataaataattatttatattttttttttatgtttttacataataaaaaaaataataatgtcaatgataaagttattattttgttatacttttactaaaaatataaaattttgcatgaagttttgtaattatgtattggagcacaatgttaaaattgatgtaaatatatcacaaagtattcttttgtgcaatattgcctaagttttgcatctcatattggagatggtataaggataccttgacaaatcaattgatatttaatagattaatgtgatgtttggtaatattttgtttttttgttaattttttaatcacaaacatgaaagtgattttttttaaattttgttttggaaaaataaaaatgtattttgtaacaacttttattattcaattttaaaaatataaagtaaaagtgtattcaattttcatttttgttttttttctttttattcaagttgggtatagttcagggtatatggtctaggtttgaggtttggggttcagggtacgggtccagggtcgaagttagagtccagatctaggtcttggtttggtcaagggtctgggaccagggtcgagtcaagggtaggggtcggggtccaaaatattaataaaataaaatacaaatatattattattattaaaaaataaaaaataataatcataacctctttaaaatttctaaaagtggcttttttttcaaaattttaattcttattttttaaattaaaaaataaaaataattttataaaacttattttttaaagatattttcactttttcaatt

SEQ ID NO: 35563 - DNA, 1516 bp, Cannabis sativa
tatcttataaggtagaatgcctatgattaccctagtcccataattgggcattcatgtactgacaacatagaacctacgggttcttgatgagctgttatgtacttgtctttcaaataagatttatacaaaggtacgatctttacatatagttgcaagagagatgcacttagttatcacatataatcgatatatgcacgaccagtgctaacttctcttgatcatacttttttaaacactgttaggcatagtatgcaactagaccttctctcggtcgtacctccttgtaagtttctatcatttgaggttttctctccctaactcttatgctgacacatcatctttttccactcgagaactgggtcctcatgttatacatatacgagattgtactcaatatttataggcaaaaatatgcactataacacatgcccctaattttacagtgacagttgtctaccacacggtgaaactatcgtgagggacagatcaacgagatgagttgtcacattgtgggtgacatttgaatgtcttatcgagggttttgaaaatacagttggtaattattaatttacctttccaaggtgccatgtcatcaaaactctttggggtatgtgtaggcatgtcttgtgacaactgtttgatgaagcatccttgggtttccgttgaccagatgtcacaatcgtaacagtggattgtgattcctatttaaaccctaaattcaaaaatgaggcattcactttcctctcatttcacttgctcaaacttttcaaaaatcctcccaaatctttcaaaaaaaaattcttaaatttttagaagatctctcaagaatttttcattgctcgaaccgtcggagtgtgattcaaattcatcttgatagaggcaacatcaggcttttagatttaaaggcgagatttctttactttctccgtttttataaaatttttgaataactgcatgcattttgggctctgttggttgaaattgtatgaaaatagtaggctatttttttgggtaatttggggtttaggtttgatgaactgaaatagataatttttttagaatttctttacatctaatttgaataaccaaatcttcttcataaatctatgactaatcgtatttttcttcttagaacacccagaatgcccgcacatgtatgtaggtttcatttagaacatgaagaacagtttgaataatcgcacttttacctagatttggcatacattacttaaaatattttttttttgaaagaattacattgccattacgcgagtaaggacactccttttattaaatggtatgcacaaaacactaaaaagatcttctatcttttagatgagcaaactcttggacatccaagagtactattctcaagggggagcattcgtggaagaaccccaaaatagcgattgcttcattcctacatcgatgtcaaagtaagatattctagagcgtcaggatttgctatccatggaggacatagctcacgtgcctgaaaaggtgagcccataacatt

SEQ ID NO: 35564 - DNA, 2749 bp, Cannabis sativa
aaaaaggaacttacttgagcgccatatcagtatggcggtggtggtggctggtatgggtaccatggcggtaaaataaaattttttgggatgcctcccgaatgcgctatcgtttacgtcatttaggtggactgtatttctctactcataatggaaccaattggatgatggacttggcttcatcaatgcgaccttccaagtaaagcttcaatctttgaccattgaccttgaaagtctctggtgtgtctcctttgatttccatcgctccatatgggaatacctgaaccactgtgaatggtccagactatcttgattttaattttccaggaaaaagcttttaacttgaattaaatagtagaacttgttgtccaggttgaaactcttttctaacaagtttttatcatgccattttttagtcttttctttatagatcttggcattttcataagcctcattgcgaaattcatccatctcattgagttgcaatagcctcttttatcctgctgctgccaagtccatattcaaagttctcatagcctaaaattccttgtgctctaattctactggaagatgacaagcctttccatataccaacctatagggtgacattcctataggtgttttgaatgctgtcctgtaggcccataatgcatcatccagcttcttagccatcttttcgtgaatgttgagcagtttctccagaattaatttaatctccatgttggatacttctgcttagccattgctataaggatgataaggtagtgcagtcctacgacgaaccccataccttgcaagtaaagcttcaaattgtttgttgcaaaaatggctaccttcatcgctgataattgctctaggagttccaaaccgagtgaagatatttttttgaagaaaatttaacactatttcgccgtcattcaaatgtgttgttgctgcttctacccatttagagacataatccatagctagcattatgtaagaattgttgtatgatgccgggaaaggtcccatgaagtcaatacccaacacatcgaatagttcaacttctaatattccagtcaaaggcatctcattccttcttgagatatttcaagttctttgacaatggtcacatgcttcgacaaattgatgagcatctttagataaagtaggccagaaaaatacactttgaagtacttttgccgcagttcgatttccactaaaaagtgtcctttacattgtaagttatgacagtgatttaatatagagaacatctcctcttctggcacacatcttctgataatatgatcagcacaatgcttatagaggataggctcttcccaatagtagtgtttgacgtctgagtagaatttcttcaactgttgccttgtcaaatctggtggtgtaatgttggtggttaagaagttcacataatctgcaaaccaaggtaccgtagaatctaggagaaacaactgctcatcaggaaaatcttcattgatctgaacctctcatgttttctgactctcttcaagctccaaccttgacagatgatctgctaccaaattctctctgcccttcttatcttttatttctaagttaaattcttgtagaagaagaacccatcaaattagtcttggttttgcatctttttcgtcatcaagtacttgattgttgaatgatcggtgtacactatcactttatttccaatcaagtaaggtcagaatttatcacatgcaaacactatggccaccatctccttttctgtagtagcataatttagttggcataattcaaggttctgcttgcataatagattgtcatgaatatcttgtcaaccctttgtccaatactgctccaatagcatagtaactggcatcacacatgatttcaaaaggtagctcccaatctggtgtagttacaatcggtgctgaaattagtttctccttgagaatttggaatgctttaaggcaatccttcataaattcaaaaggtactccattaacaagaagattagataagggttcggcaatcttggagaagtctttgataaatcttctataaaaccctgcatgccccaagaagcttcgaactcccttaactgaaactggaaggggtaagttctcaattgtagataccttggctctatcaacctcaataccactttttgaaatcttgtgacccaaaaactatcccctctcttaccatgaattgacattttcccagttgagcaccaaattggagtcttcacatctcattagtaccagttctaagttgcttagacattgatcaaaagatgggccgaatactgaaaagtcatccatgaacacctcgattcacttctcaatttaatctaagaatatcgccatcatacacctctgaaatgttgctggagcattacacaaaccgtgtgtcattcttcaaaaagcaaaagtaccatatggacatgtgaatgtcgtcttctcttggtcttctagtggaatgactatttggtgtaacctgaatacccatcaagaaagaagtaatactcttgtcctgccaacttgtctaacatctggtcaatgaatgggagagaaaagtgatcttttctagtggctttgttgagttttcggtaatctatacaaattctccatcctgtgacagttcttgttggaattagttcatccttctcattctttactaccgtcattcctcctttcttttgaaccacttggatagggcttacccattgactgtctaaaataggataagctaccccaacatctaaccactttaa

SEQ ID NO: 35565 - DNA, 1456 bp, Cannabis sativa
caaacttgatttaataagaaaaaaaaatagaaattatactgcatatatagtagacagggccagtcctaagcataggcaggctaggccgagaaaattagatggtatatccactttactctatttgttttaatttttacctttattttcatattttttaagatatacctacttttaaaaatgatattctcattaaaccccttaggttaatgcaaattatatgctagatagacttaaatagagagtgacagtatattgggcaacctactcaaaaaagtgagtatatttttttaaaaaaaaaaatatgaaagtatttttaattaatagaaacaaaatgtatttttcaacttatcccgattaagtttgcgcctagagttcattcattttatgtgttcacataaaaaatattttttaaaaaatatatatttttaataatttttaaaaatattatttatctttataataacgcggcttcatacttatttaagtgtcaaaacatgtgggtgagttgattcataagatgaggtatttaagtaacgttcttgatgtgatagaaagcaaggagcaaagggtggacttcgctttattattagtacgtggatgagagagataaccaagtttctatttatgccacttgaattatatattatgatatatgtattatgccacttatcaattaacacttaaatacttcaaagtgagtgattcccacgtagttattcttaaacattcaattagtgatgtaattaccatttaaaactatcctataggctataatgataacttaattgcttaactatatataactagtataaaaatgaattataattaaaagtatgacactgtctgcctcaaaaagtatatttcgaatatttatcttgtcaagatcactactatatttgctttcattaaattataattatattatttttaattaaatattttaagaataattacatattattattatgagtaaaaacaaatatgtataatttaacacgttaaaaatatatatatgtataatttaagtgaattacgatcattaatcataatttttaattaagaattatacatataatttttcttaggtattgtttggttgagaagaataaaaatataagaatagaaatgggaataggaatgaaatgaaataaaattcaaaatgcataaaaaaaaattaataaaaatcattaattttttttattacattggaatagtcttttcttcctttttaggaatagtcattccaccaaaatagtggaaagagcattctattagaatgtcatgccaatactaaaatgcaactaaataaagaaatgacatgataactatttcctttccattccattccatttcatttcattactctaaccaaactccacttagttactaactattatggaaagaaagaagcaaaagagtgagtattgtgaggtagttggttgggatagttagatca

SEQ ID NO: 35566 - DNA, 1352 bp, Cannabis sativa
ccaaaagagatatgtgaaggaagttaagaatgagcagtcagtctttgctccaaaatcatctaagaaagccaagactgaggaacctccaattgtgttctcggatgaagacacaaaacatgtgagatatcctcatgtcgacccactagtgattacaatccagctcgccaacaaaagataaagaagggtggtggataaacgaaagttcagtgaatatcctttataaggatacactgaagaaaataaaaccttgcatggtaaatctgtgtggatttataggcgatagtgtcgccagtcaaggaataattaaactcgtattaactatgggcgagacgcctctatccacttccataatataaaattttctagttgttgacctatcatccgcctacaacatactgttgggtcgaccaacattaattggactaggggcaattagttcaattaaacatctatccctgaagtttcaaacaccggcaagtgtaggtgtggtgtgaggagactaacttttggctcgtgaatgctaccgcatagagctacagaatagaaaagctggtcatcagcttatggaagacacaactgaaaaaggcgagaagcagggtgagaatcttgatcttcggattcaagatgaaggcttattctgttttgctccctttgttttttttatcttcttttatttttgaagtataggtccaatgttccagatttggattctgacccaaaaactcctctaagagttgtggagattgctagccttccaattcagcaaaaaaatgtgtaattgttattgtgttatttttatgttgcataatagctgcttagctatttttttttttctgtttttgttgaacaatgattgtggcacatttgttgctgcttttgcgaagttcttcatccaagggaaagatgtccctaatgtctttcacatttaagtttaccgcacttgttttgctgccctattgtcaaagaaaaaatgacaaacatattgatagtgaggatgagaagtagaacaagtctttgaaggcttctaaagggaagaagtagggtcatctctggagaactattttatcctcgttgtttgatttttatatgtcaaatgattatactttttaatggatgctatttttttccctagttttatgctctagtttaagttctatataagttattgtaatcttttcttttcagacaattgtcggtcttttttgtattttggttcttaatacttttgatattatggcaactgcttagcaactgttatgcaatttaaaattgaacattctagtatgtccattctttttcatcttaacagaaaatgtgttatgaacttgtaataaatatttttagcatattta

SEQ ID NO: 35567 - DNA, 3218 bp, Cannabis sativa
agagggaacattgctctcagtaaaaagacgatcagaccaaaaataagcaccgcgagcaacacaatgtgcggtcttattaacagatcgtttaacacgaaaaacagaaatattatgtaaaatagaaagaattgattgccattcttgaacaaacaagccgaaaacagatggaagtgcaatcgagctattaatagcttgaacaacagcgatacagtctgtctcgattagcacattcgacaagttcctcatcttcaaccaactgagggcttccttaacactcaaagcttcagcaacagctggctgacaagccccaggatgcagagaagagcgagcttcgataagcttcccatgaaaatctctaatgacgatacccgtaccatattgagtcgttgcagcaaaaatcgtcccatcagtattgattttcaatatcccagcagacggcttctcccaacacacactgctaccatcaacatcaacatcaaataacaacagtttgaacctattttcctgagccgacaaccaattataaagagtagacctagccattcgaaccacatccgcagcctgagaagaacgcccctgccaaagaagctcatttctggctttccaaataccccatgccaccatcaatagctcatccaccaaagccactctaccccctgtcagaaacgccttaaaccaatcggcaaagatagcttctgcagaaaattgcaaccccacaccagacctattccaacaagattgtgcaaaatgacagccaaccaaacatggacaatggtttcttcatcggaattgcaaaacacacagcggggatcaacaggaacatgtttagtacataactgggaacgagttggtaaacaccccgagatagctttccacgcaaagtgaagaaccttgggagggactttagctttccatagagccctccataattcagactcaaagttaaggctccatttatctttcaactcttggagatagtagtaagaactcttgaccgagttaaatttggtcttctaaaattgaattgggtgaattttcttagacttatttaggtattgatcaacctccgaaatttatcgcttcactacactatatataaattagtatatctttatagttatagtatcatgaatagtaaatagtgttgcacattctctccatggtattggatcccgctcttaatggaacgaaaaattgtataatggggaaagggtggggatgagaattaatttttattcccgaatattaaataaagtggggataagaataacactctcggactccacaagaacccatttaatagtttaagtactttttttaataatattttatactttttattatatttatgtatttttctagtagtatattagtaatttttacaaaattttaaattgtatttttaaaaataattagtttatttaataataaataatatgtaatattttaatttttatgtaatttatttttttatataattaaatttttgtataaactttagtttcacataaatgggtccttgtagggatttttgcttcatacccgataaggaataaggcaggatgaggattaaaatttttaacgggaatgagtactgaaggagcattctctataaattctcggtcctgtgtgcatccctaattatgaattcaaattttattaataaaagtttataattatgagttgactctcaatttatgtgattaaaaaaattatttgaaaacaataaatgagtaaatttaaaaaaatttacctcaaatacttgaaacttcttggattaagagacattggatgatagtgactgattatgagagtaaagagtaccataaattttgcaaagagtgtagcagtgaggttgaagataactttaggatttagaacaacgagtttggtggagtgagaatagaacgataaaacttttagagttgtttgaataaaagatatattgactcttattaagtttagttttatggataataataataatagtaataatgataaaaataatatgataaattattaaataaattaatatttaactttaaaatttaaattgtaagctttccatcctttatttttgacctagaatttttttgaattatcatataactatttttacaaaatttatatatagatctttgaattatttttctaacactactagaatcacctcaatcagagttttacaactctagatttgatcattttactaaaacagtttctaaacatgtgaatttgtcgaaacctacaaaattattaaccttaattctataatattttttttatttaaaaccaccaatgcaaatcattaagcccatcaaatagtttctacaactctaatagccttttatatttgacttaactaaaaatattttttaactcgtaagaatatcacaaattttcatcttggagaataatacaacattccttatcttaggagatatagtcattaaactctaattattatctctattcaatatccctagaaataaataagacaattatttttatacaattaatatcccaataaattttgaacactatttttaaaccgagtattacactaatttacaagaacacatatgcatcaaaatgagacataacataacagaatgagtaaatttctgtaaatataaacgtttaggggggtgacctcctgggaagtcctcgtgttgcacccctaattttaaccacttgaggctagctcaagtggccataggagagtgcgtgtgtgttagaggtcctgggttcgagtcccaggttatgcattgtaatgtataaacgtttaattcaaaaaaaaaaaacatttaggggggatattaacaagtcatatactttaaggggcacgatttgacaatgtctatgtttgggagtaaaaatactaattattttttctcattaattctacaatttgttatttttaataaaaagaaacgttaaaaaaatatgagttaatatttttcttttttgaaagaaaatatgagttaatatattttttaaggagaaaataatatggattttcatggtacgtttgaagttaaaattaaaagtgcattatatatgtattcaaagattttatatatacatcataattagggataaaaattgtacctgtgagtattggtgttctgcgggtacccgctcctaatgaggtagggatgatgattttattaatgcatttcttgctcaattacatcaaagatgttactcggaatgga

SEQ ID NO: 35568 - DNA, 1426 bp, Cannabis sativa
taaaacaataatcatgatattgaacatagaagaatagaaaccatttgatataatggaaactagaattaacattcatcaatgaaattaaaaactctcgtcttgagttttgaaataacccttaactaaaaggaaactacttggacctagacattataatcaaaatcataataaaatagtaagagtttaaggagaagaaaaagaactatgatgaagaacactcgaagtcgcaatctccatctttcctttgctctctctttgagtttctatctcaatttcgtagctaaaaaattctaaaattcgtaccttaaaagtcctaattctaatgcttgaaaaatatttcactaaaaaagatatctcctttaaaaaaaaaaagataaaatttgaatttgcccagtaaccgcctcctcgccgcaacgagtaggacccttcgccgcagtgacagtgtcctcgctgcggcgaagccttcttgttgccgcggcgacaacacctgtttctttatttattttttatttttttttctttttgcttgctacaatgagcactcaaccttcgctacagcgacacctcatgcgttttgactcttcatgaacttccgaaattataagaaaatgttgttttggcgcgtcatttcatctgctaacatcacctagcctttaaaacaccaaattcattaatttttactcataaaaatcatttttttttaaactcgaatgattcaaaaaagatgaaaaacaataaaattacaaagaacaatatcctggagaaattaataattttagagcctaaaaagttcttattagtcacaacaaacaataccaaaatttgtattagtaaagaatataaagaatcaataaattatgtaaccccaccaaacaaaatacaaaatcataaacagttaagagaaagattcttaatcagacaataactcccttcactagctaaacgaagaattactcatagttgagccatgttcgttctcaaatttagaaaactacatcgacgtgaacgagtaaacaggatgaagagccacaaatgaagagtttggtttcattgctattatgttttatttaattcttttaaattaaggtgaagtaatgctgttaactttgtatagaagaaaaagaagttaaattacaaaaaaaaaaaaaaggtaaattaacaaaatctattaaaccaaaaattccgttaaataacaacttataaaaataaaaatagagataaatttttaacaaacaatagagagctggtaaaaaataaaaataacatagaaaaatgtgcactattaaaaaaaaatcttttttttttgtctgaaaatttaacatggtatttttaaaaaacaaattggactttttatctgtagaaatctgttgatcgtagtgaccggaaaagttagggctgaaagagtgagccatggcccatgggggag

SEQ ID NO: 35569 - DNA, 1659 bp, Cannabis sativa
tttttttttttttttggaataaacagcttcttggtttaggtacgtaattctgtaataaataaataaatatataaaaaaaattcacatgtattttacattttgttgatagcatgaagattgctttgttacttctgctgagaaaagaaaaaactatgcttcttttttgtaactggctttccttttggcttttgtgcttactgtttataatgtgcagaatgtggagagagatcagactattggctgaatcaaaacctgtagttgcatccatgtctgatttggctgcaagtggaggctattacatggcaatggcagcaaataccattgttgcagaaaatttaaccttaactggttcaattggagttgtgacaggtgaatgccatttttgttccaactctaattagtagacaaaagaatatgatgactgctattatcctggaaaaagtatggaatatctgatcactttttttccttgtttattctattgactaaaaaattattatttgtttgtttgaaaaattgttttttatactagttgtcttactgatgtgatgagaaaagagtatcgatattaacattgtttgctggactcattaaatttgttttctcttttcttgtagggaaatttaaccttggaaacctttatgagaaaattggctttaacaaggagatcttatcaaggggaaaatatgctgaacttcttgctgctgaaaatcgacctttcaagtaattttcccatgttacctatttcaatatataatatgttatccagtataagtaaagaatgatcaagctttctatatggtgtaaatggaggaaaatagttagttcttttcgaattcattgcatgagatcaaatcggttgaaatcaaagaaaatttgtagtagagggaatggaaaaagatttaccagtattcttaacaaaagaggtaccaaattcctaattactctagaatacaagtggagggaaataattttcttcacttataatgagcaatcccagctggcacactcaatcactgactgccacattgaatttatgtactcccctcaatttggagcacatacgttgaacatgcccaacttgatagtcaatgaattaaaattagtaaaatggtaaggctttgtgagaatattgatgatcaaagacttgtagaactatgaagtaattaaattagcccttcatcactctttctttgataaagtgtctgaaattccaagcgcttggccctgccacaatctcctggaactttagcaatacttattgcaacatcttacacatgcctcgtagttttgaattttcaattcatcaagaagtctcctcaacaacatccctttgcatttgatgttagccacaactcgaaactcagcctccctactactctttcctgccactgattgtgtgctccttatccaagtaataagattctttctcttccaaaaagatacaatagctctaggtagatcttctgccagaaaaagaaccagctcaatctgcacatgagaagattacattctatttatcccttttatttgaaaagttaccattgcttggggtcatcttgtggtaggtacctaccgaggttcacttatgccaggtctgataagggaaccaataataggcaaagttagttttgtaggggggggggggggggggttttt

SEQ ID NO: 35570 - DNA, 1293 bp, Cannabis sativa
tttttttcatatggtatgtgtgtatatatgtgcaactatcatttatgtgtgctttttgtatatatttgcatatatatacatacatatgtggtcagagtgtgatttattataacttatatgatttggggaaaaagtaaatagtttcttgtcaaagtaaatcctttgattggcctattattgctctttacttggttttcagttttaaattattgatttagaaagaaaaaaaaaattagtgtcttgccgctcttgctattgtattgtcaggctatatgtatatgcaggctgacttgctttaacctcttgtttatccgcaggtcgagtattctggcgaaggctcaaatgcgcttagctaggttggatgaattgcggcaagcagctaaaagtgaggtagaaatgcgttatgagaaagagcgtgaaaagcttgactcaaaagtacaatcacgtgttcagcaggcagaggccaatagaatgcttatgcttaaggcttacagacaaagaagggctacgttaaaggagagatcatctcagtcattattgaggaagatggctcgggagaacaagtacaaggaatgtgtgcgagctgcaattcaccaaaagcgtgcagctgctgaaaagaagcgattgggtcttctggaagcagagaagaagagggcctgtgccagagtgttgcaggtgcatcgtgttgctaagtctgtctctcatcaacgtgagattgagaggcggagaatgagggatcagttggaagatcggctacaaagagtaataatttgttctactgtcaatctatatctgcattttatttgttgatactgtgttgcttgtgttatatgcatattttctaaaagttctctttctatgattatcaggcaattaggagacaaagagccgagtatttaaggcagagaggaagatcgttgaacggtattctgcacctactgttgccaggtcttcgtcgagcaaaggtttatcaattgagaaggtaataatacttacaaattctggtatttttttggggttgtatgttaaatttccaatttccaatttttaatgcatatatgttttatttttcaaatttcagggtcgtggtactcagctcaaagacattcctaatggtatgttttcattttttacctttatttaattgtatatattattattgtgaggtttattcttgaggattctgcaaagtcacaatgtgagaaacagaatttagctagacatttcctgtaacgtaatattaaataacaagactttgattggcctttccctggatttcaggatttgattagt

SEQ ID NO: 35571 - DNA, 3423 bp, Cannabis sativa
ttttatgttatttttacaattgagttgtatagttcttgatttatcttctattgtaataaaatctctaacataccaagaagtggtgcacaaaaatgttaaagtatagcatttgaagtatagtacttcaatcttattttgacattgtatgagaaacaggtatttttggcatagagatgtcaaagatatttcgtgtccataatattccacaacattattgttgaggatgaagagatgcatatgagggtatatttaattttatttatgataaacacccccatcgacagtccaatggttgaactatcacacagacgtcctagttattttttatttccaaagtatacttcaatatgaaaggctcaaatttatgaattatggcaaaacgttgtattggcaacaatattgcatattaaatatatttaataaaatctttttattgatgtaagttttattagtacactcatatttaaacatgcatccaaacaaacaaataaaaagtagagcatcagatcatctactctccattggtaaaacaacaccatgacctttattttattttattgtatactgatcgacataacatatattatattttaagtaagtacgagccactttccaaatccacttagtaatcgtatggcgatgatgaaatggtaggtttcggaatattattaacatggcaacacctaaaagtgacactagtcatctccatgtctcggccacattttgtgcacttcatctctttcagcatagtctttccatcctccttgagtggattcacaatggtgaggcatgggtcgtctgacagccgaggaaccataataaagatcttctcatggtattctttgaaagcaacttcaaaggtcttttcagtaatactctccttccatatgttgagctcctccactgccttgacgagggtttctcgtgatcctaccaccaacgtagtagaccctttgttaagcataaaccacccttttgcttgcttcaaagaattgagtctttggacttgttgtttagcatattccaccttataatacttttctactagggtttttgctccactccaaaactgctccacataactctcttcattaatgttaaaaagttcaatcttaatatttgtttccattctcatgtatctcattttgtcttgaatctctctgctccatgccatgtccgtaccaccatggataatgatgtaatcattgcgctctacctgtatattattaattagattcattaacatatatatcaaatatttttaattgtagtttcaaaattaaaataaaaagtttgaaataagatatattttgatcaatttgtgatatatatttagaagagggggtcttagttcgagaaagaccaatgcgctataataatatggcagtgtaaattagttattaacatgaattaaaacactaatagcaaatttcacatgcatatttttaatttaaattaaaatatattatatacaaatactaaattgcatcaatcatataacgagtcgtacctaaaatgttagctaggcagaaagtgagaagtaaacattataaattattcatttaatctaacttattttttatatatatggataactttttaatgaaaaattatttttaagtgtttagatgttattaaaaaaataatcttttgagaatatattaaaaattgtataaattaatttaaatttttagaaataacttttccaaaaaaatttttttttttgaaaatcatataacttatccaaaaataggactttaattaaaaatgatattttttttttccaaagactcttcaaagaattattttaatcttacaaataaaaaaaaaaagttacaaaagctaagctaaaccgggtcatttaatccatagcgtgtgagtgaaagtgaaaactttatatgcacgtacagagctataaaagcctgtattagtgtttttaatatttaattttagttaccatttaatagctgtttgtttttgtactattatattaagtagaaaaatactaagtggtaccttaaggtgctaagcactataagacgtggcgtattattattggtctattttaatatatattgggtcctaaatatttaaatttaataaatgatataaaaaatcactaatcaattattggttcttggttgttatagcaaatgctctgttaagtaagtatcgagaatcaactaattaagtctaacagctattatattacgtacttacccagctgctaaaagactgagaccgagcaatgaattcccttgaaaaaacagtgttgatccaagtcatttcatgtacaactctgtgctcagattctttgtcaaaaggaaaagcatccaatccccaaaggcgcatggagtagaaggcgttgatgttttggactctccctagggcaaggtccatcacaacgcaaatgggactggtctcgaatttccactcctccttgaggaacttaaggcttcctttgtgtaaagccaaactattcacagtgtaccattgaatgtccttcgacgcaagtagcctctgaaactctatctcttttctgtactgagttaattgatcatgagtctcatccacaatgggcacccaaacaatcgcatactgctcttccatcctctctctctttattttctcatattgaatgcgtttgagtatgttaatatcattggtagagatgtcgtatcgtcctactacccgtgaaaaaacaagcatcactgtcttcttcctcagcacatcaatctgaacctgtttcatcaattagccatggaaagttgtgatcatggacccatacattatagattaattgtttttttaattaaagtaatttcttagtgacaacttttatataattattataattaagagatcttattactaaaaagtagtttttttaatgagaattgatgaaatttcaaataagtaagctacatttaaagatttatatagaagggaagcagttgagaataaattataccgtacggaaataggcagagcaatcaatgagctgcacaccacggcttgaatctctagttgaaaacagacgactaagaaactcgatgctctccttattattttgacataatactttcaacagctcatagtaatctctctctacatctgaaatatatatatatcaaacacatattaaaagtaatataatatttatttccaacatatgtcacagtacatattttgtaatcttttcatatgtttaaatttattttttaatataataatataaataattatatttaataaaatgcttgctgacattcattattttataattatcgatatacaaacatatgcacacatacttgtttgtaagaacaatagaactcaaattgttaggtttaaatatatattaagagttgttcgttcatattgttcaaaaaatacaaaatatatattaagtgtttttttttt

SEQ ID NO: 35572 - DNA, 1746 bp, Cannabis sativa
ttactataaagataaatggtacttttaaaaattattaaaaaaatatatattttttaaaaaatatttttttatttggacccctaaaatgaataggccctatgagcaggcctagcccgcctatgtctagggtcggcccaccacttcctaagcttctccaatcagcacggagttaccctaaattgattacaatttcggttataagcgttacacatatgaccttaataaaaaaaaatagttgcaaaaatattttattttacgattttattacagtcgtactcttttttagctattaattaagtaccaattaagcccattaagtgttagctcagaaacacttagtgacatatttctttagcttatttaatatgtaatctaataatatgtcgccacttgtttcagagctaacacttaatgactaaaaaatagtacgactacaacaaaatcgtaagataagtaacttatgccgctacttttttaaattagaatcaatgtgtaataattataaatgttaaaagatttggccacaaatatcccttattattatcattattatttttaacaatagttcttattgcttattgtagtcatactttttacttttttttttttgaataatttacaatatcaatatcaaaattatagtaaggtacatacctatccataagttgttctctaggaggagttggaggaagagtagtagtagtgaatttgcctttccaatcaacctgcccaccaccatacttgttcaaccaatttctgaaagcaattattggagcatctgattttgttggcacaaaaaactctttatgccatggcccacgcccaacatccattatcctatgctcctatacattataattattaacaaaataccatgaatttatatccaatcattatttttatataattattacacaaaaattatttttatataattaatcacctcaacttgtaggagacttaaatctgaatcgaaaattatgtttgtgtccatatgagatatccaatttggaacaattttgtcccataatactccaaagttttttacacttgaccatatcactctgcatttcccaggactaactggtatacagctaaaaacaaagaccagcttcttctgctccaattaaaaacaaaacaaaaaatatatataaatagtcatatatagatatatataagttatatatgtatatatatatgtgtgtatatgttacctttggtccaagagagatatgagaataatacaaacaaggtgcaaaaaatttgttagttgctgcaggctctctttttccactaaatccatcatgggtaagattctccacaataatttctaaaggtatgcctccttctctatcagatgtacctatttcataaataaataatgtaattttacttatgtgtatctagaatgaactagttactagttaccctttaaagtaaccagttacctccttaaaataactagttatcttatcatatttttgtaaaattaaacatcataaaaaagaaaatttcaaaatacccttttttagtggagtctttattattccatagtgtgcataagtaacatgtgcagggtccataatattttccattaacacttcatacctgaaaattaaattattacaaagtgaaaaaaaaagggttattatgaaataaaatatatgttctatatagaaaaaattatatatatatatataggtggcattacccaattggaaaatctctatggccccatgcaatttt

SEQ ID NO: 35573 - DNA, 2108 bp, Cannabis sativa
taattggcactgattcacacattcaaggaaagcattattcccattatgtcttactcggtctctaattctctcttctttggctagtatgtcattgaaatctccaaataggacccacggattagtcctagacatctccttaagatccttccaaagactcttcctcccttcctctccattaaatccataaacaaaagtagcaaggaaggtatgtttatgatcagctgtagatactaaaagatgcacatattgacttgcacatcttaatatacttacagtgaaacttagaggattccatgctatgatgatcctccctcctttgtgccacactatattcgatgtgaaacaccaaccttgaaatatatttacatataaggttccaagctttggagccttaactcttgtctcgaggagaccaactaaaccaactccattccttgaaatgaagttcttcactgttttttgcttttgcgcactgttgatccctcagacgttccaagcaaggattttatccattagaaagaggaggctctccccctcctcctttgctatccagaatcatccctacttgttcttcaatctccttctcttcccttaaatctgtagttgtttctaattcatcaagagcttgataagaattagacgtttcagtattcttcccaggttccttactcttgactttccaaccatttgtgaccacttggaaaccatcagcctctgttttcagtttagcctctattttctgattatcctttttaaccacccactcatgttgcttaccctccttcctttgacactcactcatggaatgccccattcctttacaatgggagcaaatggtaggtttccattcataagtgaccaccactgatacattggatccaaactcatcttcaaagtaaatcaaatctgggaactcttgttgtacagagacttcaattagtactcttggatagcttagtttgtccctctcctttgtaacatcctccaccataatcggaacacctagctgtccaactatctcgaacaacgacttcttcccccaatatttcagttctagatcatccaattgaatccaattgggaacattgcttgtgtcttcctttttaaaatttgtattgggatcccaaggcttcattataaccggccttttgttgaaaaaagtataacccccattgagtatatcatctctatcctgaacattatgaaaccgaattaagaaaatcccatatgacaacattccaaccttatctattttttccttccataacctccttacaaatccatctatcacattcagaggagggtttgctcccaaaacatagcaaactagagcagaattccaaaaagaaatttcttcttctatatcttcaagagtaattttgaccttatcaactttcttagacttatcaaaagaggtttcaaggttccttaccacattatcagattggagaacggggaggagaaacttgcaatccctttcacagtgaatcagagcaagcttgatttgcagctaagaaaaaattgaaatcagccttgatgctttcctgcttcttgatcagctccagtgatgattttggcgaaaggcactcctgactggacccatattgacagtagaaaagatatcataaacttatcgttatatattttctaagtcaatgtcacttagttgatcttagatcaattgatctcaatcctgagattgttaagctttagcctaattgtagtattaaagttttttaacttgttcgttaccaacttacctgttggactagcccatacttaactcttaggaactcgctagtacaattgagtgggaacgttaaccatagatagggaatctatatatagtttctataactatttagaagtaaaacgataatttttttagatctttgccaaaaaaaataaatggaagagctcttatttcagtatttatattagttacctgaaatattatttataagaagtaagtgttttaaggataaaatacgttgataggtaaaatgataaatttgttcgttcgatgtaaatcaactatagaggatcaatgattatttaaatcgaaacaatggataattcatagcgtatcaatattagatatatagagc

SEQ ID NO: 35574 - DNA, 1639 bp, Cannabis sativa
ttgcttcacttttgatatcatccatatctggacttgctactaacatatcattaacataaagtagcaaaacgatatagctggacctatatcttttgaaatagcagcagtggtcagcattgcacttacggaagccttctttgtgcataaaactgtcaaactttttgtaccattgccttggggcttgttttaagccatacaaacttttcttaagtttacataccatattcttcttcccattctttgaaaaaccttctggttgatgcatgtatatctcctcatccaagtctccatgaagaaatacgatcttcacgtctaattgttaaagatgaagattttcaatggcaacaatactcaacatgatctaatagtattgagcttcacaacaggagcaaaaatctcagaatagtcaactccttccttctgctgaaaatcctttgactactaatcaggctttatatctcttagagccatcatgctctttctttacccggtacacccatttgttgtgaagtgccttcttacccataggtaattcaactacttcccatgtctggttggaaattaaagacttcatctcatctttcatggaaagctcccacttgcttgcatcactagtctgacatgcttcatcataacatttaggctctccttcatcagtcaacaacaaatagttcatatatctcttgttaggcacatgaggccgagaagaccttctcaatacaggagctggggtaggaggtaatgttgcgtcagactgttgcataccgctttgtccaacaagttcctcttgctgaggacttgtctcaatcgactctgtcatagaactatctgtcataatctccatctataaatattggcccactacattctaagtctttagcgtcaattttgtgtttgtccttgtaaatcactttttcgttgaaaatcacatctctactacgaatgacctttttattttcatcattccaaatacggtagccaaactcatccccaccatagccaatggtagtgcatttcttacatttagaatcaagcttattcctaccttgatcactaatatgcacataagctacataaccaaaaacttttagatgtgataggtttatctcttttccactccatacctcctctggtattttgtactctagtgaacttgacgggcctcgattaatcaagtaagctgctgcattgactacttcagcccagaactgctttggtaaacctgaatgtaaacacatgcttctggctctttctgtcaacgttcagttcatacgctcagcaacaccattgtgttgaggtgtgccaggcacggttctctccattctgataatgtgctcatagcaaaacttcttgaatgtgttctcttcatattcgccaccattgtcggttatgaactttttaatcttcaaacctgtctcattttcaaccatagctttccttctcttgaaagcctcaaacacttcatatttatgcttcagaaagtaaacccataccttccgagaatgatcatcgataaaagtcaagtagtgtttcccaccaatggatgaagtagtcgttggtccccaaacatcagagtgaacaagctctaatctttccttctttggggttctactacttgtctgaaagcttaccctctttt

SEQ ID NO: 35575 - DNA, 1922 bp, Cannabis sativa
ctccatacttcttcggaaggcaaaatttttcccaaacggacaagtgcatcttgctacggttaccttttgacccctagagaaagtccctacaacacttgtcaatagctgcagtgatattctggggaagaataaacaagctcatctagaagctcctaattcccaacggaactgagtgaatcacttgcgccctttaaacaaaggaaaagtttctactagcctagttgtgcaacttcttgtggatcttatcaataataattccgcaatcagtggcacgccacttagtcggcctaagttggactcccaaatagttaagggggaagttgtcctcttctatttgcatcatcctcaagattctttctttgtctatctcattcactccaccaaaataagctagagatttgtttttgttagctttaaggcccgtagtttcactaaaagtcttaaaagcttcatgaacatgtctcaccgagctttcatttcctttacaaaaaataatcaagtcattcgcaaagcaaagattcacaagttttaaggacttacagagagggtgaaacccaaagcctttcaagcaggctctctgaatcaacagtcttgtcaagtattccatggtgagcacaaagagaagcgaagacattggatccccttggcgaagacctttctcccctttaaaggacccatggaagcgaccattcatcattatggaataggaagcaccatggaggcaacctaaaacccaatcaatgaacttaacaggaaaacaaaagtcctttaaaagatcagaaataaatttccaatcaacagtgtcatacgccttgttgagatcaatcttgaagatacttctagctgaaaccgtctacctagtgtaacctttaagaagatcttaaaagattaagatattacgggccagctgcctattcttagtaaaggctccctggttatcatgaatcaggctaggaagcacttctgagagccgagcacagatcatcttagagatacacttgtaaagggtattgcagaaggcgatcgacctatagtcactcgcattcttaggattgtcaatcttggggataagggaaatagtagtctcattgagttcttttggcaggtttccaaattgaaagaatcccagaacggcttgagaaatatcccctccaatttcatttcacaaccctttgaaaaaacctgaaccaaaaccatccggactcgggctcttggtggagtggatattgaataatgctttcttgacatctgacttactgaaaggccgaatcaaatggatttgttgaggaaggtctagcttgttcccaaaccctagacgttcctcatctatccttctagtagctaagcttttcttccccataaaattacaaaaatattgaagaaagtgatcaaccactttgggatagtcctcaacaatagagtcccccttccagtacaatacaatctcgttttctgcttttctcttcttcatgatggcagcatgaatgtagctagagttctcatattttttttattctatttgatttgttatatttttaaaacacttaatttaaaaatttatatttatattttttaaactttgtataccctaaattttcatctacgcctttatatttacatttgttttttcctattaattttttccatctatttttcactctttttttgttaattttttttttacctcgtgcaccttatttctcttttaattttctatcattttgtttaatttcttcttgtttttcctttccatttactttttatttatctcattttggtacttcattttttctttctttcttagtgtttcttttgcttcattttttgtctctattttttctaacatgatagtaatatctatttgttaataataatttaaggattttaggttctgttgaccgagattttcggcaactaataaa

SEQ ID NO: 35576 - DNA, 1368 bp, Cannabis sativa
atcgaatggggattgttacaagccatgttaaggaatatgggttttagtgagcattgaattatgttggtgatgaagtgtgttacttcggtcttgtataaaattatcgcaggtggtcaagagattgggtcgattatcccagctagaggattgtgacaaggcgatccattatcaccttatcttttcattctgtgtgcagaaggcctctcggaattgattaaaggctatgatcgattggggaaaattcgtggatgtaaggttgcttggggtgcaccaatcgtttcacacatgttctttgcagatgatacatatgtattttgtaaggctaatgaagattctgctagcaatgtcatggatttgctgaagtggtttcagctggcttcggatcagcaaattaatgtgcaaaagtcatccatttttttcagcacaaatacaagtactgcagagcgtgctagaatctgctcaaatatggggattagtaaagctagggataatagtacctacttggggctgccgaatattatgggtagaaacaagataactttgcttgttttttcaaaggagaaattgaggaagaaggttcaaagttgggaaggtaattgctctctaaagcaggcaagaaattgttaatcaaaacagtagctcaatcactccctagctatgaaatgaatgttttcttgttaactgaggagatatgtaatgagatggagcaattgatgtgtaatttttggtggcaatcatcttctaagaacagtaaaggcatacattggaaaagatgagattgcttgacaatacataaattgaaaggagttatggggtttagaagtcttagagattataatatcagtttgctaagcaaagaaggctggcggctcctatgtcaacttgactctttggtggaaagaatttttaaggcacactacactatcctaaaggtgactttttgactgcaaaattgggttgcaaccaagttttgtgtggtgtagtatacttaaggctcaagatgtagttcgaaaaggagcttggtgtagaatcaaggatggttccacagtcagtattttgctagaccattggttgccaaatgaggaaaatccaaaatttacatctacacatcctgcccttgttaagcagcaagtcacaacattgatgttgactggacagatggcttgagatatagacttggtttgtgatttgcttaatgatcgggatgctgagttagttgtaagcatttcgctaaattcaagtcgatatagtgatgtttggtattggcggttggaaacttcagaccatcactctgttaaaagcacttataaatacttgcaggagagcaaagaagatgaattgcagcttgttagtgttggtttttggagc

SEQ ID NO: 35577 - DNA, 1520 bp, Cannabis sativa
atctcaccactgtttctaaaccctcaacaatcatataaacatcttatatataatcctaaccctaatataaccctagatcaacaacttaaaattttaaaaaatatatatacatacataacaaatacgtatattcaatactaatttagataataattataataataataataaaaaaaactaaacaatatgctataatatatttactcatattattttattattaataatatatttataataatatttacaaataattaaatattaaattatctctaataatttaattatttatctagcattatacacaccctcaaaataaaataaaaaataaataaaaaaaatttactgtcactaaaaaaaatctcaaactctactaaactaataaatattcaaaatgataaattatctttcattagcaaaccaaataaactaaacataaaaaaaaaaaaatcaaaaaaaaaaaaaattaattatccttcaagaaagcggatattacagcttgcccctctctcttttggccccttccctgttcttgaccgtgtgggaacagctgcctaccgcctccaattaccaccggactcacgaatccatttgttgtgccatgtgtcgatgttgtgtgctacgttgggcacccatcagcaagcttccattctgcctcctaggttgacagctaagctcgaatggaccttagaacccgagtgagtgttggatgttcgtccaggcactcgaaaaattcagcctcaagctctaatttagtggcttaacttgccagcatttgaggcaacatgggaagacttcagcaccattcaagagaagtttcctcattttcaccttgtggacaaggtgcgtctttgggcgggcagtattactgaaggaaaacaaaaaaaaatgccagcagctgattcagctgggaaaaatgggcagcagtaagtttgttagtaattggttattggggttgggtatttgtgtagctaaggtgaagctcttgaagtgaggcttattgtgagaataaatagtgagtggaatctatttttgcgagtgtggcgaattttagtaattgtaatcctgtgggagagaatcaagctctcgaagtcttggctaaatcaataccagcaactattcacccttttccatcttatttctattgcttaacctggctatcatttgagtttaatctatcacaaaccaacttatcagctagctgaacagagtacaagaagttcatccaaaggcagatcagctgaatacaaacctgagcttctaaaggttgttggctgatactgatagtgagacaaaattttctccatctaaatccagcctggatagttccatgaagtagatcacaaaattagagctgtatatacttgagttgtttgagagacagcaataataaattgtgaagcagataatattctcaaaaaaaaaataataataataaaacaagtcaccaagaaaaagagaaactatcaaatgatggaatttgtaaccacacaaaattcacataataagaataaaacttt

SEQ ID NO: 35578 - DNA, 1505 bp, Cannabis sativa
taggataaattatagaaaattatcatggaaggtttgcttcttttttaaactgacgcaaaaacaaaatttatttttttaaaaaaaatttctattagcatcgggtattttattagtgataaatgtgtaaccgacgctaattaataattttttgcgtcagtttgaaaacaacgccctaatgttcttctatactattcacgtcggtcaacccagtgaacagtatcgttgagcgacatgaatagtactttttgtagtagtgttgttaagtataaaaagtaggataaaaggtctcatttcttgtagtgaaataaatgtatatataccttatgagaaagagagagcaccaaggctgagggtagcagtggtggctgggtcgccgatggtgggtggtgggttgtggtggttttcgtcaaattggagaagaagagagtgagagatcgagagagagagggaggaggagtacaagaatgagagagagaaagagaaattcaggtggtggtgggtgctagtttttgtcgaatgggagaaggagagagcgagtgatcaagtgagagacggtgagaaccgagagagagaaaattggtattcatcattcgtgcgtggtggttttcatcgagaaaatagggtttggggttcggagtttggggtttcctgcaaagagagagagtagctagggtggcttagggtttttgttgtgtaaaatgatgaaggaatagctattgggggttatattatgctcagggtatacgcaacggtttataactgttgcctatactaaaccgtgcctcatatatagtacaggcgacgatttgaaaccgtcacatataccccccattaaaattcacattatactcttaaaaccgttaggaatacccaatttttccttaccgcttaaaatattcatttaaattattagcgacagtcacccaaaaaaacattttgaggaccgtcgctaatttcccctttttatatatatctacaactgacatatatctacaaatatgggtacaaatatgcctaaaatatatttgctggtatctcggtgcaactctatgtaaaacttatcgataccctaatatgttattctaatggaaactgtcatgcaagataaacatgtattcatatatacaattattatactaatcttacttcaatttcaaattttaggttcaaatttaggtgtgccagtcaacttaaagaatttgaggatcaacacttttccccgagttcataagtgtaatttcaaatgctcctgtgaattattgtgtgatggacctcataagaggcgtgggtgtgagcctcttggtagagatgctcttggcgacatggcagaagttgttcttgaggcctctttgttgagtgggtcatatgagtgagatagttcccaataggattgtatctaagtactaattaatttaactcttggttccatttggcaattaaaaattagattctcaaagtaagtaatctaagaaagaattaaataacaacacaataaacaatacatt

SEQ ID NO: 35579 - DNA, 2840 bp, Cannabis sativa
tgcatgcacgttgtttttcgtgcaggaaagatcactggggatacgatacgtctttatccccttttacggattggaagggttacttgaaatctatcttactcctcgtgatgtttttccctttgattctttcaagcgaagtctaagcttaaatttttgtacaacttcagccttccctcccaaaagctgaagtttgttacataaaaattcaacatgactcttgcatgcacgtttttttttcgtacaggaaagatcactgggcgtacgatgagtcctcaacccaccttcccggattgaaaggactacttgaagtctatcctactccttgtgatgcttttccctttgactctttcaagcaaagtctaagcttgatttttatacaacttcagccttcctccctggaagtcgaagcttgttacagaaaaattcaacatgactcttgtatgcacgctatttttcgtgcaggaaaggttactgggggtatgatacgtcttcaaccctccttcccggatttggattgactgcttgaagtctatcctactccacataatgctttcttattggccttctcaggcagagtttaagcttgagcttatagacgactttagccttccttcttggaagccgaagtctgcctcacaaaaatttagcataactcccaaaaattcagcaatactttaccctttggtgttcacaggaaaattcaatatcccagctcgtgtgcgctttccgcctttcttagtgaaacccaaaagcttgctgccacaaggttcgacatgatttttgttgaaacaaacctctacacaagaaagattatttaagggcgtaggcctagctttcccctgggaaactaatgcccccccacgctataaatagccgagaatctcccttacggggtttgcaccgtgaaaagggttgttggaacatacaatgagttctcgcctagaactcttggtttcccttcctggaagtcgaagggtatgcccgacactccccttgggaaattggagagaaacacaagtcagactcaaagtaaatgattgagaattcgagccccaaagttcttagctcattttcagttatgatatatccgattgccgacaactacaacaccctacttccatctgcccaaatcattcagcctaacatacaacaaaaatagggaacgcactcgaccagagcctccccgagagggatacgcttgagttcttccctcaaaagctaagctcaagagtgaacccaaagataagaagcacattcggccaaaaaatttcaaaaaattgaaaagatgcgcctgaatcccttcttacacatctccatgagcttcatgtagagtttaccccaacaagttgcataaaaggctaaattgaaaaactggcaaggacggaagtaagggaaagcctgaagtctatagaaatcacaggcaatgccctcgggacttcaccttgtgagaagacaaaacccgaaggaggataatggaagaccttgtttcacaaataggggccacctcctagctagctccaaatagacaaccttttgggaagcgaccaaaagaaccttgaggccccgagaaaggatgagtcaaactaaaaagtggtccctggattgaccaagaggcaattaagactaaatggaaagaaggttgaaacaatggtcgttagaaccagatttttcggataatacaattaatccctaaataatctaacataacaagtctctgagaaaggaacaacaaaaaaatatcttattcaactactaaacaaccccccgcggccagggaaaatttaattgtctccacggctgaaaagtgtagttaagggaagggatatacaaagaaaacaaaaacaaaaacaaacaatgagaagaggcctaatgaagcctaagttttggcactgtctggttgagtagaagagctcgccccagacatccgttccacggtctccctatagagatcatcaacagctctcagactccgtatgagataggcctgttgcacactttccctctccaactactggttctcttgccatagatcccccaatctcaaacctgtcctcagtaagcttggccaaaagggtctcattggtggcacgcagatcgtggtcctcccccagtaaggccacctgccagaatggacaaaaagtatcaaaataggggcccaatgaaaaaaatgataaagaagagtgagcaaaagtacaatgccttaccccaatttcctattgtttggtagtgtgggccagcgcgaaggcgtccatgttgctggaagaggcccaggtctccatgggcagaagggagtagcctctcgccctagcttgaaggccatctacttctctaaggcttcaactttcacaatctgccctatcgggggcatagcatgtatgttgtccgcaatctcggccttacaaactgccaacattacggccgccctccgaggaacctacaacttctcagtctctaaacgcccttttagggccctacttatttccttctccctctgtatattgaaagggtcgacaggaatcaccttcctagggaaggcgaaccctactgaaggcactcttggcaaggctaaagggagagacctaggctggcccaactcaagttaagaattgggaggctagaggtgggtccccattccagagattgacatctcgagcctttacttatttttagctgaaccgccacctgatgcatcagaagagctgattctttccatcgtaggccctgtatacctacaagaagtcaataaaatagcgtgacgagtcaacacaatgcatgaccccaggatcctcaaaaacggtagatacataacaaaggttctgaaggcaaattcaccctcacca

SEQ ID NO: 35580 - DNA, 1113 bp, Cannabis sativa
attggatccaaaatatgaaatccgcacttagtgcaaattggatgttgtttgaccaaaaaagtacagattgaatcagatgaacacccctatgataaactataagctatctaaatgaaaattatatatttatgagttgttaaactaaaaatatagttttttttttctctttttcaaacaaattattttatgagtaaaattaaaaaaaaaaaaaaagttgaaaatgtagaaaaataggataaggatcctagtaaccctaatgagataattggttatcttatactgtctttttcatattttttcccacgaataattttttttgaaaaaaaattatatttatgtagactctgcataaagaaccgttaaaataaaattctttataggtccaattttaatttaagaaaatttacacaatacactaacaattagattttttttacatttctacatattcttttgtttttgtttttgtttttgttttttttttacaatttgtggattttgtttttttataagtttttttttattttttttaagaaaaagacgttattttcacgttactctcccgtagcaataacgtgaaaacaatagaaaaacactctatatttttgtgaaaacaaaattaaaatcttgaacaaatataaaaaaaaaaactggaatcagtaaaaatgtatttttttttttttgaattattttatggatatgtgaaataatctctttaatttttctcctaaaatccccaaatacttaggtcaggccctgcttgcccctagtgttgtgagtgctattgtatgggcagatacacctccttagtaagagcactcacaacaacttttttaagatagaaaagctataaaaaaattaaagaatgtattaaaaacaagttacaacaaatgctctaaactccttcattttaaagtttctttaaaatacactattcatgctttacatttataaaatactattcattgctctaaacatattaattgttttgggttttaattagagttaaaaatcgggcgggttgaccgattttcgggttcaaaaacttgtactcgaactcggcccgtgaaatggtttcaggttcacggatttcaagctcgtgggttcacgggt

SEQ ID NO: 35581 - DNA, 1939 bp, Cannabis sativa
attttcgtcagtacaggctccgttttaaatttattaaaaaaagatttagaaataactgatactacatattttcgtgcagaccaaatgatctagaatgtgggtcttatacgtgtcctgtttaagatagtaacagagtctgtactgatgaaactggaagaaaattgcagttttataaatattgggtacttatgccgcttacaaacctaaaactttaggtacttatgtcactatttaccctatttattttatatgtaatatttcattttacatattaataatgtaagactaactctaatagaaagtaaagagaagagaaaaattacaactctttctttctcttatgaacgtactcttcacatctcattgtccaaccaatatgtatattcaatagttttttttttgggaaattctttctcacacgcaattataatgttaaaacaataatagagtctgtatatagaatagggacgaccttaggtataagtggactaagttcgtacttagggttcactcattttaggggcccaaataataaaaattatcttttaaaaatatacataattttttaataaattttaaaaataccatttatctttatagtaaggctccaaatattttttttgcttatggtccatttcaatttagggccggccctggcataaaattggataaaagttacattttactaatatttggtacttatactactgaaaaaaagtttataatatttacaaacttaaaactttaagtacttgttatatgtgtgctaacaaaaataaataaatataaatactgagaatataaaatatttcttttttcaatgaaatatataaaatttgaacccattcgctctgtcatttgtcttttttttttttttatgtgaatcgttttataataagtaatgttacttcaataaataaatgagaaaaagaattcattcgtatactctttagctcatttgatacactattatatattgtattagtattatttcataaatactatctattatgtaaattataatttctttacaataaattcaacccgaccccgatgatggcttagactctaaactagacccataccacaatttagacctggggagacactagacccgaaacatgccccaaacccggactcgaacccggacggctgggtccaagtttggagtcgagttcgagtttgggtatgggttcgaggtctggatcaaaattcgagtttgggtccagattcgggatcggggttgggatttagagtttgggtcaaggttggtgttggggtccgaggtccgggtctaaattcgagttcagggtccaagtctaggtctggatcgggatctaggtctatgtatgggtccgaatctgaagtctggggctggcatcagggttgaccccagaccttttataaacattataatacaataaattaatacatgttatttattatgtattaaataatacaactcatattgtattaaaatttatggacgtaataattaatacaatataatatcttatctaaatacaatattatttattattaaatacaatatgattcttatataatctgaatatatattgtgtatcaatgtgttaaactctaagttcaactatacctttcacaattgaaaattgtcaataaaaactcttaactaaaataataaatatattttgttttgataatgatattgaatttgataaggtccaacacaactctacagccaatatctagttttgttttgaaaatgatatttgaaattattaagattctgaatctaaaaactttttaactttaatgagattcactttcttaacaatctttataaataagaaattaataaaacaaaataaagatacttattagtaactagagcttgaacaatatttaaacttgaagaaacaaataacttttaaataaataaaccattatcttcacatta

SEQ ID NO: 35582 - DNA, 1833 bp, Cannabis sativa
ttaagtattagattcatgcccaattctgccatggattcaactagctccgattcagaaaacaacacattatctctcttgtctgtatcggccacttccaatctagcttgctctgtaactagttcatgaggcgctgaatcacctttaactccatcctcctcttgccaaagctccttgatatgacataaaatatcttcattttcttctgctacttcttcatcttcttctacatcttcttcttcgtcttcctcttcagtacaagaaccatcttcctcttccgaattgtcatcttctgagctgattttgttgattgcttccacacttagttcttcatccttgtccaactcctcaaagtgatcttccccacctatctgctccattacatcaacgctgccaggagaaatgaattttcgttttctaatgtatactttcagcatttttttgctaataatttcctccccaagtaaaactttttctgattcttgtaatactgaatttgaagtaagtcttcctgtagccatgaaatcttcccataaattaatagttgcatttttaaaatcctcccttctcttcggtcttactttcttgagaatgccttcaaaaatcgcatttaactcattcaagacagcctttgattgatctgctaagggcacccgaactgtccttttttccagaaatattgtatatgggcccaaatgtctgtaattaaggtgacccatgtcactgttcaacacctccaaacccaataaaggagcagccacaccaaccggcccactaacaagctgtccgaatccttcctttggccctaccccctccaaataattaatcttgggcctctccctagcattgattcggcccacctcagttacaatactattctggcccaatttaataaagatatcatcttcatatagctgccacatgtactttaaattaataaaagtgctaggtgtggacagcctgacacgtggcccttctagatccctcaccaacctcctaaaaatactatgaatagttatcattcccctagattcttgtgatttctttttgaaaataccaaccgcctccacaccattattctgcgcatgaaaatcagtctcgatagtctcaaaatcgtctctgcccattaaaagcttccctgaatgagctccggccaccatgatccccaaagctactgagttctccgattccgactcccctattttttctgaaaaaattgttgcagattctctcttgctctcgtcttcatttacgacccagatctcagcctcttggtgaacatcaggctcggctccaccatgaatctcaacactaccagccgctgccactatttcttcttcatccctaccatctccaaccttttcaactacctccactccatttactccattttttccctctaccgcaggctcattaccctccccaaacaccttgttgtgatcaaaatcttggtaccaacaagtaccaaaatatccatgaaacctataatttaaatcattaagcttgaacattttcaattccacccgtttaccatcgtgctctaggaccacatattctggtacaaaaccagaatcatcacccctcaactgaagtctcatatgcgagagcatgctagcttcagccgtgtctttatccacatccaagagaccaccacaacaatcaccaatctttctgaaaattttcatatgccaaaggttcagaggcaaaccttgtattccaatccaggaatccctacactccactttaatattttccttttgtgactcccaactccatggatgaaaagacactacagtttgtgcccctggcactctcatattttgagttttgattaat

SEQ ID NO: 35583 - DNA, 2582 bp, Cannabis sativa
ttttgggtagaaatgagtaatagtggaattgttttgtacaaattaatggagggtataaattttgatatggggtattttattagggtcaaatagtgaaatctccgtttaataattacgtaatagtttttaattagtctaagtcgttaaatttttactttttatttaaaaattaatttaaatatactaataaaaaaatagcatgtgaataatgacttaacacttaacgaatatgtatctaagaaagttctaaaatataacttaagtaatatttctgtcaaaaattaaatttatgtatttatatacaacagagaattaaatttaagtatttacgccacaaattacttaaaaattttatgaaaattacaaaagttgcatgtgttatatttctatagagtaatgcgaccaaattttgttatgttttgttaaattttttagacattttgaaagagaataagtctaaaaagagaagaaaagagaagaaatttgaagagtaattttctgttgattcataacataaaatccatgcttaacaaactaacaaaataactgaaaatggacaagtagctcatacagctcatacaacaaacataacaaaattttaattatgcttaactaactacactgtctcaacattctccctcaagcttagaattgaagcatcttcaattttgagtttttctctaagaacattgaacctgtcattggatacaacttttgtcaacccattggcaacttgatcaattacaaggacatgcttgattttaacaagctgttgaataactttctgtcgaacaaagtacttatccaattcaatgtgcttagttctagcatgaagtataaggtttacagtaaacaaagacctaagccatgacaatttagcaacaatattcgcaaggcttttgaactctacttctgtgcttgatcgagaaattgtgtgctgctttttacacgaccaagcaatgaggttcgaaccaaggtagatggtaaaaccaaaagttgatcttctgtcatcaggatctgcttcccaatccacatcacaaaaggctgtaagctcgagctgatttggatttcaaatatgcaaaccaaatttaattgtctcactgagacacctcaagattctcttcacagctatccaatgcacttgcaagggattctgcataaattgatagactttgtttacattaaatgaaatttcaggtctggtaatcacaagatactgaagatcttcaacaactgacctatgtaattgaacatctttcactgaatcagtttcataagcagggagcttgaggccattggtcataagggttgagcgagattcgcatcttagtttttcatcacaacaagtctctgaagtatttatcctgaggtagataaattgttgaaaacttattataccagaatctagatttactaacatgtatggtgattataattctataatataacatcctaaatatataattcctaaaataataaataagcacattagagattaaggaatccttacaatgatggcagtggaataagatgactcctttcatttagattatcaacccctgattctttttgttgtagagtatgatcaagatctaaacctgaattctccctctagtgacaattggactatatagtcttcctcactatgttgagtattgctttacataatttattaaaaaatattttattttggatgaattatattttaaaataattaaggaatttgttcatttatgcatttcaaagtactttttatttgtacggtaaaattagtataaattattaatatatggtactttacagtaaatgtcctaattgcaacccacacaactatttaaatcgcaatctaactcaatttgtaatctacaccgcaattcgcacagcaattcaaatcgcaacccaacttaattcacaatccacatcacaactcacacaatccaaatcgcaacctaagttaaaaaaatgtaaaaaaaaaaaaaagtgtaacttattgtacatgagataattctccaatatttttttttgactggaaaatattaactctattaaccaacaaattcagttaccaaacaaggtaacaaatcagtaggaacagactccatactgaatgtacgatcaagatacaaaatagctgacctagcaaagctatgggccactacattagcagattgtttaataaaaataacctcaacggtacacaactcagcaagcaaatttttacagctttgaatgacttgaccaaataaagaaatcatatgtatagaactacgcaatgcttgtaccaccccaagactatcgctctccacaatttcatgctcccactattgtctctttatccatgaaagagcttcctttatgttgattgcttccgccaagattggttcaaccgtgcccatcttataagttgttcgcccctcgatcaaccaacctttactatctctagccaccatactcgacccaaaagaacgcctgccatcaaacaaagctgtgtctacattaaccttaattctattatcaattggaggggaccaatgctctgcaccatcatgaacttgataatcagaacatgatgagccaagggt

SEQ ID NO: 35584 - DNA, 2001 bp, Cannabis sativa
aataataataataatgatgatgaatctgaaatagataatattaatgtacaattgtgtggtgcaaaacatataactgaatcttttattaaacgtggaagcaacgaaacgttagctaaatatctatactaattaaactgaaaaatttagatgcagtattagctaataacatgaatattaatactatcatatataatactttatatttaagtattcatattatacccatattacaatttacaaacccatgtggcaataagcatttctgcctataaagagcaccaacattttatatcagtacaaataaaaagacagaaatgaaaatgaagacaaattaattttggactgcgcatacaagattttgttcttttcctagctctctcataaatatttttaatgtaaagctccattaattttcataagcgtggaataaaaaattgcagaaatgactaggcttggtatatagagcaatttcgatctaatatcacgaaatgggaatgaattttattaaaccaagacactataaatccattaataatatgaaaaggacaaaacatagatggaaaactttgctggtcaaatagatctataatacatatccatattccctccactaactataacatagataccaactactataaatagtcatatccatcgacacatacaagatactacattctcataatacaaagcttcttattattattccttatatttttattcacatcatcatcatcatcataaaaattgttattagattctgttatagagtactgataacaatgaataaaacattaattatgatggtgttgattgtgtgcctaatttctcctttcgcaatggtgtcttataccgaggctcgtcttcttcagatgaggaacctaataaacagccaacatcttctgcatgagttgggttttgatcataccaaacttgagcattatagaaagtcagccattttggtgcctgacagaagatctccaggtggcccagatcctcagcatcactaagtattattattattattccaaatatatatatataatcttcaacgaagcctagctagctaatctcatgcaccaaatatatattaatatatatattatatatgagttcatttgtagaactagggtacagaaaagttatctatttttcttagttttggtcaactttttaattatgtggagaactttcatacattatattgaaatatagaaacaaaaaagtttggtataagctatctggaaagtggactatagtcgctctcatttttgcacttaataaacttttagtatataattacttttactttcatgtaattttatttttccatgcaattatgtataatttctgtctgtaaggatatgtacgtcttgtgataatatatatatatattgaagtcaattcatgactattttcttaatatatattactctctgttgagttttaatatggtagccaaaactatatttatatccagttttgtacaatgcatataattcacaatgatttaagctcttataaagattataaatatatctaaattaattaatcgactaataattattattgtttggtcaggtactgttgaatctattatggttattatacaataaatcattttccgatcgaacataatgtttagttataatcacgtgtacatgatgaaactacacgtacgagttatctacatgtctttttaaaagtggatcaagacgaattcttatgtatatcttattagaagaatcttctttatttttttttttatatattttaataaaatacggtttctgcttttctaaaatataaagcagatttgtttttccttctcttccattttataggacactgcaatcatctcaaaattattatattcatttatttatacataacaagattcagaaaaacatcatcatcaagctctggcgtacctaattaatctgttaatacatatataatatatgtctacatcttttacaatgtcatctcttcttttagtgt

SEQ ID NO: 35585 - DNA, 2928 bp, Cannabis sativa
  modified_base (49)..(51): a, c, t, g, unknown or other
  modified_base (459)..(476): a, c, t, g, unknown or other
ttgacatttatagggttgaaattgtaaaaagtggtatttgtgaaaaatnnntaaaatagttgagaaaaataacaaaaccaaaactattgtggggcccattaagtggccggccatcaaaggggttttttcactctatttttgtcattttttaattcaaaataaatcaaccctaaccctatggaaattagcataaaaggatagctattgtctcatatccaactaatgcctccaaagctaaaaaatctagtttttatctctaggtttgatgagacctattccttcttcttctttctcttgaattttcgaaataccatagtcattcttcacaaaccaaaattcagtcatttagtgattgagtgcatacccacacataacaagctggtcatcaatcatagtgtgtaagactatgaaaaatccaaacacaaggaaggagttttaggctcagatcttggtgatacnnnnnnnnnnnnnnnnnncaagggttagaaatctgagcggaatgagtcattttattctgctgcaactactgtaaggtttctcataccttttatatgtttatttttgttgttttagaaattcatattaggatgttaaaaacatatttgttagtaaatctagatcctggtaaaatatattttaacaattttaatatcatactcttaaatattataacagagcaaatgaaatgcaaatgtaaaataagtgtaagactcaaattattaccatcaatatattttacattaaagaagtgaataaattgcatggatcccacttggtcttggtggagaaatatatgcatttgttctaccaagtatattgtaattattttagcaaaaaagtatattgtaattatttcatcacttacaaatatgatgcaattctgaaaagtttgttccttgatcgtccactgtcttttaaaataaaataaataaggaatgttcctaataatactcatcaatcttaacttattaatttgttcaagataaatgatttaaatataatatcaacagccctacaaaaaatatatcaatatagatacaaataatatgacaacgtggctaatctcttcattcaagacaaatacaacagacaagtgcactaaaactatttaaaggctcacttatttcttcaggagggactcttattctaatgtgtgttatttttgttaaataatttgcgattaaagtgattcattttttttttcgaggagctctcatcctaaagctgattgtgctattagtagaaattttatcactgctaattaattatccttcttttgaaagacctttattgaataaaatttatctctttttaaaaatactatttaattacatataatcacaagtacatatatattaaaaaaattaaattaatatataaaaattaagtccaaccaaactttcatgtttatgttgagttgagattagaagtggcttatccagacatcattatgtttatgtttttatttactagagtagaaaagtgagagcatctccaaagatgtttctctaactatactcattagttaaaataaaataaagaatgagacttaaaaaaatgagctctaacaatataaaaaatgactttctataatagaaaatgatagggagctctctaaatgtaggaaatttcttatgtttttgctaccacttttaatagtattttaattaaaaatactattattttttttattattttataaatttaatttatatttgataaattcaaattataaaataataaaataattaaataggaactaaaataggaagcacgatctattcaaaaaaaaaaaaaaatagaaagcatgattgaagcaacaacaataaaaatgactctttattttcactttttagttattttagttaaaaaaaatagagagtaccattgaagatcctctaagaaaatataaaagaaatgagagaaaagctactagaagagataaaattgagttgtttgataataaataaaagaataattagcaatttcccctttgaacttttgaccctattgatttatctcctaaaatatatggcttgttaaaaatctctttgatcttttacatttacagaaatttagtcattttattaggttttgtcccattatttattttaaatgttgaggtgtctttgtaaattaacaattttacctcttaaacttaaataactatcaaatcgtaccccttcaaataaaaaaatatcaatattttttatagtaaatcttaaaagttaatttagattttaaaaaaatcgttttgaatgactaagaaaataaaaaaaaaataaaactaattaaatgatttgaaaaattaattatttttattaaaaaatcaattcaattataaaaaagtatattaaaaatttaatttttgtaagaaaactaaattttacgggaacaagttcatgtctactttttaggggtgtttgaggtgcggacagtgtggattttggctatttattgaaccaaatcgcaaatgcaattttataatttttcaaaccgcgaccgcaccacaaaatctcaaaactgcgaaaataataccataaaaatacagtgcagtatgaataatttatactatcatcaaataaataaataaacaatatattaaagtttaaccaacacaataaaaatacacatattaaaattttaataacacaccattttaaaatacaacaaaattcaaaataatacatatacaatcttttaggacataaaataatcaaaaaaaaaaaactgaaaaagaatatttaatgctttaaatccatgtcaattattatatatatacataaatttttgtggggatttaaaaaaaaaagaaacataaatattttagaacatacaaaacaaaattaaaagatacgtgttgcccctgatttcgcccaatatacgtggaccaatcggacagggacacgtggatcaaacaatttataa

SEQ ID NO: 35586 - DNA, 1121 bp, Cannabis sativa
tagatgccgaaacaagtagggatgcatcagtacatctcttttaaggaggtgcattgtagaatcaccttaacttttatatttgtgatgtaactattgatttttttttttgttaattaatattaaatagtttagattttttagaaaatctacacaatctaaatttaaacaacaagtgtgtgaaaattcaaatttgctttgattaatttaataaaagatgtgtgtaccatattttataggccaaattggtagtaaacaataggaaatttaaaaaaatatgcataaaatactttaaacaaatttccctaaactaatacattttaaaattttaaaaataagatcactttacaataaacccaaaaatacctctctcattttcaaacctcaactctctctctcttcctctatctctctcggttgttctctcaccatctcaccctcaccaaatcaccaaaccatcaccaccgagcacaaaatcaccacctacccagaccaccgaccactgactaccgtgagacgcgactccaaccttctttttttttttttattttcgttggatgtgatttgggcaaaatctgggtttggagtttggttttgtcgggcccgatgcagcccgatgcaggcccgatgccggttcgatggtaacacaaaaaaattgaggaagacaaaggcccgatagtgggcccgatgcatgtgtaaaaaaatagaatttaaatggctcgatgggtccgatggcccgatagtgggctcgatggagtccgattgcatgtgtaaaaaaatagaatttgatatggtccaatgggacccgatggtcgacagtgtagtgaaataaagagagaaaaaaagggggtaatgtaaatagagattattttagaaatattataaaatgtattatatctcacaaatattaaatattacgagtttagttaaaaaaatttaagaatatgtaagtataaaaaattaaattttcctaaacaattaaatgtagacacatatatttaataaatataaatatttaatatatattatatacataggtgtgtggggcatggcataggacaaatctcatatgggcaaagtagtgaaaagtgctacaaaacaaaacatgaagactccacttcact

SEQ ID NO: 35587 - DNA, 1667 bp, Cannabis sativa
  modified_base (267)..(282): a, c, t, g, unknown or other
gctgacctgatggctcgctaataaagaactactggaacgttgaacatttgcgaccctactatcaataaataaatgatgtaactcgcataactgatgtaagctttaaaattcagttatgaatagagagaatgatttatattaagtaattacaaagtttcattctttaaattacttaagaggcatttatgtatgacaaaccagaattcatttcgaaaatacattgtataatgcaaactccccatttcaaattttttttttttgaaattnnnnnnnnnnnnnnnnaacctctttgacgaaagtggagtcgaaccgttataactacttgaccaaacctttttcacaagaaaggggtcgaatcattataacaacttgatcaaaactttttgacaaagaagggattaaacaactataattttttatttataacctatcttatgggagaggaaaatcaaaagttataactcgcatataaaattgagtactaacggttctcgcgagctaagaaagtactaaacgaggcatcatgatgccttaatcaaagtacttaaacttagaaaatggatagataatttaactattcatgtgagcaaattaaaaatatacaaagtgataaaatccttaaagtatatttaagtttgcaaggtagattataactgcaattgcaaggtagaattgaccaccgctcaaaaatcataaagtttggtagattactaactacttaaacaagaagattacaagcaatgaaaaaacgcaaaagtactgtatatttgatcaaaatatagttgtttacattgtgaataataatgcaagaaaacataattgtattatttcgaatgaacacagtacaagacatttaagataagaaaaacctaagactggttacaaacttgttcttacaaaaatgccactaggagcaaatcattaagtcattctcctaagcaaatgatgagaggggaagtcgatgaacatgagaaagaccgtctgcatatagcttgaaaaagaccgtctacacgttgctcggacaaagacagactacacatagattgagaaagatcggctacacgatgagagccttgatctctgcacaagcctcattcccctcatcatcaaaagatcccatttcctaaagtcgagatctatttcctagccttaggatatttctcaacattggagagaggttgacgcaaagatctcctggcacaggttagggtcttgggttggctggattctctgatagaaaccacaccaacttccttcccagatccacctgaaaccatgcaaatcttcctttggaattcttcaccagtctaaggaggatctttgagatcactcacaagatctataccctctaggatcacttgtgagggccggccatggcaggccatggggttcccctggttaggataggttggaagctcctgagccctagaatccatcatttctggctccggttgaggattgaagtctgtaggaacgaatggaaattggttggtgcatctggatattatgactctggaaggataaacttctgcactcagaagagacatttttgcagaaaggaagtaatccattttgaaaatggatttcactaaaaagccagaagggttgtgaaaaatgacaagcttgagctgcccttttatactcgaagttcagtgacaagaaagcca

SEQ ID NO: 35588 - DNA, 1241 bp, Cannabis sativa
agaaaagaatcagtaaatatgatatacctgttggaatcaccacctcctcgacaagaagtgttcagaatcaaggagataccatatgaagagaaacaagatctggatctgaggatcctcgattataccaacaccgcacaagctacagaggatacaattgaggtaccaatcaatccttctgatcataataaagttttgaaaatctattccaaactaacctttcgacagcaagaaaaacttatcacttttctcaagccaaatctggatgtttccgcatggaaacattcagatatggtcgggatatcatttcaggtcatgtgtcatcgactgaacattgacctcgaagtgcgaggtgtctgacaaaagcacagcaaaatggaccccgcgaggtaccaagcgcttaaagtggaagtagatcgccttttggcatgtggcttcataagggagtcattctacccaaacttgttagcaaatctcgtattagtgcccaagcccaatggctcatggcgcacatgcattgatttcactgatttaaataaagcatgtccaaaggacaagcattgaccaacttgttgatgctaccgcaggacatgagctttttacctttatggatgcatactcgggatataaccagattttgatgtatgcacgagatcaggagcatacctcttttaatataggtcgaggtttgtattgttataatgtaatgcattttggtttaataagcgcaggagcgacgtatcagaggctggtaaacatggtgtttgcagatttaattggtgagataatggaagtatatgttgacgatatgctaataaaatctcaacatgcaaaggaccatgtcactcacctggaggctatgttcgaaatactgcgacaatataaaatacgacttaaccccctcaaatgtgtctttggagtgggttcaggaaaattccttgggtttatggtaaacaaatgaagaatcgaggctaatcccgcaaatatcagagctttggtggaaatgcgatctccaacaaaaccaaaagaagtccaaagtcttacaggtaaggtcgctgctttaatcgcttcatatcacgttcctctgataaatgtaaagagttttttcagattttaaagggaaataaaatgtttcaatggaccgaaaagtgtgaagaagcttttcaggccctcaaagcgcacttggggcaacccccaatactttccaagccaatgcctccagaagttttatctatctacctcgc

SEQ ID NO: 35589 - DNA, 7925 bp, Cannabis sativa
tgaatattgggccttggctagccagcctttgactgattacacttccttggccggccaaactagccaaattctcttggttggctaggtcggtctgtgggttaatgggaggttgagtctgtgggttaatgggaggttgattgtactaatttcttgagtttggttgatctacctgcctgaaattattgttttgtggcgaaacaaagtcatttcagttctcgctcatcgagttattattgtcccgtgtgttgtcgattatcccaggacccagcctgccaagaatagggtccctaggccttggaacaacttgttctcggatacttcaagagagagtcatagtgttggccggccaggcctagctagtaagaattaccccctcttcggagttgttttgtcgtcctctaatgcatcatggtgccaagagctggctatttatgccatacagtcaatctggtaagattggactgttgtcaagtagggaaaggtttgtcctcgtgttcaaggagcctggattgactgtctgcccattgtctacctgcttgtagaccctacctgacttgttgatgagccttccttaaaaggatcttttatcaaattttgacctcttctgacagtcagctctctcattgaactgccttatcatgtcactagcctccctattacggaaggttagttatgcctgatgggctcggagtatggcctcttggtcatccattcacctcaaaaatttgcatctttattgggcgaaagcattgccaccagcagcgtatggttcttcttgtcttgtctgagtgacctggactacaacttctctaagcctagccagctcaatatcacctcctagggccaagtaaggcttaccaataactagtttgccgattcctaactctatttctcttatgtagcactatagaacaaccctagttgtgttttgtggaggttgttctatgttgatctgttcttctgcacaagatcctgtgagttgtcctagccttggaggaatggtgggataactaggatttgcaagattggctggattgacagtgttatctggattagtagggccttccatggtgggaggaacatgaacattaggatctatcatcatgggatcctgaggtgcatctgatggaccaattcttctggttaaaaccatggtgattgatcagaatgagatggataaaactctcaatgaaagtaccaaaatattgactcaaaatttggtcaactgatagtgaagccttattaattgatgattatcaccatgtgtaaataagaacaattaatagtaaagatgacacaaatatttatagaggtttggaccccttatttagcaggcaatgacctactctccttttagttgtattcactcttgagataagaccatgcagatcataggtgaaaaccttataatttcttctagctatgactctcttctgtattataatttaagaataatgtgttattacagataaatgattgatgagatcttgtgaagaactttagaagggacttgacttggtgtttaggaggcatagatggattatgaagtttgagagagagagagagaccttcacacgtgtagaaggcttgagggatcatgagaaaggacttgtagagaccctttagtgcttgtggaatgacttagccttgagagagtgaactaatgttctttatatagtgtagggcttacaaaaatttctcattcaaataggtaaagatatccctttaaaatagggatattaacatcttgttatctattatttaagttataaaaaagaataactaaatctttagaaaataggactaatatctcgagagaaaattcctattttcgtgggttgttaggcttgtctcgcaaatgtgctcagttgttcagagttgtctgtaaatcttgaccagccagcgctattttttagggcctggcccgcctatgacctcccatggtcagccaggtatgttcctatcagttttctatgttcttgctagccttactatgtgcctgccagccttggtatgtgcctgccagtcttagtatgtgcctgccagccttggtatgtgcctgccaacctttctagcttctttgtatagctttccttgcaaaggttaggcctccttggtcgaatcaagcctctttgttctgatagtcaccttattggccagctagacatggttggccagggtcttgacagtctgcttaactccttttgcttattgctttatagttttgttcgattgctttggaacccttgacacttgacatgtcgtgtaaggtgattttgtcccgttattgacaagttgtattctacgtgtcctcaatctttactatatcgacatgccacatgaggtggaaaaaatttattataatagataccatgttagaatgtggaagtgtggtgtgaatagggtgtagaaagtaagatgaaagtgagtgtatggtaaaatgtatgaggttacatctcaaaaccaaatggcaaaaagaaaagtagctcatgcatcttatatatattatatatggtattatctctccacactattatttggtaattcatagaataaacgaattggattataacaattttaacaatcaactgtttgtgagttcgaatgctacaacattggttcagtaagttttgtataaattgttgtagcattctattatgttagttagtgtatctgatagttagttgagtctttattatgcttatttaaaggcctttagtcattctggtattgcaacacaattcatactgaattaagagagagtgagattgagttgaagagagacatagaaagagagaacaacagagttaagagagtagagatactggaccaaaaccagtgttcttggaattgaaactcaagctaaatttcaaggtattcatctgtaattgttctctacggggcactcagcaactcaagcttttaattcattattttaatagagaagataactcaggggagtaacaggaagtaggcccttcaagttggccgaacctatataaaaatattgtgttccttactttagttttctgcaatttttctttctattttaatttttctggtttgattgttcatagttaatttggttttgacttgtttgattgttcttggtttgagttatgtgttgttagaatttacaacacacacaatagcaatataaaactctaacacaaacacagtcattactcatgaaaactgtatgtaacaaaattcatagcactgataattagtgctttcactaattcaataagataaagtttaaacaaaacaaattgtagaaactgcttaagttatgcaccaattatgatcattcgaatgtctactaaagtttccacggttaaaaacatcctgccctctacaaaactttgagccaaactttctctgtactgaaagtgaacccaaatgagcagtgtcattaccacataataattcctctatgtcattgctcttcttgttcatggactaatataacacatgacagttcaaccaaatggaagtgagttaggataagtggaattctatcaccaattatttaaaggagaaagacctttggggctagtacctactgcaacatcttcattgttggcgccatcatctttcgtttcaacaatatcttcggtttctgagctgccatcttcttccatttcttcattttcatcctttgctgatcctaatacagctgcatcttcaagctcttcagaagcatcctctccattcacaaagctccatccaggaacaagctttccttcttgtctgattacattactgttgtagaaaccttgacagcctatacttaacatctttctctcagcttcttcagaagtaacattagcagcagaccagccaagattcccattaacagttgcactcagataaccagaagagcttctgttgctattagtgctcattgctgtggcttgttgagagagaattgagtaggcagttttcggttcggtggacttatcactgctacatttcatttcagaagagggtgtgagtaccattccacatatttgaggaggagcttgattactaaatgctggcatcataagatttcttccattagtctccacattgccactggaatttgcagcattattgtttaacatgttttcgctgtacctttgttctatagtagcaatagtagcaagggactggcgtgacttgtctacatcttcaatcttatttagaacaaccttttcataaatatgttctttggtctcagactgaaccttagatgtggctgatttcctagctctggctcggcgatgagactcatcaggagaagctccagcatcaactgatgcaactgacctctttggtcttcctctctttgatggttgcccagctactgcagtcccggaagttctagcaggaggctcttctacttttggcttgaaagaagaaacttctgcttctagccttgttaactggttcttgtaatcacctatctctgattgcaattgattgattacattccatagctgaacattctctgctgactacaacctcataacaacaaaactgactcgtttatacataaagtttgagatattaggaagttaattatagataaggtaaagaaaagtactcatacttgagcatcccaaagttgctggtgcttctgagaaagttttgctgttgttttaattactcctctttgaatgacttgtccagtagatgtggaactgttaagcattactgaaggtggtgaaggaaagtaattataagttcctggaaatgcatatgtgcatagaggttgagattgttgtgcttgaccttgaccttgaccttgaccccataatgataatggatcacaagggcctgtaaacaaaaacaaacaaaaaaagcattcacctttacatgattcaaaattttcgattttgcatctgcatgaacaataatggtaaaagaattgattttctgagcaggaaaagaaaacaatcttgtttctttatacccccttatattgcaatcataaccaatgaaacatcataaatgcacctaataaaatcagtcaaggccagtaagaaaaaagatcacatcttttttcagaaatgtgtacaagtttacctggaaggccctggtatgagtatccaaaaggataacacacactgggaacctgattttgagctgttgatgcacttcctagtcctgcagcaggagcttgccaagtaatctcatatggagaaaatgctggtgaaggcacattcatgcccggataggtgtgagcagttcgttgaggtaaccaaaagggaggtgttggttgggtataattcaatgggagctggccttgggggacctgaaggttggtcaaattctgctgatgctgatggggaaaatgccattggcttatgatgacaggtgaaggtgattgagtatgaatatggggttttgatgccaatggagactgatcaacagcagcattattctgaggtgtatatggccactgaagaactggggtgtggtgattattttctgatgttgcattgtcatttgaagggcaaagagttttgatattattccccacagtttgttcatcttggtcttccttgttctgttttaaggtaattaagataacagtcaagagttgaatcaaaagataagaaacactaaaagtcagtaaaagcacaccttagagataatattctctactattttaattccattggtcaattccttatgtagaagttgcaagtactgaaatccacataaaatcataacagaggtcttacaagacatggatatatatatcatatttgatgaatcataaaaatagaaaacaaaaagagcctaaaagaataaagattgagaaaccccacataaactacaaagccatattacaaaggagtaaatgcatgaaacccatcaaaaagaaaaacttctcatttcatcagaacaaacaaaacccatttcaaaaatatgataaaagaagaagagaaatcatacagagtgatcattcgtgtctggttcttgactataagcagaagctagtttatgttccttcttctttttctccattaccctcacttgcctgaaaacttgcctaaagcaagatgaagagtgaagtttccagtgataccaaatatgttacatactaaaaagaggtgatgagttaatagtgtgtttaagttatttttcccaagttttttctgcttccttgttcttgttgcagattgtcctcctcttttcaatttttttttcatctttttattgcttactttgatggtaccttacctagtggtacatatttattatttttacaggtttacgtttaagaccaagactgacacatgcttttttcttaccccttttcttttgtggtgccttaagaaatttacatgtgtctaatttggtggaaaatagcaatgatgatttagacatattttcatagattaaacatattttattttgctccgtgcctttggtctgttcgtacaaaataatcaattcacgaataagctgtgttacaatatacttttttttttttgatagatttaatcacacctaaaattgtcttcgtctactttccaaaaacttattgtggagaaaattttctcaaggaaaaccaccaacgatagacttaaacaccatagccattaaagagccataaaccatgatgattttttgttatttatttattctacatttgtaaacaaatttcggcgcgaaaggtaataatgataataaaatatgtaatggtatatgtattacagcacctaaggcttctgaattaacatttaaataacagtcacctcaacttaagagagactcaatttccaaagacagacttaccacagggacaatgagaataacaagaacaagaatcttgcttgtatgtggaccaaacaccgaagttaaaatatgcttattttggtccaaaataattctattgtcagaattttgccaaaataggaaccattaattatttctattatttgtagaaactaaattataaacgaaatgatttcaaagtcaagaagaattttcctgacaaaataaaaaaaacaaattgaagaatttatattttagagcagggtcacaaacaaaagagagctttaatttttaaaaaggaaaatggatggatggatattgaaccaaaatgaaaacgagggagcaagattatggaaaagaacgtagtttattgcatggaagaccaccctctctaatttcagactggtcaaaacccattattattttatataagaaacagaaacaaataataagctctccctccaaggccccctctaattatgtacctgcacgtgtacccatggaaataaaattttgttttaaggtaagtaaccacagaacccaggagaaaatagaataactatttagtggcctggcaagctcaagccatgttcacttctctttttatgcaccgtttatgttttgagaatagagtagagtctcttccaaatgccagcttcaaggttaaagaaaatttttagttggacccttttggccaatggaatggccggcctccaaactacgattgttccaatacaatttttttttgtttttgtttttgcagtacaatttcaatgaaaataattttttatcaaacatgacaggaccaagtggctcatttgctacaacatttccaattaaccctcagattattgtgagaactttagcataatgtattagtgatctcaattcattggatttattatatgatccagagaagaaattattttaagtgaatattgtgaaaatttaaaaccaaaacaaaaagaaacaagccacaaccatataacattgagaagtctagaacaggaagaaaatcacataagccgctacacaagaaagtgaaacagcatacacaaaacagttttacagagctttaatatagcaaagtcagacaccatagaaattatgtgtaaactactgccgaacaatatagaagaaatctagtactc

SEQ ID NO: 35590 - DNA, 1769 bp, Cannabis sativa
  modified_base (160)..(163): a, c, t, g, unknown or other
  modified_base (1422)..(1422): a, c, t, g, unknown or other
  modified_base (1552)..(1552): a, c, t, g, unknown or other
  modified_base (1610)..(1622): a, c, t, g, unknown or other
ttaatataaaagtttaaattctgtcctattttgattagtaatcccatttaggggattagggtttcataagtattttgggtagcgtgcctatttattcagggcgttacaacttcatacatccgatactgctaaaatttaccaataccttggaaaggacatnnnncttatccaaggtgtaagtgtaccttattgccgattatcatgtcagtctaaatccaatgaactgacaaatcatggaaattaaacttttgaacatataatcatgattatatttaactatgttgacgatattataatcatgacatgaacaaatatatatttgcatcggtaaccaagtttgaccagacgcgttgaccgacacaaaaatccctttttgtagtagtgactctattgatagtcaaaattcatagcatcaaataacaatcttcccaacaaaaacaatatacactaatcgaacaataatagaacacttatcgaatagtacgattaacgagaataataatcttatgaacaaatattggcttgccaaaaaagactactcgaacaataatcgaacacttatgtgtctgactccaacataaatattttattttctacgccattaaaaatcgtatttctcccctcgcgctactaaaaatcattgtacatcaaatagccgaaaagagttgaccctatcaattcaaaacaaagtaaaataaataccacaaaaataaatctacaaaatgtgtaaataaaacacacatcatcgaatacatatcaagtactatcgaacatgcatcatgaatggttcgaaaaaactacacaacttaccctacatcaaatatgcattgtgtaacaatcgaataggtaatataagtaatctatattgagcaactatcaaacactatcaaaatatactccctaatttatgaaaatactaataatcgagtaagcatcgaacacgtaccgaatgcactgaattttatgcaaaaaaaggagaggaactccaaaaacacagatataattttttaaccaataaattgacaagatgcacaactaaatttatatacaaggaacaaaacaccaattatatacttgaataaaattaacattaacaacaaatttaacataaaattagatatccatttctaaaacctttaaaattttgaccttctcctcctatctttacaacaggcttatggtaaggctcttgcttcatagaaatttatttaatggctccaaaaattgttctaataacaaagttttttgatatggtgaattgagaaattagtaggatttgggaagatggaaagagagaagagggcaagattatgagaggggtattttggggtttagataaaaatgtgataattttttgaggaaaattttatttacaccccgaaaatttctaaacacacctaattttaataatttttattttanataaaatttatatctttaattataataattttttttaattttttttcttccaattcatattcttaaaaaatatacctatcaaagaaaaataaattatattttaagtattatgacaaaaaaattaaaatanaaaattatatgaattttttttagaaaaaaaaataaaaaaatatatatacatgagttannnnnnnnnnnnnaaataaaatcaaaataagtattaaattaacataaaataatgtgaaaaaaaattttaaaaataatttttaaaaattatttaagtttatatatatatattttttttttgataatagaatttatatatcatttatagggtgcaaataaaa

SEQ ID NO: 35591 - DNA, 3157 bp, Cannabis sativa
ttttaatttagagtcatgacttgatcgtagttacctcacaagaacaacctgaatatcggtatccataaatcacattgcctaaacaggcaagcccatgccatagcttggcatccatatatcacatcacctagtcaggtgagcttgtatatcacattgcctaattaggcaagtctgtgccataacctggcacctacatatcacatcacctaattaggtgagcttgtatatcacattcacattgtcattgcctaatcagacaattgatagttttaaaacctatcataccatgtggtacattctacttttcttacctcaattttggtttaggtatgttggctgacctacttggagaacgatcgacgatcccgggccctatgtgtctatcccaaaacactacttaatattcacataagacaatctaaggttttttagcaaatcctgcggtataaatacactaaaataaaacttatattatctccttaaaacatataccatattgtagagctctcgtaagctccaaaatagtacatagaacgtccaaaacggacactcgagtgaaaagttatgacaaaaatatgatttctgatctctgaggaatttccaaaaacggcaaaccattttctgacacaaaaatcccaaattttgcactctctgaaatactaccaaaacctttccaaattatttcaaacttcagaggattcatatatactatatatacaacattccttacgtaatagatattaaaattgagcccttaaattgaaaacgccattaaagctcggatttaagctttaaaaaattctaaactcgatttctaactcaaaatcaccttaaattcaacaagtaaacatcgaaactagtccatagctaccaaagaatgattctatgaagtcagagctccataactactctaaatcacaaagtcactatgtaaaaccaaatatttttaacttaaaacgaaactaatccttacctcaagcttttcctcttcaatgatttaatgtcctgctactaccggagcttgaattactaagttttagattgaaaatcaaagaaaataaattaagaggaggagggtttcgtcgcaccaaaggatgaggattttgttcgtacctgtttatgttttaaaacatagcatatatatatcatatacattttttttaaaataaactttattaatagtaataataatataataatataatattaatattaataagttctttattattaatagatatcttttcattttttagccactaaaaaatctctacttctagggcactaggtcaaattctacatacacctaatcatcccaatacttaaactatcaacttatcataatattctcatcaaatctattaattaatcctgttatgatattttttgccctcgatcaagtctctaaagtcgccaacttgaaaatatttttattccacaaatagctcatattacattcacacatgctatataattcttcgtaattcataaattatgcttatttatccacttataacaaatttaaaatttatgctgaaatagattagtaagatcataatcccacttattacatgattagcccatgataaaaatataaatcctaattatttaccattaggcttattgggatattacatgtgctgtattgtagactctggccaaccactccaaggtaagggtgctggctttggccgactaggcttgcactaggcagctgtccatggccggccagacctgcattgggtacgttctagccacccgtgactcctccatggctggctaggcctttataaggtacgttttggccgcccgagactccttagttgattgatgttagaagtgtgttaatagaaggtagatcacactagttgctagattttggtgaatctagatgtctgaagtgattagtttcacttctcaaatcgttgttttgggtgtttccactcggtctcgatccttgttggttgaaaattagcctttgggtgtctcactcccctcggggaggaagtgctcccctctggccggctaagggaactcctacagatggctggccggccaaaggttgaatgacgggggttgttcctgagcttgagatccctagtcgccccccatgacgctagttgctgggatctggttgttttcactgttagacccttatggaaaggtctgtcttccctctggtaagggaagatctatcctagtccttgaggaaccaggttgtccagcttgtcgattgaccctcccaaatctatcaactagtcttcattggagtggatctctgatgagatcctggcctcatccatcggttctctgcttgaaccgccttatctagtcgctggcctctttgttgcggcgatccaagtctacttggtgagatcgaaggataaactcttggtcatccatccacctcaagaatttacgtctctactgagtgaatacatcgcaatcagtagcgcgtggttctttagttagtccagcttggccaacggcttctataagtctggctaacttgatatcttctcctaatttcacatggggctcaccaatcgcaggctcgccacctcctggtcccgtctctccagtgtagtactggagatgagatccgattgtcgttccttgggattgtcgcccacgagtccttccttgaatgggaggcgccagtgaagggtcctcccttggaggcaagggcttcctattcagatccactgggatgtttgtgtcagtttggccagctgtagtggccagatttgtgacgcctgttgtggtaacaagattgaccacatatgcagtgttcataggaattccaactgtggctggaacatgaacatcatgatctatagtctgtggatcttgagggagactcgaagatgtagacagtgcaatcgcaattcttctcatgttaaccatggtgtttgatcagatatgatatccactagctgtcaatgaaagcaccaaactgttaacttcgaaaagtggtcaaccgacagtgggatcgtatgaatctgatgtttgccacgtgttacacaattagaattagaaagtaaaggacacacaaaatttttatagaggttcaacccccttagataggaggtaatgacctactccccttttagttgtattgatactgaaggaaaatattattcagatcactataggt

SEQ ID NO: 35592 - DNA, 6348 bp, Cannabis sativa
  modified_base (902)..(905): a, c, t, g, unknown or other
  modified_base (1548)..(1551): a, c, t, g, unknown or other
taaaataatttccaacacattccccttgcttagtgtgggcacctgaccaagcacacatccttctccaaggccctcatgcgtgcctcgctgatcttggatgcaggactcacccatctggcacctaaggcacctttcctcctgtgaggaactgcttcagtgagctcctcggtgacatagtcttccccttcaaccaagacttcaccctcagcagacaccggctccccagcctcattataccttctaaagtttaaaggttcgaccacttcttcctcctcagccccggaagggctcccaggatggatgtcgtcctcctcctcaatttcctagacctcaatgtcctcctcatgatctccctcctccatgacgggcaaatcttgttcggcacttggtaacgtggcgagctgggccacatgaggatcagatgcgttgaccttccgcatcgtctccttcgtttgggccatcatcctccttttggatagacactggtgtgaatgtcgggcaaccctaacagcaggaacagcaattgggatgcccaagttacccgaacttggacagccaacaggaagagtgtcagcaacacctggctagacaatatatgtccagttggacaagagataacgcctccaaactttcttcaattcctaaataaagcggttgtacccctctccggtgatctacttggagtaataatgttgttgcactacggattctggagtaggagaacgatcactactcacctcccaatcttcgaagctcaaattagaaagtttgtcactcgaagaagactgactggcacgaagacgaggttgatcctcgtacagaatttggagcaattcctggccgattcggtgctcgcttccccaaaattcaccagggttcatctacaaaagacaacacacgannnnagtgtttggccgagatatcgaacaataaataggcaaatatgccgatcaggagtactcaacatattaaagggttgaaaaaatgtacaaaaacaagtgaaaaaacctaaagtttttgaaaattttttgggtttttagggttaaatttcacgaagctttgaatgagcaaggtgaaagacgaacaatgtatgattaaagacaaacgtcttaaaccatgaagctacacagactattacaaagaaaatcacaaaagttaagagcctagattttttatgtatcttctacaacaagtcgagaatgcatgtatgaaacccagaaattaaacatgcaatgtaaaaagagaaagagattgaaaaaatttactcactttttgacgcctaagttcagtccaaacgaagctgctcagatgcctttggtggatatctcacgacagacttgaagtaaaaatcttttttgctctgagtttgtttagtagagaaatcagttaaagtaaagttatgaggaagactcaaccttatttataggcaatgtggtgaaaaaagtaatcatttaaaaatgcttttgattccctcccaaaagcaaatattgggaaatcaaatttaatcaagtgtaaccatgaaacgtgatgagaaaaactgggtttcgnnnnactaattaagtcagagcattaattagtaggtaaaggcagctcgaatgaagtgtacacgcaacttcagaagtcccgtgcagacttgggggcaaatgttatcccaatttttgcactctggcatggcatcgcacaatggtaacacgtggaatcaacttcgcatatctattcgtgagggatatgccgaacagagcaccacatatatttgcacggacgaattcttctttacaaggaagtggatagtccgaacaacatgccaacacttagcagtttcaacactcgcatcgtgaatcacagaggcaatccctataattttgagatcatatcacagagatatggcaagctcttcaaatcccttgatcagtgtattctgtatttaatttgtaatcttgccaattatatctattgtaaatagaagggaaacctttttctcaaagcttatagccctataaatagtgatcaattctcactgggcaaggggtcgaaaaacttatctaagaacacatattcagagatatcattgtaagagctctaagaaaaggaatcatcgcattttttgttcgtaagtcaatacaaatcaaggggagtaggctattaccgaattgctcggggccaaacctctataaaaactttgtgtctttatttatttcactatattatatctatcttatactacttgtcgcttacaattaagactcactatcattggccaaaagcgagatcaacaaatataatttgtcttttgttcttcatataccactccacataaaaataatatacaagactattaaagtaatatacttgaatatcaatatattgtaatatactttgtctttcgttcttcatatattatcccacataaaaatattataccacactattaaactaatataatcgaatatgaatataatgtattatactctatctttcgttcttcatatataaaaataatatatcaaactagtaaacttagatactggaatatgaatatactgtgaatatactgaaatattagtgcaacttaaaaaagatgaaaaaaacatacacaatataaccattgaagttttactcaacctgataatttataacttatttgattcacaaaaacaagaagaaaaaaaaaattgatcaaccagtcagtggtaaatttttcttgcttcattcaccaaccatttagccaccaacaaataagttagggaatgattgtggtgaggatctgcggtggtaaacgaaaaggggtggcagttggactagaagagaggaatagattgggacttgtcagtgccaagagagaagaaggaggcatgatggtttggacagaagagaatgagaagacggtagacggctagggttaattatccaaggttataattgtaattttatcatcaaatttttaatcaaatggccattttgctaaatgtttataaaaaaggacatttactaacttaatttctaaatttagggccattttacatctcaacccataaataaatcccaaaaatgtattttgggccccaaacccagttcagcccaaaatacctagttgtgactataccgcgccgatttgttagaatatacttgtagaaagatacaataatcatactatataataatatagtccacacgtaaccataaaattacgattttaccctttttaggtcaaaattacaaaatgcccctaacatacaagggttcttaaaatacaatttatcaatatagtttcatatactaaattatataataatataatttctaattaatacataattaatctagttagggttgctaatctaattattaaaccttagttacaattatcccctccttattgaaattaagtcccaaaatttacctgaacatctctggatatttctgctccatattcctctcgagttcccaggttttctcttcaactttttagttccttaataatactttgatcagtgcaattgtcttgtttctcaagactttctctcttctgtctaatacttgcattggttgtggttgctcctcgtatgaaagatttggttgaagttccaatgcttcataactcagtacatgggacagatctaacacgtatttccgaagcattgaaacatgaaacacatcatgtatagcttccagcgctggaggtataaccaatttgtacgctacttgccctatcctctctaggatttttaaaggtccaatgaaccttgtgctaagctttcctttcttaccaaagcgttaatatttttcataggagatattcgaagaaataccatatctcagacctggaaatcaatatcccatcactttggatctgcataacttttctgtctactctgagcagtgagcattcacgctttgatcttttcaactgcctcacttgtcctatgaacaactttgagacccaagaactttctctcacctacttcatcccagtgaataggtgatctacactttcttccataaagtagttcataaggagccatttggattgttgcttgatagttgttgatgtacgagaacttgatcaagggaaggtacttttcccatgatccttcaaagtataatacacatcccgtagcatgtcttctaaaatcttaatggtcctttcgaactgtccatctgtctagggatggaatgatgtactgaatttcaattgactacccatggctctatgtaagctctcccagaatctagatgtgaacttcgaatccctatcagaaactatggactttgggaaccgtgaagataaactatttctctaacatatagttctccatactgatcaatggagaaatttatctgaacaggtaaaaagtgcactgactttgtaaacctatatattatgacccacatagagtcgtattgtcccatagtcttaggtaattcaactacaaagtccatagcaatgtcttcccatttccattacccaaggttcaatggctgcagcaaaactgcaggcctctgatgttcagccttcacatgctgacatgttaaacatttggaaacgtactctgctatgtcgttcttcattccaggccaccagtatatggacttaagatcttgatacatttttgttttccccgattgaacagagtaaggagttgtatgagactcattcagaatttctctcttaatatcatcattcattggaacgcaaacacagttcataaaccgtaacaacccattactatccactgtaaagtcattggtctttcccactgaaaccctgtcttgagatttcaccaaatacagatctagatattgtgcttctttaattctttctaggagactagattgcaaggtgatattagctaatcgtcccacaaaaaactcaatgttagctcgggtcatttcatctgcaagttgcttgaaaatctgtttgatagtattcatatggttctaaccctttctagttagggcatcagctacaacattggccttcacaggatgataaagggtttcacagtcataatcctttacctgctcaagtcaatgcctttgtctcatgtttaggtctttcttggtaaggaagtattttagacttttatgatcagtgtaaatctcacatttctcgccatataagtaatgctccaaatctttaggacaaatattattgctgtgagctctaaatcgtgagtagggtacatttattcatactcttttaactaccaagaagcataaattattacctttccagttttcatgagtacacagcctagaccatgtctcgaggcatcacaataaatgacaaacttttccttatccaaaggaagagttaatactggagcggtaatcaagcgctgctttaacttctgaaaactttctcaaaccaatcagtccaaacacacttcaaattcttctgggtcaattccgttaaaggtcgagctatttcaagaaaccttcaacgaactgacgataataaccagctaaacccaaaaagtttctaacctcagtagttaattttgctgttaaccaattcgaaattgctttgattttgaccggatcaaccatgatctcatctttatccactatgtcccataagaaagttattagtcatgcaggcctaactgaagaaccattcactgctgattgttatgtattcgctcagtagagacatgaattcttgagatggatggatgaccaagagtacatcctttaatctcaccaagcagtgttagatagccacaattgggaggccaacaatctgttaaggcagttcaaccagagaactgatggaagaggccaggatctcaatagagatccacttgaaggaagactcattgatggatcagggaggatctatcgacatgctgaccaacctcgtttctcatgaactgggacaaatcttccctcatagagggaggatagacctttcctcaaaggtttaatggtgagaatagcaagatcttggaaaatagtagcatagggggctagccagggatctctagctccgtaacaacccccattgtacagcttgtggtcggccaaccaccaacaggagtacccttggtcggtcagaggatagcactttgtccccaagtggagtgaagtgcccagaagtcaatcttcaaccgacaaggactggaagtgggtggaaacacccaaaatggaaatttgcaaagtgaaactgatcacttcagacacctcgatccaccaaactccagcaattgtgtgatctccctcctatcaacacagtcaacatccgtccatcgatgagtcttggttggccagaccctacctttataggtcttgctggccatggtagcatcacgggcggccagaccctgccctttgcaggtctggctagcc

SEQ ID NO: 35593 - DNA, 938 bp, Cannabis sativa
ttatttgtggtaaaattgagaaattaattttggaccttaaaatatggcatacacgtataggcctagcccacacgtgtagggtgacatataaatgcccattaattttgtttgattattttaataatatgataaatcaaattaaattaattcgttaattttttattatattattaaataatttatttaattaaaaagataatactaaaataaaatgatttaactgatttttgttagtcagttatatggtatttatatttgaatttgaattaaattaaatattatcttttattttaaaggattacataaatggtttgtttataaccttatatatacgatatacatcaatacaacaaatagcttgagaaaataagagaatagagcgatactttttagagagaaaataagattgaaaaataacattaatttctaattctctctctctcctacatgcacgcactctctctctctcctcttctcacatgccttacaaactgtattgtggtgtgagatttgtgttcttccctatctcatcacagtatctcacgagttaagaatatactgtgattacaaaattatactcgttcaattgaatctaatagccccctctattcctgagtgttgaggttggcttggaagatcgtggtgtgaaccctttagcaagttcttagattagatgttcgatgatattacgaaatgatagtgaggatccctgataggctacaagagatattgtctctctttctattcgtctagatttaatctatatatattatgttgagatccttgggcttatggttcatattagattaaattatttttaatcgaatccgcttccactttttaactctgatattgttatacccgaaatttagctggtacttcagaaaaagacacgtgttaaattgggagaagatgaatcaacaaatataatgataatt

SEQ ID NO: 35594 - DNA, 1083 bp, Cannabis sativa
ttctgaattgtgcatgaatttatattgaaccatgttattttttgttatgcttcatattttgcttcattattggatgttgtaaatccaaacttgtctgctccgtacaatggatgcccccaaggtgtgataagagagatccctgcacaagacaactaattggtagatgatctatccacatgtaactttcaaattggtctaactttgactgtcttcttctgatggggattctttttcaagttccctttctggctcaacattattttctgaattttttattctttcccttgcattcagctacaaactcttccaaggcttaaccttttattgttatgtggggctggtaggtaatctcgtactatcctagctcaattgcccatttaagcaatcatccaaaagcaactggtatttgtaagaattattgtaatggcgatatacacccagattggatgagcttagaagtatgatcttactttgaggccaggagcaagcaataggttaatttttctatcaagtgatcgaccttcagcattaattaatcttttgctaacatagtagactagatgttgggcattgttttcttcactgattaatacgccacttactcaagattcagttactgtaaggtagattttacagttcttctccgtctagaggtttgcataaaataggaggttgtgcgagtttctttattaattcttaaaaatctttttcacacttctccatccattcaaattttttgcttcctcggaggatgttgaagaaaggaaaacatttatctgttgactttgacatgaacttgctcagtgcaactattcgacaagtaagaccttgtacttccttgaattttattggcaatttcatatctaaaaaggctagaattttctctaaattggctttctattcctcgagcattgataatcaatccaagaaacttacctaagctgaccccaaaggaacactttaagggattgagtttcatgttatattttttaaggattttaaagcattcgtccagatccactatatgccccaaacctttctagattttatgagcattttgtctacatatacttccatgttaca

SEQ ID NO: 35595 - DNA, 1582 bp, Cannabis sativa
ataacaacaattcaacataaaccagaaaaacagatggcaataaaaccagaagcaagaataaacaaaatagcagtaaagaacaataagaacacaagagtttacaaggttcaatcacaagtgaggagcacttagatctaatccttgggaggaaccgccttgaggctttgcctttgttattattagattcagctcagagaacaagcattacagtacaaaacttcatggagtcatgctcctacaacaccctcatgtgtcactcgagagccactgagtttcaagatctcaggctctattacaagaccataaactctctctgtttacacaccctctcccttaacataataacaaaatgacctttattatatataggtcgaacaagagtatatgatcagacataaaaataacagaaaacagttattaaccaactgtaataactaactaaccaatacttacaccagtaaataaaccccacatataacaaatcaatttaaatcacctatggatataaatatataatataatacgatgagcaatgtgatagtaattttaatgttacaattcatgaattggctaaacatatctatggatagaggatgaatttttttagatagaagagatctctctttctatctgtaatggttacacttattagttattttctttcattctaataaaataatattgacaataataataataatgcaaagttactatatacgtaacatatcacttctctaaagtttatcataattattagggtttttattttgctgcagttaagaattgattaaacaatgtaatttggctgctaaatttttctgctaaaagtagtgtgctggtgcacacactactgaatgtaggacaattctgttatagccttttgcttgtaggccttgtgccatttgtcccctgtttttgccatgtattgtaaattttcactatataatgaattgttatctcctagcttctttttgagctgagtttttcctattagtgtgtttggcactttccaaactggtatcaaagcaacaaaagctcacgctactatttcaggaaccagccatcacccgatacctcagaaccaggcacaggagctgtcaataatcaaccgacaaatcaaaaccatgtaccttaccaaaccagttccctgcaactctttaatggagtaccttagtcggggtctttcaagtggactggagattttaactagcactccttttggtaacactctgtcacaaccatttgctttgcaacaaaaataattacatcttgtgaaagacaatggtctcaaccattatacgtggccataggctagatggattcatcaatggcatgagacaaccaccggctaaatttataccatcaagagttgctacagaagatggaatacctgcatttggagttcgtgtgaatccaatgttgggaataaaggacaatattccaatttcttttaggattaatatttgcgggaaaattcaatggggactccaaaattcctttctgatgtgaaagatcagtcaaagctgcaatcacagagcatattcagaatttttggatatcttccaatgtaaatagtacttta

SEQ ID NO: 35596 - DNA, 1332 bp, Cannabis sativa
ctaagtgatcttagttctttgtatagttacaagctacaatctcatatatgaataaagaattttttgatatttaatgtaaattatttaataataaatattaataatttaacattcaagcatatatcaaaatgctcaactctttattaataatcataaatgtctttataggctttttaggacataaaccccaacaatctcctattttctctaaaagcaaactgggcatctcccttagttcatatgaccaataaaatattttacttgtagcgtctttatgaatggatctgccaggttatgtttcgacgcgatctgcaagactgtcatatcacctctctctattataactcttagtagatggtactccctctcaatatgtttgcttctcttgtggctccttagttctttggatttagccaccactccactattgtcacagtagagcaccaatagtttttatacttttggaactacttccagagcagtgtagaatttcttcaactaaactgattccttaactgctttgcaagctgctatatattcaactttcatagttgaatctgcaatattggtttgcttaatgctcctccaaactacaactcctccactaagagtaaatacagacccagatgttgactttcgactatctttgtcagattaaaaaattagaatcaatatatctagtaggattcaaatctctaccataatatacaagcatgagatctctcgttctctaaagatacttgagaatgtgctttaaattacaactatctagtgttcaaaatttgggcctatcctcggaagttctttacgaggtctatttgcacaaccccaaggtattgcccttaagggcgagttgtcgtctggtctatagggagacaacaacctgatagagaagtttgttggatgcttatactgatggatctatatatgattgaccagtatatatattttgacaaagtaaatggttcagtgcaggagttgtttctttagttcacacaactccaacgatgacatgctgaatctagatccattattagttcaagtttttacaagattcaattttttgtaatgttcttttcaattttgagattaattttaattaattaaactattttaaaattttatgatattatatcaattgaacatattatttaagaaaaactcttatacaatttttgtttttttttttaattttttaatataaataatcttctcaagatactttattctgaagagggttaacagggcttaagtgtacttaaagtaatacttcccgtgtccttccatagtgttgggcgaaacaaacgtaagataccattatagtataataat

SEQ ID NO: 35597 - DNA, 1424 bp, Cannabis sativa
aagagaggattggcgatttttgtctgatgttccacgtatctcgggctgtgtctccaaattttcctcagtttccttaggttgcatctcctgagagttttgagtatatctctaaattgttgcctgcctcttggtttgcgagctgcgaggtttacctagtgaatctcttctcccaaggtcaggttgattttggatacaattctcctgtgctgcccttaccgtggctatttcaagctctaactcggtatgacgctggtttgcttccttcaatcgacgcctaagatgtcgattttctaattccacgattggtatgtatctggttgggtcataggcgccatcctcatcatcttggttaggaagtggtcgattgttgtttatccaaggtccgtcaagctaaggaccccaatactgggttttcttagtatttgcagtctgttcaggcgatgagtcaatagatccctgaggaatcaatggttgttttctaggtcgatgattgattccttcttgaggattattatctttggtgtcatccatcacttttatgtcaagaggtcttttttgagctttttcacagaggctctcaatgaaaacactaaactgtgaacgcagattttcgttaattaaatttgagcctcacagtaataattccacacagaaaaaataaaagctattattacatccaacctagtacatgtcttgggcagacactccgtaagactcttttctccgcttaggcttaatatgatgatacgtgtcacccaaagaaacataccacgtgatccaaataaaatttgagataacaaataaaattaattctaatccaatatttattataagtatctaatcactaaaacgcaaacataagaaccaaataattagctatttttatattacgataataatgatttaaaaaaaaaaaaaaaagctatagatgcacttgcacgtgtagccaaaagttccgacctttttacctctgcaaataagaacatattcgtcttgtcattgaagaatctaggctgccgacaattctcagtctctacactttcagaaataaaggtgtcaaattttacataaaattaataaaattaagtcatttcttcagcacccgtttatttaaaatatttatatacgtatctttagttactagttggctgtgatatgatatataatgtgaagaacaagcactagcaagataaatcaaagggttgttgagatgtcaattagaaactggtaacagcacagcttggcaaaattttggacatttgggattaagaagattcttaatgtcgtttgtgtaattttatatacacaatatttatttattcttcaagtatattcaacgtaatagttgttgggtcatctttactctaaacaaattccaaccaccatagcttcttgaagacccagcttttttttttttttttttt

SEQ ID NO: 35598 - DNA, 3434 bp, Cannabis sativa
gaaaaaacccgacctgatacccggtgcactcgcacacccaaatacggggttcggttgtgcacttccaaaactcaaagcccgaaaacccgaacccgaaaccccaaaaagctgaaaactcgacccgtgtgcacccctagtattagggaaagccaaccaattaaaggattttgctcctttgtcagatgaccaggcattttaggcatcaaagcataagccatcatagaaggtgacatcagcagtagcttcctctttgagttgagtcacctgctctctcaagacttagcttgatctctaagttgagcagtagctaaggtctgttcatcaaacgcaagacaagaagactctttagcatctgaagtcttcttctaaaaagtagccaagctcttcttcaggctattttcttaaacttagtcaccagtagccacttctcgaagagtgcacaactcactctcttaagaatcactactatcctttaaagcaatcacctgatcttttgtagtaacacgatgctcctctacagtagtgagcttttcagcaagctcaaccacattcttgtattcgttatccatggtgtaagaataacaaatgtaagattgaaataagaagacaaagttaggtgatggtgaataaaagaaaatctatccaagaggaaataagaaaaatagttactttgaatatatcagtgaagcatctttgggcgatgacatgcagaggtttggagctgacaaacttttgcaatggaatgttctcagccttggaaccaatcaaggcatcaccattggcaagaagccaggagccctatgcacatagttgttccactaaattcaaactcgagtttagaaaaccattcttagcctcatccaaagaaatatcaatgggaaatccctcatcagcactagaagttctagacttctccttgcttaaagtcttgggtaggaggaacaacatcaacaagtcttttcctttttctgagtttactctttgaagtagcagggatacgctaacaacttccctagaggttcagtttccttcagcactggaattttttactttgagtttgagaaagatgccacaacagtcagagagctcatgttgtctgcaaagaaaaaaagataagttgttagtacaatagaaattaagcaaaatagtaaaattcaacttcacaacatgagcatcagccacctgcccatccttctctggaacagattgagtggaggtgacttctccatcatcttagtctaaaacacatagatattctccctgaatattttgggtagtctcaaactgggctatcatctttcaacattgtcttagataagattacagtttcactctagacatcctcttcatcttgtttgagtggcattgtctaagaatcatcaaaaaagtgagtattaacatacacttactggaaatacattatcaaaccaactttgtggagatttcagtggtaaacaaagttctctcatctctctcccatgcatcaatctcaattagcatgacatgtgctctcctcttcatgtcaattagaagagaaggtcttttgaaagggccaaccttttgaaaggttatgtgtcttaaaggaaggactggggtatagaagtattcctggtggtagagatcgcaattgcttttggtaatgttttctatgcatgggctaaaattatgaaagtgatagaagccttcttcttttttatttggacttcttttcaagtcacaaatgaagtttatctcatgaagggttggcataggctaatttctcaagtggtaaaagatgaagaaggtggcaaggattctatagccatttgaatttatttggtaaggacaaactccaacgaaatccgcaattgaaataaaacatggatgcaaaggcaagtaagcacccacattcatatggaaccttggccaggaactacaacaagagttctgagagccaataggaccttaagatcgtgactttcaggacaacagtttcagaaagacagtagtcgtctatgattaattgtgcttggtatttagtaagagtggtaaagataagaggtcttagcttgaaatcctatcttttgggtcatcacttttaatgacagctttaagaaatttagtttccattagcttctcaccacacgccttgtctaagtttttaaacttagacacagtcaacttagctctaatgaactacgccacatggggatcatattcatcagaaaattttctacttctcttcatcctagccatgatgactccaaaatgttagttgcttacaactcaagaaaagtcttatcaatttttgagttttatgaagttaaggtaattctaaaggaggtaattctcaattcacaagaaacgtgttttggaattttggaggtcttgtaaaaaataattcaagggttttgggagttttagaatccttgaagcaagcttaacaaaggaggagaagaagaaaatttttcaaaaagaaaaaaaacaacatcgccaatttaaaaaaaaaaaaaaaaagaagaagaagaaaaatatttttctaccttgaaggatgaagagcgcatggagaactggtgaagaaaattttcaaaggctattctaaaggcttgggcatggagagcctaaatggaaagtgtgagaaatttaattgaaagctcttttatttatagatgaattcaatatcctaatcctagagcaatgagagtcttttaaattaaaagccttaacggaaaaggtaaataataagaaaaagatagaaatatatattttctcttcttctttggcattaaatttgaaattcctaaggaataggaataggatttttgaatttaagaggtaaatcccattcctaatgctactaagattacaaaaaaattagagatttaaaaaaaaaaaaaaaataaatgataagccaaatatcaatgatcttttctcttcttctttttcactctaattttcaaatagctttttaaaataggattagaattcaaattcaatcaatcctaattgcataagaagtacatgaaaatttcaagtttcaaagaaaaagattaaagataagtgaaaaaatggtaagtttttcctctttttctttgactacataattttcaaaatttccctacacaagaacaacggaactcaaaatcctaattctattgagaatgcttgaagaataaaataattgcctaagactgtcaaaattgatgcccatctggtagttttaagagaaacaggctcggttcacttcatcaagttaactccacaaaagtgtaaagttgactttgggggaaaatattaacccagaaaatttccctagtgatgtggacatcaatgctttacacgtggaaagaaagataatgtcatggagttgagtagacccaagtcatagcagtcaacttgggaggggtccctagctttgcgcccaagttgactttgggaactccgggatggaagtt

SEQ ID NO: 35599 - DNA, 1758 bp, Cannabis sativa
  modified_base (27)..(30): a, c, t, g, unknown or other
gttaaaccaagaaatgccgttagatannnncttttaatatataaagatatctgtaattatttctttatgtatgtataaatgtgtaaagttcccatatttcaaatccaattcaattcaatttgcaaaagtacaaattaaatcggttattttagattagttactttttaatatttattaataaatattttttctaacattactgacaacaaaataaaataaattattgttattttatatgtgtctattatactcatatttcgaacaacaatatgattttgacacgtgtaaagaaaccagctcgtgttataaaataattaatgcattcaataaacttgcttcaaaaaatacatgtggtagaaaataaaaatattcaaactcacctttttaaagataagaacgaactatgaataataactaccaattgataagattggtgagatgaacgatcagtttagaaggttcatcttgagaaatacaaaatacacaagagaataacaatgcttggaaaatataaataataaattatttacagagcttgcaactcattgactcatatactcacgagtatgctaagagactaatggtcacattcctagcatgattcatctcgaaattatcatattgtgatggtttcttgcgtttgcttcctccaatactaatagaagaatgcgagaaatattacttatggtctgtttgataggcaggactggactggattagactgaaaatgattggactagactggacaagattggattatgctgaaagtaatctttggtttaagaatagacaagactattttatttatttcttttttaaaacaattaaattaaaataaaaatatataataataataaatgaaaatgaataatttgctgcaaaataataataaataaatattaaaataataaatttaaataaaataatatatgatatataatcaaatatatataataaaaataatttattatataataatcaaataatcaaatataaatatatatataatcaaatatatatcataaatatataataaaataatttattatatttttatttaataaataattaaaatagtaaaagaaaaatacttgaataatataacattatctatactaaataataatttaatcactaatttaatataaatattaattttttaaaatattgatataaaatttctaataatttaaaaagaaaatataattttattgtcatattgtttctcttagaatcaatttaagtaactattatttaaataattttattttaaattttgatagcttatgtatgataattgaaaattatacatttttaataattttaatgaataagtttttgataaaaaaaaatttataaataaatttataataattcttccatttaaattcttattaaatttaaaatatattaataaaataaagattaaaaaaaagataaaaaaaaatctcacctgtatgggattatttatctcaccctactagataggataaataattctaaacagttagaattagctggattagttatcccgagtttcaacatgttcaaacactggactggacaaattaacatgtctaatctaatccagtcttgcgtaccaaatgagctcttaaagtatacttaggcgctgagaaacttcttgaataaagtatcttgagaagattatttatattttaaaatttgaaaaaaaaaaattgtataagagttttctcataataacaagttcaattgatatactatcataaaaatttaaaa

SEQ ID NO: 35600 - DNA, 1179 bp, Cannabis sativa
ttttttttaaaaaaaaaccattaatttcttaataacaaactaatcaaccccttagatttttccttttcttccaattttttctcaatgtcattattcatacttatacacgtatgagaacacaattttttaagtatttttacggagaaattggggtttttatttttttttaataaaaatatagatagatgttttgatagaacgtttcaactatgttgtttttataagttatttaaaagataaaaaaatgtgtcactataagcattttgtgtaaaattttttaaaaaaagaataatttacgacgtaaatatttaaatttaactctcggttgcagataaataattaagtttaattttgacgataataatactcaagttatatttctaaaatttctgtagatattcgatcgttaaatgttaagctattatctatgtattattttcttattaatatatttaaattaatttttaactaaaactaaatttaataacttggaccaattaaaaattgactcgtagtcgtagccattaatttgacacttaaccactataaatcgaaattctagaaatataacttatgtatattatttttaaaaattaaaaatttaaatatttatatgcaaccgaaattaaacttaagtatttataaaacaaattactaaaaaaaaataaggataaatactattttggatcctgtattttgcaaaacttaccaatttgaccatctattttgttaaatgacaaaatggaccatgtattttccaaaattgtacaaataggactctgaactgattttttatcaaaataaaacttaataataattcgatctaaaaatgttatgacaaaactaattacattttctgtatctgttcgtgttagaaattgtgttgaaattgataatattaaaaaaataaatttttgaaaattgagctcagagttttatttttaccatttaacaaaacagagggtctattttgtcatttaacaaaacagaaggtccaattaataccttctacaaaacacaaaatctaaaatatttatgaaaaaaaaaaaattattacagccgtacacatatatgccctacttatatttattttgatatatacgtccacgtgctaaatatacttctatctaccaagcacattaacacttctatatatagacactccatatggtattactc

SEQ ID NO: 35601 - DNA, 3895 bp, Cannabis sativa
actgtgatgtgtgatttgataaaaattatgttacaaatgcaaaatgacttaaacaagcccctcgtgcttggtttgacaaactaaaatgtgctcttgttcagtgaggatttcaaaattctaaggcaaatacaagtttgttcttcacaaagaaaagtggcaaactaattctactcttagtgtatgtcgatgatattcttattacatgtgaagataaaactcagatttccaaagttatctcagatcttcatcatcaatttcttttcaacagttaggctctgttcattattttatagggtttgaagtgtttcaaaactcaactggtacttatttaacacaaagcaaatacatcaaggatttattggttaaaactaatctcattgatgctaagcctcaacctacacctatgtgttccagtgccagattgactcttgctgcaggaacccctcttgaagatccaacactatccagaagtgtccttgatgccttgcaatatcttacacttacaagttctgatattgccttctctgtaaatcgactcagtaagtttgtcaaagctcccacatcacaccattgggctgaatgtaaaagggtgttttgttacttagttggcacaatgaatcttggtcttcattccactccaattactcgatttgactgatgttgactgggctggctgtttagatgatcgaaagtctacatcgagttattgtatttatcttggcagtaatcttctcaactggtgttccaataagcaaagcattgtagctcgctcaagcacgaaatctgagtctcgatctttagctttgcaacaacggaggtcatttggctacaatccttacttagtgaattacaagttcttcttgcctgttgtcctataatttggtgtgataatcttggtgcaagttctttggcctccaatccaatctatcatgctcgcaccaaacacattgagattgatcttcatttccttagagatcaagttattgctcagcatcttgacattcgatatgtagactccagcaatcaaattgcaggcattccaaccaaaccattacctattcctcaatttgtaattttagcaaacaagttgacacttcagttccccaatgtcactagaggggagatgttaggaatatagaaaaatagttaaatagttaagattcgctttctgtttttgtaattgttttctctaaccaattttgatttggtttagctttatctagttgtctttttcaattgtaaaacaaccataatcgattgctatataaaagttttcaaggctttcaacaattagttgagccattgtatttcatcatcatcttctccttttttcctctgttttcttttttatcaaaagatcaagttctctgaactgtttcacttctaattattggaattatgcaatagaatacaactaagttaatggagatgtttgaggtggaggatgtcaggcaattcagaaaatgatctatgaccatgagagtatgcaagattgctagttttgggcaaagttactactaagtcggctagtcttacccacgccaaagagcatgtgctgaaggcaaattcattgcagaacaagcaatggaagaacctttggcgtactaaaattcatgaacggcacaagatcttttgatgttttatcatcaacgaggtcctcccaactagaggaatactagtgaggattttcaagagtcattttgatgttaattgcttctgtgtacaactgagccacattcctacagaggttttctgtaatgaccactcttgatctctatagttttgttgaatgaacacgttatgataagcaaatttgaagagaatgagaaaacatatattttatttttttttatcctacccatttagcatggcgtttttattttattattttgggaaatagctcggcacaattcaggcctcttcttattagaggatccaagtgttcaaaagattattcaacttcaatatttaagttgaagtgaaattgcaggcatattcaaacatacttaaatacaaaaaagtgaggtttcaaaacaatttagcaaatatttgaaaaggctgaatttttgtaatattgctagcaatagaaaatggtgtaatctcgaactcttacaacattcatgaagatgggtactgctactaactataacttaattaatatccaaaattcaaatagagagcctaacaattttcaaaataaagatatgcgagctgaaagtaccaaaactgaacagtaatagattcatgaatcctcaaggaaaaattccaagaaaaaaggaaatgaaatggtgataattttactcatggcgatgcaatagatcgcaaaactagaacagtttactggacacctggcaatgtcttgatgatatcagaatcacctgcaggacaaacaaatccatcaattttccacaccaatggcttaaaattcaaatctaataacacaaccacatcttgtagataattacctggatcaataatgctaaggcaagaaacgcggaagtactttccacaggctgttcccaagtccacattgtctatgaaacatcaaaataacaagagaatatcagagatggagatctttctcagacttcaaaaagtcattttcttcataccaatcattataaaaaattattgacattagaaaatatacatgcagttcaatagcataatgtgtaaaattcagatgcataaaaatatgaaatcagaagatttatcttaagctctcaatgaaaattgagtactagtctgggataccttgtgagagtcaaggttgataaagaaaaatcattgtctttccataatctaaatctagtactgtaaatacaatgatgaaaaattcttacaaatatctaacttgaaagcctatgaaccccaaattaagccactctcataatacacttttcaaaacttattaaagactgaaaacagataccaaataatgaaataatttttaattgtctactctacttaagaaaaaaaaaagaacactcttcccaaatgatccaacaaattcaaggccatcaaaatcattcaaaattgaatctggctgaacgaaagccaaaataaaataatacttacaatacataacaagtagttaaatataaagaaaaatcactacaaaatacttacttccgttgtaatggtgaactccaattttggcaagcattgcataatattcgatctcggatttcctcaggggcgggcaattgttcgagataatgatcagctttcctgtacaaaacaaatgaagcccaattcataactgatcaaacagacactacaaagtttaaaaaaaaatgataaaaaaaggcaaattaagatatacccttggagcttctgagggactcaagcacggtcttgtaccccagagtgaactttccactcttcaccaccaaagcgagtctgctgttgatgctctcgtgtgtcttcttctacaaatccaaataaacccattacagtgaggctccagttaaaggggaaataagaaaacattaacaaataatacaaaaatacaaaatcattattcagaaaaagaaggtctcatcgtactgttttcttggtggccaccatttttgatactcggattgctttccttaaatcgtcggcctaatgaaagaaaatcaagcggaacaacttaaaaagacaacgaaattgaaacaccaaatgaaacttgaccggcaatattatctcactacattattattaacttcgaactctaaacaaaagtagggaactcacagtaaattagggttttgcaccgatgcggaaatgaaaccctaggaatgggggctgcagcagattacaggtccagactaacttcgagccttataaatgagaaaactcgcacgtgccacgtctcacacgtattatcgtttatttatttattattattatt

SEQ ID NO: 35602 - DNA, 1694 bp, Cannabis sativa
  modified_base (614)..(630): a, c, t, g, unknown or other
  modified_base (1479)..(1482): a, c, t, g, unknown or other
gccctgctcgatgctgcatctcgttctaactcaacgtttctatgctgcgcctcttccaaacagcgtctcaggcgctggctttccgtttcataatttctttctcccatagactaggcacctccacgattgagctcttcatccattgtcctggggttctaaccactcccacattaagttctcctcgagcttgttgtccgcgtactaggacaaatgtcgagtcgagttctccgggaacgtgtggtccgtgcattggggctaccctcaagttgagcccttctggaacgggtggtccttcttgaccgtgggttggtagatcttctagagcccatgggctgtttcccagaacgatgattggtttcctcatgttgggtgttaacattttctagattttcagccgtgaaggaggtggtttttcttcaaaataagggatggttccttctaagctttttcacagaggctcttaaagaaagcaccgaactgttaacgcagattttcattaactaaatttgagcctcgcagtagtgatttcacacagaaaaaaataaaagctatcaaaataaaatatgaacatagagtttttacgtggttttgtagttaaaattctgcatagtccnnnnnnnnnnnnnnnnnagatttctgattgtttttcagggcctctcctatatgagtttttccgtcccattttcgatcttctttgtcactatttataattacatagtggatagttaattacaaagttgactgtaatatgtccactacaaccatccctaaaatcatgggatttggttacatatcatgtagtgtaaatgcggtttatgatttgaaaatcgtatagctgtgattttcccgcttttactaggtcaaaatgatcgtgttttaaatcacgtctttaattgttgtttgtagagttgtctcgacataaccttggttctagtgatctcaacagcgagctggggacattcttccttccgagatcgacgttgcatgtcttgtgtcgatcgcagttcttatttacaaagaattcttcgatactcatttgaatgttagcttctgacttgcgagggttgtgagtctcgctgatgctaatgggatgaagttatatgtggtcttcccataacgagatgggcaccactcttacttgttcttgagtcgatccgtctgtaacacttagtttgtattctaaggactttcgcaattgatatatgtctctttcgtcttctaatgtgtactatccttgatgcctcgcaattcgcattcagcgacatatggtttcttgctaatatgctaagtaccagtttgtatattagttccttgcctaagaccttacagtctacaggttacaaatataaactgatactcacgtaattaatgagttattccatataaggcgattgcatcaatccatattcccctttatcatgacacgtgtcctccactgagattaaaataagtatcaaaagaaaatacaactctttaaannnntgagctttagttataaggatattcaatctccattgttggtcctacatggttaattgttttcaatataatcttgagacgctaaattttgtcttccttatagattgttattctttgaagcatttagcatcataaagatgtcgaaagataagtattttctaagttttcttatgtattagactctcccctatggtgactacatagagataaattta

SEQ ID NO: 35603 - DNA, 7805 bp, Cannabis sativa
  modified_base (449)..(452): a, c, t, g, unknown or other
  modified_base (545)..(561): a, c, t, g, unknown or other
ggtaataacaaccctattattcgatctaaaataaaaagaaatattcaaacgactaatcatataacgataacaatcgtaataaataatcgtaccataaactatgagactaataaaaatatgagcatctctcatatatggacaaaaataatcatactactaacacaaacatgttttgagccaattgagatttccccaatctttgaaaaagaaataaggcaaaacccctttccacgaatgaataaacctccatatcacttaaaaatatattatattattttattttatctctttttcacattatttttggtactttttgttttaaaatattttaataaaattatatttttaaaattttcgtaagtacttattcattaaatgtcaagtcaatggtcatgtggcagttcctgattggtctacatcattaaaattttattttttatttaaaaatnnnnttaaatataccaataaaaaaaatgacaattgaataataacttgacacttaacagttatgtgtatctatagaaattttaaaaatataacttaannnnnnnnnnnnnnnnnaattaaacttaagtatttatttatcattaaaagttaaattttaatatttacgccgtaaattactcattatctttaatccatatataaagatgcattgcataaagtaagctatatttcttttctttcttttttcaataaaattttataaaggtggtatgatgatatggttctcaggaggcattatgatcacttacatgtttctccacttctccaaaaagctcaaaatggtcaccacaaaaccattacaaatatccagtgcaataatgaaccaaaacaaaccaaaacaaaaccaaaaaaaaaaaaatccaaaccaaaacaaattaaatgttattataatataactctagatatctctctctttcatatatatataaatcaaaaagtgatgtactttgcttctttttacagatcttttgtttaatatctttcggggatagtactttatgattggttagcgatattcctttaaaattactatattaaattatataaaattttatatttaattgcgtcaataacaatacgacaactagaagagttctagtgtgtctttcaacatttttcatgttacctattatattaaataaaaagaaaataatgctacttttccccttaaagccaaaactttcttcaccttatatcacaaatgtggttcttaacaatagtaaagctttactaatttacaccttaatttgactctatagactaaaattctcaccctttgttctattttattttatcacacttgatatatatacatatatattgctctttaaagtctctctctcctctccctctctctcttatttttttcctaccaaaattttttgttgtgatcttaagctcatttactcaaattggattcttaaatttcactatattacacctttgactaaaaaattctcaaccctttgctctattcccacttacaacattgctctttaaaacctctctctctctcaaaaagaaaaataaaaattgtgttgtgttgagttgttatggcatcaaacgttaagtattttcaaagccttggcataatccaaacaagttcagctcatcaacaagagctttcttcttcatcttcttcaggctcagcttttcccatactagttgtagcactactcagcattatgggtaccactttgttgttagcaagttactacatttttgttgtgaaatgttgctcaaattggcacattttcaatcccttgagaagatttacaatgttagcaacaacaacagcatcaacaacagcatcagtgtcaaggcaagacgacgagtccttcatcgccttttcaccaacaacaactaattcaatgtggaacaacaacaacaacaacaacaccaataatcgcggcctagatgagtctatcattcgcgaaatcccaacttttcaattccaacaaaacgcaacaataacaacaagtaattctgttttcggttgtgtggtttgtctaaaccaatttcaagtacatgacactttaaaatctcttcctaattgtaaccatgcttttcatttggattgtatagacatttggcttcaaaaaaattccaattgcccactttgtagaacatacattaatactaataactttgtttcttgtgctccaagtaatcaaatcattatagctccaagctcttctcctagagattttcagctctattcttctgataatagtcttatgggaagtgatgaagattttgtggtgatcgagttgggtggtgaagaacaagatcaagtaacagaacaagaacaagaacgagaacaagtaactaataatagagttactagttaccattctccaagaaagttgaagaagtgtcaccatgtttctattatgggagatgaatgtattgatttgagaataaacagagaacataataaggattattatgataatgaagaagagttctctgttcaaccattaaggagatcattttcatgggattcagctactgatcatagacaacttcattcaactgttgaagaaatcattagtaataataataagaagaagaattatacaagaacatctttctttccatttctacatggtagagtttcttcttggaattctattgtcccatttgagttgtgaatagtaagttagcttagaattcataaaaaatcttgacttgggttttgttttgtttaagttttgtgttaaaattgcaaaaaaaaaagtgtagttttctcttgagttgatattgaaagataaggtttttgtttgagaattcatgagttgatatcttcattgtgtttttccttcttcatgaatgagtattataatattttcactttaattattattaccttttttctttttttcctttttttaccttttgatgctttgaagctgtatgtaatctatattataacattttttgggaaattttcattttatggtttttaaggtataagtttataaaaatatgattttttttaaaataattattttataggaatttttttaaaaaaaaaaaagttgataaaatatataaaaaaaacagtaaatctgattaccctcataattactttgagtacctagttatccttacttaattttttctttaatttaaaataaaaaatcatatttttacacaaaaaattataaaaatttataaaatttgtaattttttatgtagggttttgtgtgttatcaaaactcaaaagtggtcaaatatatttttatttgatatgaataagaaagaaaaagagaatagaaaccaagcattgcttaaaatgtaagggagagagtgaaataattaaaaggtgaaatggatgagtagagccaaacatcataattagaaaatgtcatttcaattcaatgtgagcatagcatcatcataaaatgttggaagtggatattaagtcttaattattatttttcccaaacagaatttccccacatgtgtcactttgtcagattcaattttgaaataccaagtcaaaatatgaagtgggtacttaccaaattgatagtagtagtgactagtgaacatgtaaattaatgatatctaaacaattcaaaaaaaaaaggaaagaaaaaaaaaatcctctctgtaaaaattgcaactttagcacttatttagccaaacaagacctaatataataatgtcatccccaccaaaaaggaaaaaaattaaaaacccaaatggaaaacaagatcctaaggcagaaatatgtacaaaagtagaatgagaattcaacttgattgattactaacttgaaatttgtttgtacacttttaggggtgagattcccaaatcaaagatgaactctatgccaaatactataatagccaagaaccatgaatttatatacagaaaagaattaccacagagttagttcccctaatcaataaatttttcttttttaacacaattatccactaaaaaacaaccatgaatatttccatattacctaaaagcaacaacctcttcaaaaaaactagaggtatgcaaattatattttcatattttaggccattcaaagcttttaggcttctggatctattctcggggtttcgggaggtctgctaaaaatatcatcgaaatgaagactaatgccatctgtatctaaatcatccatgtatgtagttcgagatagctttcgagaattcctccagtccaccaagtgttgttgttggtcttgttcttcggttgtgcttctatctgatgagttatcgtagagattaaccgaatcacgacggttaaaatcaggaggctcgagaaaactcgcttgtggttgttgtagaccttgtgcatctctatcccaccacttagtcctatttggaagtgtcaaattcccgagttcctgattctcgatgtcactctccctgaagaacgctgccgatgttgatgccccgagattagagccatattgttgcacaaagtaatcaccccttgtagtgttatgttgtgtttggtgatccaagtttatgttaacttcatatctagcattatcttgtctcaagttgggtggagaccaataatcaccaaattgttgttcggtggcttcaattgcttcctcgatatctctcgaggaattagttcgatggtggtgaggatgtgaagtgtaataccaatcgagaagataagggtgagacttttgatcagcgtcgatgagccagagcgaccccatatggtagcccgttccttgactatattgtggcgtatctctaaatgttggattcccttgccacattctcgcgggagagtatggaagtcgacctccatgtccctgcctcatctgtcgctctctgaaagttctaaggttcgaaaggaattgcttcccttcagcatttggttcccatgaaggatagctactctgaaagctgcaaccgaaattatggtctacaagaatgaatttcgaggaaatcatacttgatttgatacagaaattatggcctacctcaagaatgacttctccattttcccttgagaactcctctgggagtgacttgcattgtgtggcgatccatagttactattgccatgtttttgaaaatcaaaggcgctgaagctgtagatcataaagaccgagaaaagaaaagtcatcgttattgtcaaagccaaaaactgataaaagctcactgaagaatcatgaagatgctgaaacaatagagaatactcacctgcaaacatcaccgacgccatccacatgctcggtgaaatctgcaataaactctaatatgtcgtccactcgctagacagcaaaacatagatcatattacgaccaaaacatattacgggttaatataattttcgatgatcaagaataaatacctgtgggacaacaaaaagaagtaaatatggagtgaggaaaattgaggccatctcctcaagtaacatcattccagtgtactgcaaaatacatagaagaaaaagaaaaatcattaataaactgttctaacattgaaagttgagatctttatatgataaaccataattttaactaaatcgaaaaatatttggctacttgcaagaatttgtgaagcataagaaccgaaaatccaatataacaatacctgaaacagagtttcaaactccatgcggaccatctcagtattttctttgcctcgccatctcttcggcatataatgtgtatgctggaccaccacagacatggcaccttctgggtcaaggacaagaagttcatcggtaacagcagccctgctaatagcggttatagttccaaaaacagcagcgtaccaaagcaagttgcgaccaaatatctgcaaaatatttcagttaaaaaacagaagaaagattaacgatacattgtattatctcaagcaaccacgagcatattacatggccctcgagtagagactcctccagaaacgcgatgataatcagtatagcagcaaagcccccggaaacaaaagatatgaactttgcaataatagagatgattggagatggaaattgctttaaatagtccgatgcaagtatcacactgctattggttcggtgcttgaacaagtggtccacctaagagatagagagaaattcattatcaccatatacggatctctaatctaattcactgaaagtgcaagcttgggctaatttatgctagggaaaacgctgcgtgtagaaaaggaaattactgttacctcgttgaattccctaaagatccactttgacaaattagaccatctacgagatgatgctgtgcttggatgattatagaattgttcagcatgcctcaagaagagataaactagcatgaaaattactataaatggcgaaagaagaagcattgcaacgcctactaccatcaaccttttcttcaaggtactaggatttgatataaaatcccgtcgtacacagaagtttctgtaaaatcaaataaacaaagaagaaaataagaaatgaaatgtacacatacaactacaagttttcagcaaactaagtcctcttctatgtttacaatctgggatttacaactcagatcccgattttccatttcaagcaatgtagcataatgtataaatcttctgaaaacagtaaattcaaattaaagatgttcaagagggtctggcaaatttcttatgttgataatatcaagagaactaagattttcggtacaatatcctaaggcgaggatactatgtgagtatccaatgagagaaacaactcgaggtttttttcacaaaattctatggctttagaagaaaataatctcaacacgaaaataatatgataaacattcttgtgcacataagttgaatttccaaatctcaacacgaatataaagatgtgaaatgcaacaagttctttgttcaatgttcaacataccgatcaaacatgctctgcaagatgcaccaatttaaagtccattcaagggtctttgtcagtatgagacgatgtcgctttccattcaaaccgaatttgacagttggaccaacacctggcacccactttgagataggaaatgcaagcacacccttgttaagcataccgatcaagtaattttctttgcgcatcagccgcatcaccacatcatgagcagatagatccttaacaacacaaagccgctctgaactttgtaattgcacaaccttttcgagaattgttgcccatggcatggtttgaatttcattgtctgtaacacgaaggctgcagcaatattgtgttaatcggtttcttttaagtacgaaagagtcggtacataaaaaaggttgtaaatcacaaataaacgcacctgttgtaatagaagtgacgtatgtcaagggtttcccttaactgagcgaaaaatctcaagaaacaaaagatccaataaatggaaaatattcccaaataaccgacaataacagctttagaaagcgttagaggggttaatgggtgtgcatgaagagcttccttagcaagatcacatggctttattccagattctattgcatccattccacattttgcattacgaagaccattccaatcaacgaataacaagaaaaacccagagaaacaaatggtgaaacccaagctaagaagctcaaccacccattttatgattatacaccaaagtcctttctcacaatagtaactgtaaagcttttcaaagaacaggtcgagatcagcaataggttccacattcaaactctcaccattaagtagccccgaaggactctcactaccaggactcggtatccttccataagcagataattcaatctcgggaggcacatcgtgaagtaaccctgctgtcaaagaagactgaccttgatctcgccact

SEQ ID NO: 35604 - DNA, 1204 bp, Cannabis sativa
tttttcgtagttttgaaatataataagtacacatatgatgtactctcttccataagtttttattttaatttttttaaaaaattattttagagtgtttgaataaaaataaaaataaattaattaaaaaatctttttggaagaaattacattttgtagcttcttctaaaaaaaatttaaaaaaattatttttaaaattaaaataatctacataatttacttatatatatattttttttaatatctaaatattttgaaaaacattttcattaaaaaaaaaacttcatatagtaattatctctacacggtaaaaataaattaaaatttataattatcttttatagctataagtaaaagtaaaaatttaaccaaatcagattgtaaagttactagaattgcttatttatttatttttgttttataatgatgttcattatagtcctgtgtcaagttatttcttatcattttgagaaacaaagtctgcaatttgcatgtattaataagatatacatgggaattgttcaatacatattaatatggattgtggaatatgagattttagaatttccaaaaaaatatggaatacaaatacaatatattttttccatacaaatattgaaatttacacttatataaatctaaaacaaaactatatatattacatatatttagaaaaaaagatattggtagtaatagtgtttaaattatacatttagttatgcttaattttacacacttaatttttagtagtaaaattctttgaatctcgttttcgtttttttttattatacatcccataaaaaatctcagttaaaagcaatagtggactattcacgtgtatattgtcaaatttttggtaattcacttataattttaattattaaaaaataattttgaatgtttaaaatttgtttgagagaatttttgaggtttcgagagagagaaatttctttagttattaatatgagagtattattattaaatatttaaaatttttaaaaattaaaaaaaaaaagaaaattaaatatgattggatttgatccattttttaatatatcgacgtatacatttgtttttgttgcctaatcacgattattattcaatgaatttgtatgataagcagcatattgtgttgataattaaattcaaggacaaaatgagttctcttatgtttcggttcacaatttgcatgaggaccttggctata

SEQ ID NO: 35605 - DNA, 980 bp, Cannabis sativa
aaaagaatacaagccattcttgtgaacaccagtcaggagtgtattgtgtgtcaccattgtcctcaacaagacagatatcagggtaaaacacaaaatacacattattgtctctgccaaacttagagatactcagtaggtttttagtgatttttggaatctgaagtagattatttaagatgagaaattgattactgttggataaaaaataggaatgaccaatgtgttcaatagacaaactcgttccatctccaacatatagatgtctgctccattgtaattagttcgagtcatgaaattttgtgcgtatggagtacagtgattagtagctccagagttaggataccaatttgagtcttaatttgtcgaattgtgagctatgttcacctgtggttgtgtctgctgatttgagttggatccaacactagtgaagctcttgtcaaatttgtaatagcaatcaacgacagtgtgtcttaggcgatgacagagttgacattgaactcttgaaggtggagttggaaaccttcctcctctgttagcagttggaattccacgattgttggaattaggttgctgaaattgagatccattatcacgagagctattgccagcataacctcctctggagttgttgaagttattacaatttgtcacaaggtacctcatattgcgattgaactgagccacattagcttcatgattcagatcttgatcaaacacatagttaggcacagttttggcaatattgacactgatctcatgttcttgataagttttctcgattcttgattcaaatgcaagtaatagagcctcaattttgacaattgtgtagccttcaatttttgtgttcgaggagattatgaacgtgtcatactcgctggggaggcctttgaaaatagtcgagatatgatcacgatcattaagtgtttctccaacactggctagaagatttacagtttgtttaaccttcaacaaatattcat

SEQ ID NO: 35606 - DNA, 1359 bp, Cannabis sativa
gaagaacagtttcagaatcaatattccaagatatttcagtgtctaagcagtttcagaatcaatattcaagaaatttgaaatggggttttaattagtgaactacattagaaccagtgatcaaacaatggaaggggtaagaggaaattaatgacaactggtggaggcgcaaacttaaaaaaaatcaagggatataaaattgataagtaaatttaagaatatagagatttaagaaaataaaatttacctaactttgatattacagaaagaatgatgcacaggtacgaaatcgtcggtggtgatgttggaacgaaggtaggaagggcgacgaaggaggagggctgaaatcgtagggtgcaaggggctctgacgatgttgaatggaggagcgaaggtggtgaggaagatggctactgttcaagtgaggaaggttattagataaggatttattgggaatgtgacaaataaatgaaggtataaataaaatacatagataaggagggtaaaaatgaaagtagttaacccaaaatgggtataggatgcaattttccctatcattatggccggtcatagtagttgatcgttaagtgtaaagtcattatttacatattatttttttattggtataattaaatcaatttttaaataaaaagttaataatttgaaccaatcaaaaactatcacgtgaaaatttaacggtgaggtacattcaaaagttttacaattataacttaagtataattattatttattagttctatctatactcttgtacttttagtagatttagtttttaccacactatgagtagtatttttaatagatttagtttttaccacattataagcaacatatatacgtgtagaaatattcttaaatctcactaacatcactttaaatacaattctgtctcattttctattttttattagaatcaatgacattttatcagaacgtttatattttcttgatttgtttcatacgtagagaaaatttattgaaattgcaatagtaattataagtgtgataacaacttcaaatgtgacattacaataattttgaattatcgccatataacaatgtgatataacaatgttaggatataatcataatctgatcatgttgccactgaaaaacttttattattaattattaaataattactctaatactcttttcctcaataaattacttgtatataatatattaattaataataattttttcaaaaaatctacaaaattaacttttccaaaatttgaaatttgatattaataataatattttttttcacattatacttttccaaaatttgatgtcattttttttttggaattatcccatatattatttttttaacttt

SEQ ID NO: 35607 - DNA, 943 bp, Cannabis sativa
ttaaatctcttattttttttaaaaaaaataatttatattttattttaatattaataaacaacattatgctagaattttttttatatacttgagtttctaattttttttacatttgataaaacataataaacaaatactactaattatttttatcaaatgcatataaacttatatttgaaaaaaaaaatatatatatatatataaaataaaatattatataaaataaatttttacatatttgtgattataataaactacattataacattatcattatcattataatagatcttaacaactcacagtactttaaaatttataatttaccaaacactcagctcaattttttttcacagttttgctataactattttttctcacagcacagctataactgcttttttccacagcacagctgtgccaaactggccctaagtggacttttgtaaacaatgtaacaggtatggtggaactatactttatacccgacaatatcctttgtaatgaccatgaggtataattttatttttatctataaatgccttatttagtcacaaaaatttatgttgtgactaaaaaattgtcactaaaagtagttattttttgtagtgtatattataagatattaaactaatataaatataattaattgttttgtatatttttaatgagtattattggtaatatcgactttataattaatttgatcttgtgcattggagcacaaataaaaaaattgggccaaatataactttatgttatgttttgggccaaatttaacataaaatatacaccatccattagaaatagtctaatatctttagtaaattgtgtttagcaagggttttttcataagtatgtgggtattaacttatgaatatccaattcatatatatatatatatattttatatgggtgactattcaatggttatatttttatt

SEQ ID NO: 35608 - DNA, 1309 bp, Cannabis sativa
tgaagctatcttattttattgatccttcgggttcttggaatgtgaataggcttcgatcctgctttgatggttctactgttaatgatatcttgagtgtacctttttctgggcttgagggtaaggatgagaaaatttgggggagggataactctgggctttttactgtaaaatttgcttatcacttagctcttgaatctcgagacatcccttcaacatcttcttcccttgatatgaaacctttctgggctagaatttggcatgcaaatattcctcctaaagtcaaacattttgtgtggagaattgttactaactctgtaccggttgctgttttgctctcccaacgacatattataccttctcatttatgtcatttgtgcaaaaatttccctgaaactgttatgcatgcattgttagagtgctctagagctaggaaagcttggaaggcttcagatcttgctcatttttacttgcaaaataaacattcggatattatgcattttctttctaatgttttttcaagtttggataaaggttctgcagatctagtgttgtgctttttatggacaattaggaattaaaggaataatgctttctttaatcggttcactcttgatccaaaggatatgtttgcttggtgtcaaagctttcttctgcagtatttggatgctcaacagaaacgatttacttctcccactccgtgtgatcagaatcttttggagacagaaaggtgtcttcaggcaggtatcagattttcacagatgcgtcaattgataatgtgaagcaggtttttagcttaagtgtggtggtaaagaatgattcagatcaggtgattgctgggttggttaagccggttgctgggttgattgcacctgttgtagctgaagctaaagttgtttctcttgcagttgcttggaccaagttaattaatctacctgttcatgctttgtattctgattgtaaggttgttgttgataagcttaataattgtaattggaagtatagtgtttgtgatgatgtgtcagttgctgttaacaactctttgttctttagtcctaggcctaaaattgtgttcattaggagggatgttaatacccatgctcataatttagttaaattgggcttaggattaaacagggagttattgtggaatggttctttaccttccttgtaatggcttgattgctttgtttctttgcttttgttcaatgaagcttcaagttcaataataaaaaaaaaagtgctggaaaagcaatatagcaaagatatgcttacaaaaatggttattattagcataaattcataaattcaa

SEQ ID NO: 35609 - DNA, 1363 bp, Cannabis sativa
ctcgttgtcagacatagatggaactacaacaaagtcagagtgagaggctcgggctcttttcagcatgctgcgaaccgaagagccaacttgacaggtctgcctagcaaaagacctcttcctggtggaggaagggatagcaggggagtcattgatatggagactggataaaggcggactgctcagggaaaccagggatggctgtgggtacatgggtgctttgcctttggaagtggtgggaagggtggtggaagtcataatggggtgagttgggagagagcagtggagggtggagtgcacagtttgagactgagtggaacaggtaatgttggaagtagtagcagtggtgagttggagaaagttagaggggagggggcagccatggtagtcacaatgaaccggtttgtttggtcttgaaggctatggtgaccaaggttggaaagggaaggttgttcctcaaaaggaatggagttggatagctcaaagatagtcttcttataaatggatttggcaggggcacggagggcatccttgtagcttaaactcggaggaaaaggatgatggtcacagtgatggagaaacttatcacacttgttgaaggtgtgtcaagcttaccacaatgatagcagtagttttgaataccctcgtaaaggaacttgagccacttagtgagagatagttttctaaaatggacattcattccacggtggaggggtttggtggtgtcaagaaggacacgaacacgcataaagggagtgactgaatcatagagagaaatgagatggacctcagtgagataaccaatagcatctgcaacaaactgtgccagaccataggatcgagacccaaatggaataaaattgacctgaacccagagaggaatgtatcgaagttgagagggaaggatggtgtcgaagccatcagggatagcaaatatcatgagggatcgatcaaagtgccatggctggccttccatgacccttcgacgatcaccctcacaaccaaatgaaccaggaaaaggcctgaatggtattcagagaaagagaaggggcatcgggcaacccaggcttcattcatagctttctgaatccaatcaaccttcaaagttttgggagacaagatcttaacaaccaaacaatgggattgggactgaggttctggatgtatggaaacatgatcaaaatcgtggacaagagcttctttaggggttaggtgggtagattgggaagtagggaagttagccatgggtaggtacagaaaagaaaaggagaaaagaacaaaagtagaaaaagatactggtaacggataatctgaaaacaaactgcagggctttaaatagaaaaagaaaagagagatatacctgaag

SEQ ID NO: 35610 - DNA, 1564 bp, Cannabis sativa
cttaattgtaatttactatatagtatttataagtaataagatataaattttacaagacagatcgaacgtgacacttataactttctttttaactatatttgcacacacctaaattgggtacacctaagctctcaaatatttattattcctatctgtattttaaatgttgagaagcatgtgaatatattatacatgtatatagtcctagaaattatacactacatatgcacaaagtaatccatctcggaagaacttttatatatgattattgagctacttaaatagtatacataatgatatgatattactttctaaaacaataatgttgggggataaaacacatgtttggaaaatttttaaataatttatactgaaaataaaatttaaataatttattgtacaattattcttttatacatatataaaattaattattttaaattttattttcagtattataaattatttgaaaacttttaaaattgacgtaaaaaatgacatcactactataaatagtaccattaaaaaaatctcaaagtttatgaggagagtgtgttgtagtaagcagacctccccaattttaaactttttaagagaaaattgatgtatagtttctaaatatttatgtttgatgcagataagttatcaatttcaaaaattagcagtaataatttacaagattacgttttttgtaagtctgttagtcctttttctaattaatatgttagatactaataaaatgcaacatgttaactttttattgttccaaattataattttaattaaaaactatttagaattactaaaaaattaaaacaatattttaaaatcataaaattattttttctttttttttttcttcttcatcttcttctcctagccacgagagctctaccagagcaccaccacaagttgtggtcattgtttcgacaacaacaaacaaggacacgggtcacgggactagggatctcgagacttagagtggactccattttggtttgcagtgacaacaagggggctcgagggtggaaggttggggtttgggtttcaagttttctaaggttattcatctcgagcttggactaccaaggaaggttggcgtcgagtatggtcgtggctgagagagagagagaaagcttgagagatcgggtgcaagagggaggactgggttttgcgtttcaggactcgaagattccaaatttatggtttgcttggaccaccgccgcggagatgtcttgcccccgatcgactaagccagcgccacacgagataaggcagagagagagtgtgggctgataaaattagggttcttcccattttagttttttattttattttaaattatgttcagttaaaattataatttggactgataaaaattgatatgtggtattttattattgtcaattagaagaaaaaaaaaactatattacatattttaaatgcacgtatatatactttactatatatgttgaatttgtcgtatgttatggggcatctttgcaagctttatagttaaagaatttaattttagagataagactagttgatcttatttcctctc

SEQ ID NO: 35611 - DNA, 1614 bp, Cannabis sativa
ctccatgttgatggaagttgcactgaccaactgtccaatgtaggtatttcccttacaacacctggggaaataactgtacgaagcaatcaaattcagcttcaatgcgtcaaataatgaggctcagtacgaagacctaatagctagcctcaagctggcacatgaagtgtgggctgaccacctagacatatttagcgattctcaactagttgtgaatcaagtccaaggtgaatacactgctcgaggtgacaaaatggtggcctacttgagaaaaatcaaagacttgttaagttggttgaaaggctacacaatcaagcagatccccaaagaatagaatgcaacagtagatgcacgtgcccacctagtgagcagtacaatagctgacaaagtaaacccggttcccatccagttcctagaagaacccagcattgtcatcccagaagagatcaacatgctcgatgacataccaacatggatgacacctattgcagcttacctccaaaccggagccttgcaagaagacaaaaatgaagcaagcaaattaaggagaaaagctgctatgtacttgatcctagatgggataatgtacagacggagcttctccatgcctctcttgcggtgtgtcacaaaaattgaagttgaacggcttatgatagaaatgcaagaaggcttctgcgacaaccatgctggggggcaaatcctatctaaaaagatactcttacaagggtacttttggccaacaatgatcgaagactcgatggactatgtcagaaaatgtgataagtgccagagatttttgaaaattccaagagatccacccaatgagatcatgatgatgtagtctccttggcccttcttagtgtgggggatagaactaatttgtcaactcccaaatgacggaaatggaggggtacaatttgttatcctcgcagtagactacttcaccaaatggatagaagctgaacccctagtgacaatcacttccaagaaggtccttgaattttttgttatgccagttcgcccttccccaaaagattatgttagaaaatggctagcagtttgacagtgacatgttcactgatttctgcaacagacatggcatcatcaagagtttctcagccatggcccatcctcaagaaaaggggcaagtggaagctgtcaacgaaaccctcaaggacactctaaagaaatgccttgaggatgttaaagacaaatggcctgaatttctcccaaaggtcctatggtcacataggactactaagaagacagcaccgagcaaactccattcgctctagcttatggctacgaggcaatggttcttgtagagctagtgtcaccatctcacaagagaacaacctttgaccaacaaataaaaaacaccctactgacaaagtcccttgacaaagtagaagaaagaagagaacaagccaacctaaagctacaagcctattagcaaaaggtagcaaggcacttcaacaaacaagtgaatagtagaaaattttataggcgacatggtgcttcgaagagtgttcctgaacactaaagactcagcaataggagtgtttggacctaactgagaaggcccttatcaagttacagagataactagtaagggag

SEQ ID NO: 35612 - DNA, 1931 bp, Cannabis sativa
tttcaattgtgtgttgtctcaaagatttctcgatttggtgtttagttggatgggatatagaggttggtctcttgatatatatatatagctggtgattttggttaatagtgaaggggcagggcctaattcaaagattcaataccaccatcttagcagctgtgatttatcacctttggctcaataaaaacaggtgcatcttcaatggttattcaaaattagtatgtggagttgttaatgatgtaaagaacactgtaaagtataggttacaaattgtaaacaaaagaatgatgtcagctctggagaaaaactatctgcttagattacaatacatatagtttgagaattatttttctgtgttttattggtgcttgtaattgttttgtcgattaataaagtcttttcttcttgataaaaaagaattatcaatattattatattatttatataaaatttatcagtgtatatatacgataagtttattatatatattataagtttataaatagaagaacaaaaagtacgatacaacactctcctccttcttcgacgaaaaccttctcctcctttatccactttctttgatttttaactcaaaatctagcaatctaagctaaggtagtagcaggatagtgaatcactgaagaaagagagtttaaggtaaggtttaatttcattttaagttaaaaacgattagttttatatagtggctttgtaattgagagcggttatggaggttctgacttcgtagaattgttctttggtagctatgggactagtttcgatgtttacttgttgaatttaaggttattttgagttagaaatcaagtttggaacattttaaagcttagtttgaatggtaatggtattttccatttgagggctcgattttaatttctgttacgtaaggatggtagtatttatgatatatatgtgccttatgaagttagtagtgatttggataggtttcggtggtgttttggtgagtgcaaaaatttggatttacgtgtttcaccctttttggaaattcctaggagatcaaaaatttgtatatttgtcataactttttacttgggtgtttgttttgaatgatctttataccattcgaagcttgtgacgagctctattatacggtgtatgttttagagacaaaatataagttttattttagtgtatttgtgctacaggatttcgtaggaaaccctaggatgtcatttacagttgttaagtagtgtttgaggataaacacttattggtttactgttgttatgacttggccgagatcattagagatagttctctacttgggttggccggcatgtatgaatttgaattaaatgtaagaaaagtatattgtactgcatagcatgttatgttgtaatgcaattaatattgttgagacttgattgatattgggattaagatatggttattattgttatataatgaaaagattgattgattaaataatgataatgtgatgataccatgaatgtgatatacgggctcacctgattgggtgatgtgatatgcttggcgtcgtaccttattaggtatgggcggcagtgatatgaaaattgtcaggttatggcacagaatgaaatcgttgtagggtttcctcctagcaatgtatcgagcgtaagtacgggcgttagtgatataaaaattgtcaggttatggcataaattgaaactcttgtagggtttcctcctggtgacgtatcgagcgtaggtacgggcgtcagcgcatgaatttctattcaggttgaatgacacacttgaatcaggttatgatgtaagactagcaaaagacttgtgtatgtatatgtgtatgtatgtaagtgcatgctatgttatgtgattcgtatactatcaacactagtacggtagtggtacaaagtgcattggtacgtatatgatgttcaatgggtacaa

SEQ ID NO: 35613 - DNA, 1510 bp, Cannabis sativa
gaaccccgagtaccgctaagggttgtaccacacacaccccgtaccattccgtactaatactggtaacatcgtaacgtactctttaaacattgtacactatactaatgcactctgtaccgctaccgtattagtgttggtagtgtacgaattacaacaagcatgcatatatatcacacatacatacattcgcatatatacagtatcttctatattattcttacctcatttccaaattcaagtgagttggccgacctgaacgaaaaacttcatgctggatggatgccctagtcacattacataaacgggtaaacgacgcgccaaaaccctaatctaggaaacccaaacccctaactaagggttttgctattgacaaccaaaataaaaataccctaagtatgaaggaattaaccaaccaaggctctaaaaataacacgaattgacaaaatagcttgttcgggaacctgtcccaaaaccggtgaactggtttttcactacctgtcaaactggttaaccggtttgcatcaggtaacccaaaacaaaccaatatttgatcaaaacgtgcccaaacttcaccaaactttctagaacacctataataacctcaaacaattaattttaagcaatagaaacaagaaaaagcatactcaatccaaaatgtcattgttgagccaaatttgagttaagaattaaacaccaaaacaagtagattcagccctaaaaaaaaccttattaaacaacacaaactaatcacatatccattctaacttacacagcaacaaaatcaccaatttaataagcttgaaccaacaatttgtactaaaaaacttaacaagaagaaattagggccacacctcactttctcctcacaaaagctactgaattcccagcaagaatcaaacacaacaatctgactttgaaccctaacccttggttccttctttgtttgaaaagagaaagaggaacgagaggttctaaatgtttcttgtcttttctccaatttgacttttcttccaattggtaaactcctaaattaattaatctaggctgaaaataataaaggctaggtgtcactcatatattcagccacataccccttagccaaataccaaaatacccttgctctttaaacataaataataataagcctaagggtaaaatagtctaaaccataaccccgctaaattcatctcaaatatttaaccataaccatccggtatttttcgtcatcgccgagcaaaatcataaaaattgcataattcacctataacacaaataatacctctagtggttaataaaatctccaaaattgagaaatcataactctagaacccatttctaaaaatgggacccacaacataataaactcaaacataattataaatatataaataattaactctaattgcctttactaattcatattccaaaatgtggtcattataaatagtagcaaagtagaggagatattttcaattccaaagtgttttatcatcttattctatataagatg

SEQ ID NO: 35614 - DNA, 1762 bp, Cannabis sativa
ataagctcgggccactatgttgtcaatattttctgagcagagatatactagctgattaagggccctctgtttagcgaaattgtacatgagaagtggctcatttaggaaacaaactcctcagcataattttgtggtcgaccctcatcctcataagcatattgttgtggaatatatgcttgatgagccacctctccttcttcctcatcctcattctactcttgttcagtaatatttttcttctatttaagggatttaatttcggcttttaatttctcaatctccctctgttttataagccacaacatcagaaacttcccttttcttcgcgccaaacaatttagatgccttggcaaagaacctgtaaatcaataaataaaataatctataatttattttgtataactaaggaaacaacatttttcaagtactagcatacccagcagccctgaaacgtccaggatgctctggtgtcccgagcgcctgcgctagaatgtcattttggccatggacctgaacttgtctctgagtaacttgctcctctagttgagcctaatgcacatattcaagaaattagtatatgatttatatatattaatccatttttagtacttaatcaactattaatatatacttactatcttttcgtcaattttcttgtcgtaatcagtgacaagtttcgttctcttggtccgagattggatccaaacacggtcgcgtgggggatcttgaacctcgagattctttttctgtattgttttataaaaattaaatgagtacaattacatttgaagcacattgttagaaattgatctttcaaatcatacctgattttctgtcatatgttcaaatcccatttcattgcactttcaaatgttttaggtccgataatgcacctaaattgatcttcaaggacctctttgccaaatttggaataatgcatgatttcacttgtgttgaaacccttgaacaaaatactattgtagaaaggaaacaccaacatctcctaaatgttacaagagcactttattttcaggccaatctccttatctaattcttgagggattgtgtaatgactgcagcataccttatcaaccgcaatatttttcttataaatgagaatgaaatatacatttgatctactaaattttaaatatatttttatcatatgaattagagttctttttattttgaaaaaatatgtattatattattaaagtacaatttcttatattaaaatagtaactgtatatataatttttttaaatatatataaatatgtgtatattgaatttgatcggatcagttattttaaatatattatataaattgtatatttttacactaaaatagtaatattatatatatatgatctgtgtgattttaaatttttcaatccattctaatctgagtaaatggagaggaaagatctcctgcgaatcttattttgtggatttgataagatcatgaggagagtgagagacatagcacgagaagaaatcaagtttaattttagggatttcaaactataggtgagaaagatgacaggatagtctttaatattagagtcatataaattattattattagtattattagcatctaatatgtattttaaattaattaagtctctctaccgattattagaagtagaatttcatttttgtcgctaataaataataatgctattacttttttttttttgaaagaacctcagttcattgattaaacccagaaaagattgggattcacagggggcaatccc

SEQ ID NO: 35615 - DNA, 1316 bp, Cannabis sativa
accgaacactgctggaactaaaattggcagaaccaaaaatcgaaaaagccgctaatagttaaaacctccattgaacggccaatttttttgaataataaatcgaccacaaaatctaaaactaattgttatacatatatattaatttattaagtttttttagtttatgtattgtagttactgataatatataataataatatattattattttattaatattaaagttaagagaataacacaattaatttttgaacaattaatttgtatggttgtaattgtagaatgtagaataatgtacttatagaataaatttgatcatattttatagaaagaaaaaagaaatttgatttgggcggtttaaaccgagagcggtttaaactgaccaaactgaggtttgaaacagtcggttttaagaaaggttttggattagtcggtcggttttcaaattgcaccaatccagaccgaaaactgaattctaaatttttatatagaaaaaaatgaccaaatcgaccgatgcttaaccctagttttctaaggttttctagctaacttagttaaggaataaattaatttaattaagctatcctttatccttatacaattagaaatttctctctctctctctctctgcctctctagaacccaaagaacccaagggttttctttggtttggaataaccttagctagggaaaaacaagataaatgagtagcaattacgaaggttcaacagaggtaaaccctagactacctttcttttttattttgaaagaaaaggatgttattttgataatgcaatttttagagataggttatgtttgaacctaggttgttccttgtttattttctaagttcaattgaagttgtttaaggtttatttggatagtactttacggctatttgaggtgttgagcaagtttgagttcaagaactcaaatttggctcaacaatagtatttttcaaattcttgagtttaaactgttgttattgcatgaattgtgtttattggaatgttattaggttttatggagagttacatgtgatttggggtaaaattaagcttggaattatattttttaggatttctgcagaaaaatggctcactgttttttcgaaaacagtgaactatttttccaggcacactactacaaaaggcagaattcacgacggtcctaaaaataatttttttagggaatttttgctaaaaagattaagcaaatgtttaaaaccgttaggaaaaatttggtattcgcgacggtttaaaagaatagttaatggaatatgcgacatttttaaaccgtcaactcttaaaaaattt

SEQ ID NO: 35616 - DNA, 1462 bp, Cannabis sativa
aaagagaaaagatgagaagaaaaattgagagaaattttgctatagtttttctactcttaaaattgcacaattcactactaaaatgagctcttatttatagagccataaaatgaccaaaaataaataaataaaagtttgagattataaaataaatattaatattaaatttgacatttgacatttgaaattaaaaataaaattaatattatttttattatcattgctatttttgtcttctactctttggatgaaggttgagtgtgaaagaaaatagggttgatgatgacctagacttatcatcattgcatcacatgctttggaagagacaaaattgatgatgggcttcatgggctaggcttgatctttttggattgggttgctttggacttcaacaaaaatgtcaatttttcttcttcttcttctcttttctactttgctcatttttctttctttcaacaaaaatacactttaattcctacaagaaaatcataaattgaatcaaaataaaatattttcatttataaaatatattacaataatttcatgaaaatatcaattaatactcaacttatttcatcatttaaaataaataaaattatatttttaaccactaatcataacccccaactagcttattgctagtccctagcaattcaagcagagaaaaagaataattgagtcgaataaataagtcaaaccaagcaaaagcatccaagcattttcaaaatattagtagagagtcaaaaattgctatcaacgttagagttgtgtgtgtgtgcaccaaacgttatctattttatttcaagttttaacacaaatagtatcaaaaaatctcataagtgtaaaagtctcaactctaatttcctcgcaggtattgaaagtatttgtacagggaaggatgacactctttgaagttggaaatgcagcaattaacacacaaatgagagaggataaatttttaagacaaacaatttgaacaaatattaatgacaagatatacatagcaaaccaatagaattcaaatgacaaacaacctttgagatttacatgaaaacttacaaagtaaagagccaactagctaactaataataaggaaatacaataacaaacctatttttttttagagacaattgatgtttttttttttggaattaaaataaactaacatcaaacttttttttttttttgaatatggaaataatggagaaaaaataaaaataaaatgatgttacttttgctccttttttatttttattttttttttgagaaaaaaaaaatggagactacttcaaaatcaaaataaaatgatgttgctcttgttctcttttttcattatttttttttatgatttttttccttttgttttgatgaatttttttatttacttttttttttttcctttatctttcttcttttttttttttttgacaagagacaacatgtaacgcccaaaataattagg

SEQ ID NO: 35617 - DNA, 3241 bp, Cannabis sativa
ggtactctcaacgtagaaatcaaaattttatagtttatatttattcattctcccatgagcatgtgcataaacaaaaaatagatgcattttattatctcaaaataaataaatttacacaaaagatgttattttggtaacattttacttcaatttctttattgaaaaaatgaggataaaaaattgaacaagtgcctaaactcaaaagattttattgttgtaattctttcccaattttgttacattaatttctgtaacgttatctctatgtacacgttggtctattaatttcacacatcagaactctgcatgtcaacaacagtggcatttctgtccacgtcagcattagcatattcaatttctttaacatagtatttattagtactcaaacaacataagaataaaataagaacaaacaaattctgaacatgtctaattcttctagccggatcacaataatagagtgtggctgctatgtcactaccatgttttcggccactatttatatatttcaaattaaacttgtaaattgtaatctttcattgtagacaaacttttcgctggaaagttaaattgcaggccaaaaaccatttgtcatggaaatggaggttttgtttaataaattattttcagaaaatgccaaacttggagtatactccacaaaccacaggcaaggcatatgtaatatatagataatgaattaatgattttcaccttagtagatgatatgattaagcaatctagcttggaacaattgtgatgatatcatatcactattatttatgacttttaatcacaaaaacaaatgagaaattgacagctttgatgggcacgtgtcatggaaataattaaaggaaggtggctaatttcttctgacgttgccaacgaagaagagtgtgacaattaatatcttcattttgttgacccaacttaactaattgacctttagaccaatactaatattactacccaatgagagtgagagaattgtttctttcagtccagttcctcacgtgaccagaaccccgcaaggttaggacataattggtttgtgggctccacttcaccctgccctagacacaccacgagtttggagtttcactttcactgcatgttcatggtttggtttggttggtcacatgaatataaatatatactgttgttaatatacactactcctgtatactcaacttaactatataataccataaatataatatagtatactaaactgatggactggaagtagtcaagtaggtaggtgatcatggacataggaatactactctactcacatcacatgatgccatcagttataatattaatttgggaataatattgtaagaaaccaggctacacaaagtttgtgtttaggaagttacagtttaaatattaacaaaaacacactactaatattgcaaccctgagtgatgtatctgaaaatcggtccttatttctattgataaatttgccaaattcttgaggtattaggaaatacttaagtcttgatctcttcaatcacagcaattgttattaatttaggtaactctaatgcatccctcttctcaaatcctcaaaataggtaattgattctggtgccacagatcatatgagaggtaatttcaatctctttttcacttttcagcctcatagtcccactttgattattacgtaagttgatggatcaccatctcctattcttagatctggcactgttgttcctacacctcagctcactttgtcatcagtcttacatttacctaatttatcctttaattttctttttgttagtcaactcacttgtaatctaaactgttgcatctcattctttcgcgatcattatttgttttaagatcttatgacgaagaagattattggtaaatgacatgaatctggtggcttgtatgttgacccacttccactaacgtttattacttgtccgagtgttgcttctgcttttgaagctcattgtcgtttgggccatacatcactttctttactcaagaaactttgtccacaatatagtaagttgtctacattagattgtgagtcatgttatttttccatacatcatcgtgttagtttgagtcctcgagtcaataaacgtgctaatatttctttcgagttagttcattctgatgtttaaggtcttatccttttttttttctaaacctggattcaggtattttgttacttttgtggatgattattctcgtgttacttggttatatttaatgaaaaatcgttccgagttattttctatattttgtgcgaagatttaaaatcaatttaatgcgtctattcgtactttgtgaagtgataatgccaaagaataaacatctgcttaattcaatcttatatgacctctaatggcatgcttcatgaaacttcttgcattgatactccaccccaaaatggtgtaacagaacgtaaaaattgatatcttcttgaaactacctgtgccctcttgttttaaatgcaagtcacctttttgggccaatatagtttccataacatgttttcttatcaatcacatgtcatcctttgtacttaatgatgagatcccatttaaaattctttttcttggtaagtcattctttttggttgctcctcgaatatttgacagtatttgttttgctcgagatgttcgtccacatggtaccaaattagatcctaagtcattagagtgtgtctttcttggttattctcatcttcaaaaagggtataggtattattgtcctaatctcaataaatatcttatttctagtgatgttacttcttttgtagaaaatacaccttattttttatcttcacttactcctactcgtcaatgggaggatgatgatttattggtttatcccgtcacatcctctatgcctaatacatgttctgacgagtttcttatttcttcacatgcctctatcacacctccaccacttcctaggcctcttataagtgtacactaggcatccacctcccatttcatgtcctgcacttgcatctttgtcattagatctggaactcaaatatgatcttcccattgcactacataaaggtaaatgtgaatgtacatatcctatttcttcttttgtttcttataatcatctctcctcttcttcttgctcttttattgcttatcctgattctatcactactcttaaaactgttcatgaagcaatgtctcatcctggttgtcttgctgcaatgatagaagagatgaatactttagttaaaaatggtactt

SEQ ID NO: 35618 - DNA, 3709 bp, Cannabis sativa
ttattgccattccaagatatttaaagggtaaagagctttttttcaaagcagacatatcaataatattatccaaagaaagagagtccaaacctgctccatgaacaacaaattttccttcattagctataagcctagaagtgttcaaaaataaccaaaagccacttagtagtaggagagcagacttgaaatcacccttgcaaaagagaagcaagtcatctgaaaaacataaatggttaagtttcaagctcttacgtctcgggtgaaaagcaaagtcacaaatctttgcaaatttagccatgattcttgataagcactccatgcctatcacaaagaggagcggcaacattgggtccccttgacgaagacccctcttagactggagatacccatgtaatgaaccattcaccataaacgagaagcgaggagtagtgacataaaccataataagctcaacaaacttctttgggaacataagagcttcaagcattttcttaagaaactctcaatccactgtatcataagccttctgcaaatcaattttgaaaagacaagacgatttgaccgcttttctttcatagcctctaaccatatatgttgtgtacaattcaccttcctttgataaaaccactctggttttcataaataatgtcaggaagcacttctctcaatctgttgcaaatcatttttgttgccactttatagatcacattacagcaagcaattggtctataatcattcatagactcagggcacagagtcttaggaacaagagtaatagcggtagcattaatttccttcaataacttaccagagttgaggaaagagataacaacattcgaaacatccttcccgattatatcccaagtgtctttaaagaaggcactactataaccatcagggctaggagcttttcatctgggattgagaaaagagcatgcttaacatcaacttctgtataatctttaatcaatttggcagcttgaaagttagaaataacaaccccttctctcacaatcttcttgttcaccttggttgtactagcattccttgtaccaagcagagtctggtagaaatcaagaaaggcatgtatcactttatcttgctcctctacccaattgcctctcgtatctttaattgagtagatggtgttttgaactcttcttttccatatactagcatgaaaatgtttggtgttatcatcaccattctttatccaagctaacttcgctttttgacttaagaagagtaagtagttctggtgattctcattgtatcgcaatctagcctctttccccttcttcaataactcctcattaccatgatagttttggagagcttcttgagccgaaatcaactccatcaaggcaatgccatctaatgtctcaatattccctttccatcttgaataagagctctcaacccaactttcatcctttttatctttcaaaccaaattaaacatgggagttttggtcacatttttcttccaatagtcactaacagttgcattaaattagtttaagtttttccagaaattaaaatacctaaaaggcttgtgggtattattaatttcaggataaactgaaaccaacataggacaatgatcaaagtctccttctgggagaaaagtgacttttcagccgtcttataaagattaacccacgaagcatttgctagcaccctatcaagttttgcaaaatttctatctttcccttcttacttgttattcgaagtgaaaaaacttctattgaatttctcatcttctaaaccacaattactaacacactgctggaaaggaactaagtcattagtgttaccacgaaagttaagtctttcattagtagcaagaacagagttaaagtcacctcccacaacccacaaattcttattatttgtggccaagtcctttacaacactccataaatccagccgccctttattatcattaaaagcatacaccacagtcactgcaaaactaagactccttttcggtttcaaaatacaatggatccattgactagaaccacctttaatgtcaacctcaaatgagttaggattctaagctatcactattctaccattagggtagtaggcaaggttagaagtaaagcaccactcttggaacatattaaggtacaagttccccattcgagaagccttgacctttgtttcgaggagagatcaacaaaaccaatattcttattatgaataattctcatgacatctttttgtttattagttttgttaatccctcttgtattccaaataaacaacttatccatttattggtggaggatctccccctccatcaataatggacctaaccttgcaaaccacttcacccacttgaactcgtggcatttcatcctccaaaacttcaaatgtgttacttgtttggactttccagttcttagcaatagtcattttccccacttaactgtttgaaagccatttgcatcttgaatttcaatttgttttttttttgcatcaaccaccaaagggactttaggcttccaaatttgcttaacttgttctatctttttctccttcctggaaacttcctttgtatggcctatgcctttgcaaatgtcacattttttaggtttccattcataagtgacgtcaatataaactttttctcctttctcatcttaaaaatgaatttgattaggaaatccaagtttgatgtccatttcaacaagaacccgagcatactgtagcctatcccgattcaatattgcttgatcttgttcaatcatattgccaatcatgctaacaatttttgccattgccctttctccctaatatttgagttcaagttgtctcaattgaacccaaatagggactttccaaacttcattcttagtaaattgagtatcgggatcccaagctttcattatcaacgatttcctatcaaagaattgatatcccccctttggaattccatcctgagcttcaacagtatggaatctaacaaggagaatgccatgagccaataagctgattttatcaacttgtgccttccaaatccttctaaagaaaccttcaatgacattaatagggggtttgaacctaaaacatagcacacaattgcagcattccagaaatttactttatcaacaatatcctcatcacagattttagcacatttacccatttcccccaaatcctctttttcaacgtgtaatacagggaacttaaggacattagcagtacctgaaatgtacacccgagctcccaaaatttcaaaaaaatgttgctcgaatacctggttttcggaggagttcacgtttagaggctcttggagaaagggatacaccaatccctgtctccgattaggttatgaactttgatttggggtagcatcgtttccatctctgttatctcctttattgttgcacttggaagctcctcaatcgcatcctcaaattctgaatcaaagaaggcaatcgatttcactcccaagagttcatcaagagatttggtcttcttcatcaggtctaaagacaacgggccacatttcttctttgccttcggactggtcggtttcttcttcggtgccttcaatctggtcgctgacaactttgctgccttggttgtcctttccgatctccttaaacgaggtctccctgccatagctgactctgccctagcagagcaggaaacacacgttttaagttcttaatcatagtgtggaagattgtgaagaa

SEQ ID NO: 35619 - DNA, 2359 bp, Cannabis sativa
ggaggagctaagtatgcagtagtagcagtcgagttcttcactaaatggatagaggccaagcccctcatctccataacctgcaagaaagtctcacaatatattttcgctaaccaaatttgagcctcaaggtagtgatttcacatagaaaaaataaaagctgtaaaaaataaaagcatgaacacatggtttttttacatgattttgcagttaaaattctacacagtccacgagttaatcttattcagatttttgattgtttttcagggcctctcttgtatgagtttttttcgtcccttttttaatcttatttgccactatttataattaaatagtgggcagttaattacaaagttgactgtaatatgtttacaacaatcattgctaaaatcatgggatttgattacatatcacgtagtgtaaatgcgattatgatttgaaaatcatatagttgtgattttcctgcttttacttggtcaaaatgatcgtgttttaaacacgtccttttttattgtatctggagttgtctcgacaaaagcttggttccagtgatctcaatagcgagctggggctatttttccttccgaggtcgacgatgcgtgtcttgtgtcgattccagttcttatttacaaagagttcttcgaagctcatttgaatgttagcttcttgacttgccagggtattgagcctcgctagcgtcgacgtgatgaagttataggaagtcttcccatagcgagacgggcacctcgcttactaggtcttgagccgatccgaccgttagacttagtttgtacactaagggctttcacaattgatatatgtcgcttttgtcttcctatgtgtactgtccttgatgccttgctattcgctttcagtgacatatggtttctcgcaaatataataagtgccagtttgtatattgattcctcgcctaagaccttacagttagcagattttaaatatactctgatacttacgtaattaatgagttattccataaaaggcgattacatcgattcatattccctttatcttaacacatgtcctccactgagatggaatccgaatctcgggtataacacattcattaataagaattaggaatgattattgagggtggcgaataacctttaactagtttctcatatcataatctcaatattaatttgtttgttttatttttatttctgctattttaatcttaatctcaaaacccctttttctaactcttgtcattaatttttgaatgattgaataaatatagtcctcgtgggttcgacccgtacttgcctttatactgaaataattgaaagaattggaataaaaaaaaatatagtaaatttgatatggcatacgacacgcatcaaatacccacactaaaagaaatagtaggggtacgagagattcctcccctaaaactgcttcgagaggtcccccacaagacccgttatttggaagcaaaaccctcactgaactttgctcagagacaatcagatcggaaactcaataatacatcgaaggttcccaaatgtttacccagaactgtaagagctctagacagagaaagttaaaataaaaaaagttcaatgagaccttaaactcaaccaacacatgaaactaatgactggcagagttcatagatcgtaatttgattgttgacaacactcacaccaggataaggctacagtctcattgaaagcccttagtgtacaatcacataagccctcgacagagaaggcacatatcttaccaagaatatgaacaagcatttcaactcaaaagagttcaactgcttaaaaggggaaatatcacttacttgagaaatatggagactgtaagggtggcaagatttgcgttggcggaactgcaacagagtcttcatggggaagtctagcctaaagtccataccctcaaaatatgagtgtgttgatatctacttggatatcaaatggccttgatggatcaggataaattatcttcaaaaatggtatgcttctgggttttctctggctcgaattcaaaggagaaggttaaggcaatcattgaaaatattagacactcactagaagcaagttatggtttttatctatcaaaaaatttgaacttagagtatcaaatgagcaaaagtggtgaattgtgtttcctcaccctatttataagcaaagagtaacgatccacgtgcttcttcaatccacgactcaaatggcatttaagaaaacacaaaagtaatatgatgatcagggaatagaagcattagctgtaaagaccgcttagtttaatttggaaattagcatttaatcacgtttaattatgaaattatttatagttatttaaataatttattatactgttattattgaat

SEQ ID NO: 35620 - DNA, 2183 bp, Cannabis sativa
aagctcatggctcaattctggtggggttcttttgggaaaaaaatctaaaactcattggaaatcttggtccttactttgcaactctaaattctttgggggactgggttttcgttccttgatccaccacaaccaagatttgctggccaaacaagcttggagagttttcaccacgcctgactctcttgctactcgtgttcttaaagctagatactttaaaaactcttcttttttggacgccaccaaaggtcattccccctccttctcttggactagtctactttgggtagggatcttcttaaggatggcttaattggaaagttggtgatggaaactccatccgtactcttgaggactcttgggttccaaatctcagatttcttaggtacgaagataatcaacttcctccttctgataaagttaatttttttcatcagtcccaatggtcactggaactagctcaactatctaattattttgatagtgatgcagttgctaacattctcaggttcctataggggggaataataaaactgactgtcttatttggaaaggagatccttctgggctccttactgtcaagtctgcttaccattttgttaatactgtttctttgcccccttcatcctctaacatgggattttataatagttggtggaagaagttttagaatttatgtattccttctaaaattaaaaacttcggttggagaaccttttatcacattcttcctactgcttacaatctttatgcaaaaaaaaaaaaaaatagttccctctccttcttgctcttcttgtagttgtcctttagaaactgtaactcaggcaccactagattgttccagggcgagacaggtttgaaaactttctcctttatatcacttttatcttatgcgtagaaataaagatgttagagaatttattttgtctggttttactactttaaataatgataacttttcacttctgttgtgtactttgtggactatttgagaatatagaaacaaaaaactttttcaagaatgttcatttagatgcagaggaattagtgcaatggaccagcagttacttgttagagtacaagacctcacagtccaagagaattgatgttgcttcaacttgccactcgcatgccacggcaaagcaaaaccaatctagtgaaggatcttaccaattgtacacagatgctgccattaacataagaaacagtaagattgggcttggagcagtggttaaggactggaatgaaaaggtaatagctggtttttcattgcctatactagcacaagctacgcccattatggcagaggctatggctctaggatcggctttaatttggtgctacaacattagaattccacttgctaatatatacactgattccaagcagctggccagcaaaattaatagcccaaagaaggagctttccgctcttgctgatgttattgaggatatcaaaagtttcttgtcttatatccctaatgtttctgtacactttcttccaagagattgtaacactcatgcacatcatatggcaaaggaagctttagggctagatgaggacttagtttggaacgatattcatccaaacttaagcattgtaacttgaacttctcagtgtaggaaatcaagctagcaattagttgtaaatttacatttaatgtattttccatttattactaggtgttcacattgtattatatataccctcacattgtattatatataccctttgtatacactaaaagagatcatcagaaaataaaaatcatttctctcatttttctcatttttctacactcagtgttatctgtaggttacaatcgtaaaaagaaatatatattttttttcagcactcttacatatactttatttatcccttttcttcccaacactaattaattaatcaatttatttattttattttgattattttaatctcctaattttatctataaatatggtgttataagaccatttcaaaacacatttcttcatctcaaatatccttcactcttcattccataacttacttttcacacattttcactcatatttctaccatttccttcttaccatttttttctaccatttctacattttgaagagcatgtcaagtatgtcattttgtatatttttctttaatctagttatgagcttctaatctttttttaagattattaagat

SEQ ID NO: 35621 - DNA, 2731 bp, Cannabis sativa
aaaaaaaaaaaaaaaacaatcatttattgtatttagggaataacattacaacaatttcagaaaaacctaaaaagctctagaatatttatgtttaataatttttaactttaaaacatagatatgacttctagattcaatgagtacgtgtagttttttagcagtatatcttctctaggtggtgccagtttagtaaatgtgttttgtgcttttgtcctattaatatgtgtccattgttgcaccaatgctctcaagcattctagcagtgttgtaattggctcccttgctgaaatttgcagcgttcagtgattctgctatgtttgaggtcatagttgaatacctctagtttttgctgtgaatccttgaccatttttcataaccaacttttttcaagtatggtcttatgcgtttgttcaatccatctagtttagccatgtgggatttaaattgtttttctgtataggcttttactgctccaaagaatggcaggttgtacttggcagcatgttgtttgaaggttgttttgaggttgctcaataggtgatacctgcagtatctgtgtgaaattgctggatatatttctcttgttactttgatgaggctctcattcatgtctaaaattagatattgattttctcagacgccgtatgctttttttttaatttttttaaaaaaatatttccaagatttgtcattctcaaaatcggcgacacagaacgttagcaaaaaattgtgacatgctccatcttgtgtggatgctcacatcaatgttcctccataaagctgctttcaggaatgtaccatcaaccaccacaatcggtctgcatgcttcccacccttttatcagtgcatctaaagcaataaaaacaaagagcaagttgttgtcttctgctgttttcatatcaacaactatccagtatttatttttttcaccatgcaagaaacttagtattaggctgtacgagtcactagcatttcctcttaagtcatttactacaagctccttacttctccaagctttcatgtagttcatcttgatgacaaacctatattttcactctccttttatatccagcggtgttgattttatcattatgttcagaaactttggtttgatgtattctcctatcaatattgacatctcttgcctttggtcttcatatctaatatttactggacaagtatgaatttttgagaacctcctgattatgaatgtatttgtcgacccatttttggatgctcgtagcgaccaattatagctttcacaaacatatttcagactgtattcttgagagcacaacctccacactttgtattggaaattgtttttgattgcatagtagctgaggacattcttcagtgcttccttgtccttgtatccctgacatttttcaacttcagggaggtgtttgtctgttatgagctttgcgttgtatgttgatctctagatctagttttttttactgttgttttccaactttttctaccatttcttcagcaaccagattcacatagtcaactatttcaaatttgtcgttatcaaattctcttgtttctgattctcctccttcttctgattggtgttcgatagtgtatgattctattgtttgtgcattgttttcaagtattgccacaatttcttgatattgtgttgttgtggatttgatttttggtatttcagcaattgttgtgttgttgttctgtttgttgatgcataatgaatatgtagtgaaatttgtttctctgatcttcaattgcaagtaaaagaagaggcccacatcgttggatatatgaattggtggtattccatcttttgcttggtactgtatttgcaatgttgtttttgttttctcgcaccttaatgaagtaagtagtatctgtaaaagctcttcatacttacaatcttttggtatgaattctccactagcctcataattgtcataattattttcttcttcccattgtttattgctctttaagagaacaggtatagattccataacttgattattcccagtatttcattaattcaatctttttttttcaattaaaacaacagtaaaataatactaaaaaaattgttgttcgtttttctattttctttttataatttggctgatatccctaatttacaataaaataatggttatgagccaagaacaactatacaacaatcttgaatttttgtaaattattaatcgtttctcaaggatgatctgtattaatattttagttttttaaaaaatggcatgtataattatacattttaaattatacagtattttatttttcaaattccagatctaattctgggttttttttttattttttttaattgaaatattgtgggtttaggagtcttacctcttttgtttcctttaattttggctttaatgtagttgttgggtcttcatttgacgtcgatttctcctattttcaacctcgccgtaatttatgggtactttcctggtgtttttaagttgttgttgttgctatgtctgccaacaaggaagaacaaggtgtcattcttcctatttggttttacagtataaaagaaaatataaaggtcttaaagagtataaaagttatttttaccgtgtggcagtatttttgtaaagattgagccaaaagtcaggatttttgtgagtttcccttttgtaaagaggaaattacacttactatgagattttaaaacttcttatgttaaatatgatacttttaagtttgaccaatt

SEQ ID NO: 35622 - DNA, 1047 bp, Cannabis sativa
tgcttagctctgatcatgtggtttctacatataggtctcactcgcatccattccccgtaaggcttgattatctgaccctctccaacctcaaaacgctgtggacaaaagctttcagaatgccccataattccacaaataaagcagaaagtggggagatgttcatacttaaagttagtctagttttcgatcccaacagtattgcgaagcttcatacgtctctttaatggctttgtaacattcaaagtcacacgaacacgaagataatcctgccataaacccatgaaattcctttcatccgattgcgtaaatttcccaatatagtttgcgacatccttcacaacaatagcagtcttaaaccccgatctaagatgatgcaattgcacccacatatcaacttcatccaaggtaaccaatcttggatcttccccccgctgcaaccttttaaaaattaacaagaacctattaaaagtccaggggcttcgattcatcatactttggatgtcaatctcatgataaaattgaaagagatagcgattagtatccaattccttgacaaacattccccgtctgccacaatgaagccatcatatgttgcatagcctcaaaattaatttgtctttcaatcaagaaccttccaacgatacaccacctgtcatcgtagtcattacaatttgtagcactggcatcataagacaagatattcacctcctcctcctcaataggaatatgtaccccctataccgtcgtccataatcgtaccaccaccagcagaatcccaagagaaacaaagaaaacaagaaccaacaaaaatcagaccagaaaaaactaaagaaccatgtcaaaagacaaggctaatgggaaaacctaattagtttcaacacatgaaactaaaaattctaactccataaaaatactaatagaaattaacctaataacagtaaaaaaataaaataaaataaaaagatcaaaaaactaaaaaagagtagtttaaaacaaaagaactaaaacaaatctttcactgttgttatcccaaaattggcactctaa

SEQ ID NO: 35623 - DNA, 2057 bp, Cannabis sativa
  modified_base (164)..(168): a, c, t, g, unknown or other
atatatgggtgatatggtggtaaaagttttacaaggggatgctttccataagctctcttaatgcttagaagatgttgtggtgaatcaagaagactcacaattaaagaatgcacgatattaaggtatgtttattattattcaatgccctaaataaaatgattgannnnngatgtttatgagtattaattgtgttcattattattgataatagaatgctcattgtgtagtaatttaacattatattcatgtgaggtgttcttcgtacaagaatccatgttttgttttttatttgagccttgttttcgtcattcatagtagttgtctaactaggatggagaagagcttctgaaacaaaaattggtccctcaaaagtagccttccattttgcttctccaagatatactttaggcttgaacacactagctttcccccttgtaaccatcgggtgagtaggaacaagaggtttgggaatggtagccgcatggtcagaagcagtgtgtgatgtagcaaacaaatgattatctaatacttcatcaaggtaaaaaataatgggagatggaggtagtggtgacataccagcatgagcagaaataaggccggtacgagaaagatggtcagaaccaatagaagaaggtccttcagagggtgcagtaggaatataatgagatggaaaaaaacatggagaagcagatggtgagggtggagattgtgatacaccaacaagaagtaaaggagaccatgaaagaacatacacatggacatgttgtttagattggtatgttttaagaaaactagatttgaaaggaaagtcatcttcattgaagacatttcgtgaaatgtaaagcctactcgtgctactcaaacatttatagcctttgtggctatcactataaccgaggttgagccatttggtggactgatattgaaacttgtggattggatatggcctaagacaagggtagcagttgtaaccaaaggttttgaggaacttataatttagcttcttaccaaataaaaccttaaatggagaaagactttttaacactggtgttggtaacctattgatgagatacacataagtttgaaatgcatcccaccaatatttttggggaatactagcttgagcaaggagagtcaaacccatttcaacaatgtgtctttgttttctctaagctctcccattttgagctaaggtgtgaggacaagagtgttgaaaatttcaatcgtgagatcactaaaggcttggtattcactccctaccaatcttgagttgtttgattttttttttatcaaattgattttccacaagtgtttaaaactgaataaaagcttgtagggcttctcctttagttttgagagggtaaatccaggtgtgtctactgtgatcatttatgaaatagatgtaaaatctataatttgtgttggacataattggggatggtccccaaatttcaatgtgtgtaagttctaatggtactttggctcggttagaatttgaggaaaacggtaaaatgtgagagttgcctaatcgacatgcttcacaaaagtgttcttgctcattttgaaaggacttttcattaatagaattcaacacaagatttaacacatggttggatggttggcctaatttcctatgccattcatccttaattaaaattaaagacttctcaattgtatctgagttacattggattgatttaaagaaataacaacaatgcaggattttgacactttgtaagtggagacatggtagctgtgatatttggcaaaggtatcatttggtggagcaaaattgtagagtccatctctaagcctctcttaaagcatcaccttctgtgtttccttgtccttcacaacacaacaatcagaggtgaattcaacattgacattattatctcttgtcaatttagaaatgctaataaaattcttggtaatattaggtacatgaagaatttcttttagaacaagagcactattattactgatgtgtaaaaaaccagatccaacacgagcaattttaagtttagtactgttgctccagaattcgcccaaaatac

SEQ ID NO: 35624 - DNA, 1505 bp, Cannabis sativa
  modified_base (525)..(525): a, c, t, g, unknown or other
  modified_base (808)..(816): a, c, t, g, unknown or other
  modified_base (1449)..(1452): a, c, t, g, unknown or other
atcatcccacaactcgcccccgacagttaatggatcagtagagatccccacctgaagggctgaaagttgcgtgctgtcatccaagtttctaaccctagggacaaccgtgctaaaacgatttaagtatgccttaagtgtttcatcaggctgctgctttatattggatagcgaggccgcttcgggtcgcctattcgtaacagcttaaaattgtttcttgaaatctttggacagctgctcctaggaaattattgaatgaatgagtaaacttgttaaaccagttactcgctgctccaacaagcgaggtggggaacaaaattcagcgtaaattgttcgtcatgttactcgctcgcattatcgtgttaaagttattcaaatgcgagagtggatctgtggttccattataggacgaagcatgcaggtttttgaatcccaaaggaaaaggggtattcataatatctgggtgatacggcttaagctccttgtcacagtcgtatccagatgatttccctaattcccccacttganatctcctgaacttgtcctccagcttgtttatccgcaatcggattggatcctcttgctttggcccaagctgttggcgaaggtcaggtttcttccaattcaagtgctctcgcagatctggttaggagtaattgctggcagatctcgtcttactcatagaatgcgtcctactcataggctttgtttttaagtggctcgcaaatttacttgttcccatactttctcgatcattagctcgttgattactttctcctctttgagtcctttctggctgttcatcctgatnnnnnnnnnggtgtctcattttccccgagttgttcttcctgggccttttcctgtctcctggttcgtgagccataaggtttgcctcgtggtcttctcactctaggttcaagttgattttgagtgttcgtcccctgcgctaccctggccgaggctacttctcgttctaactaagtgttttgacattgtgcctcttccagacggcgtctcaggcagcggctttccgtttcacaagttctttctcctacagattgggcacctccacgattgagctcttcatccctcgtcctgggattctgaccattcccacgctgagttctcctcgagcgcgttgtccgcgtactaggaccaatgtcgggttgagttctccgaggacgtgtggtccgagcactggggtcatcctcaggttgagcccttcggaacgggtggtccttctggactgcggattggtagatcttctagagcccatgggcttttttccagaacgatggttagttttttcatgtggggtgttgatattctctagattttcagccataaaggagaggttttttttttttaaaaaaaaaaaagaagggaaggttttttctgagctttttcacagaggctctcaatgaatgcaccgaactgttaacgcagattttnnnnaaccaaatttgagcctcacgatgataattcaacacagaaaaaataaaagctat

SEQ ID NO: 35625 - DNA, 1414 bp, Cannabis sativa
caactttccatcttcagttacccgagttggtcgctccgtcatgaatctactaatgtatgctcagagaggcttgcgtggtctttgcttgactttgaccaggtctgctaaatgcaacggaagttcgtgagaggaggaaaattatgcatggaattctgaggagaaagctttccatgagttgaactttctaggggccagcttgaaataccattgctgggtggctttcgagagggtagcaggaaaaaatctgcaacatacgtcacctcgaaccccctgcagatccatttacatctcaaaatacttgaggtgggaaagaggatcttctcttctagtgtacatcttccaggttggcattttaaacttgtggggtaacgtaaggagattgatctcgggaaagaaaggggttccacgtgctcggtccaactcgagatcattgtttctctgtctggccatgccttggaacatattctttagttcgtccagttgtgcctgcacaactggactaacctgttcggcattttggcagatttgagtcacgtcagaatctttctgagcgggaatttgagtagagttcctggctatacgatcggcgtgccaagctgatcgtctactcctctccttctattgagatcatttctgagatcatgagtcgttcctaacctttcaaatacagatacgcctggctatcttagtgattgattggtttggttaacgtgctgaccagcacctttaacctggttggaattatcaggtatgacttctctcgattaataactagacaaggtctgcccacctactgcttggcccacaagtggaacctgtgaccggagattttgcggctgaccatttatagtgtgagatgtattcattggtggatcttcatctatgtcacctaaggggatgacattcgggggttgctgcccaacattttgataggcttttcgtatcagcacagtagcttgtggactacgattgtcaatctctgcatgatgagcccttaacgcttccatctccttgtccctccattcgacaaacatgtgtctctgttcctcgaacgcaagatttaccgcagcgcggagttcctcctgatcatgatgtaggggtagggtgttggtatgaccttacacgagtccaagagcggcacgaaagttttcgatctcagaatcatctccaatggttgttcgaacgttggtagcaggaggaacgactgtgttatgaatgccctggctggctactgaactagtttcccagtctcttgcacaccaggcgcgatttcatccacaggagttgttacaccatgacccgcgtttgacggctgctcgggattaacaactggcggaacccttttgtttcctgggttttgcaatgcaggatccaccgcctgtggatttgttggatcaaccaggcccctatgagt

SEQ ID NO: 35626 - DNA, 1512 bp, Cannabis sativa
aacgcttcccaaactctgaacggtcagccgccaaatcctcggtcacaggttatgcctatgggccaagcggtagacggtcagaccttatctagtaattcgtcaggaggggttatacctaataactccacccagactaacggttctggccaagtgctcggccaaaccaaccagtcattgagataacctaatgcatctgtatttaatagactgggaacagtggttaggcaaacagcatgtctcaccagccactcagcctaggactcgtgctcaaaatacagctcaaaaagatccagatgtgaccctggtcgaccaagaggtcgaacaagttcatccatccgtgcaggcacagttggatgaactaaaaaacatgttccaaggtatggcgggttagaagaacaacgatctcgagttggaccgagcacgtggatccccttttactccagagatcaatgttctagagttaccccacaagttcaagatgccgacctagaagatgtatactgggaaagaagatcccttatcacatctcaaatattttgaaatgcaaatggacctacaaggagtacgaggagatgttgttgcagagtttttcctgccactgtttcagaagccgcccaacaatggtacttcaagttgacgccaggaacgttcaactcttggaaggctttctcctcggaattccatgcacaattttcttcttcttgccaaataccattgcatttagaggacctggtcgaagtgaagcgaaggccaggggaccctccccgagcttatatcagcagattcatgacagagacgatgaaagttgcacggttaaccgaagaagggaaattaaccgcaatactgggggggcatcaaagttcttggagagctttggaaggacatcaagagagatggaccagtagattctatgagtgacttcctcgatcgcacagatggtttcatcaagcttgaagaggccattcagcgagcagaagtcgagcttaagccaggtcagtcacaagttccctctgctggaacatccattcagcaccccagttcccaagcaattcaaactcgggaagtaaaaggtctaacaacaacaataggcaaggcaatgggaaaaaggaaaagttcgctggcaaagccgaacaagcccctagagaaaatccttctaaatttactactttctctatcttgactgatgatttagagaccatctacatggctactcagtcagtagctccgtacaagaaacccgctcccatgaaaaatgagtatgtattgaattcactgacctcatgtgacctcagtacccctagcagttcaaaattggaaaaggtttgcatggtcacatgaggacatggtcgaaatcgatccttctataatttcacacaccctgaatattgatcctaatttctggcttgttcaataaaaaacaagattgttggacaaggaacgagccctagcactaaaagaagaggtagaaaagttgtgcaacaataatttcataattgaagctttctacctggc

SEQ ID NO: 35627 - DNA, 1267 bp, Cannabis sativa
tcggagtttttggatgtcccattgtccgttacttaacataaggtcagccacacagttaaagttggaagaggcatcctccctcggtttcggacggaagcctttacgatgtggaatccagggatcctcccaaatcttagtattcgtaccattggctaccaacttgcaagccccttatttcaagatggaatttgctttgacgacacttttccaaaaccaagaatcagaatctttgaacctgcaactaagaaagtccttccctttgagatatttggctattataactctacagcacagagattggcttccattgaggatattccatccccatttagctagaaaggcctgattcatctcttttgttttctggaaaccaagaccacccaaagatttaggaatacaaagtttatcccaagcctttagatgaatcccatgatttcctttctcaaaccctcaccaaaaatctcttaccaagccatcaatcttatttaccattcgggtagagagtttcgtagtttgcatagcatacataggcatagccaagcctactgacttaatgagagtagctcgacccgctttagataaggtttttgctttccatccctgaagttttgtcgtgaggttatcaagaacgaagttaaaatcaacatctttctgcctcgatctaaagaggggcagccccagatatttaatgcatccttcagggtaattaattcccaacgcctccttgattttaccccgtaagcttatcggggtgtttttactaaagaaaatagacgttttgagcttattcacctgttggccaaaccacgaacaaaaattctctaaacatctccagaatccattcacctctaataaatttgctcgaccaaccagaataaggtcgtccgcaaagaaaatatgagagagaaccggaccgcccctattgagtttaattccctgaataaccccctggtcaagggcatcattaaataatcttgaaagcacttctgcagccaaataaatagataaggggagaggggatcgccttgccgaagcccacaagaagggttaattctcccaacctgccccccattgaggcagatgtttagggtggtagttgagatacactgcaagatccaaaggcggaatttctggggaattccagagcattccaaaacatgatcaataaacctccagcttaacttatcataagctttaaccaggtcaatttttatcgcgaaaaaaccctccttgcctctctttctattgaacgagtggataatttctt

SEQ ID NO: 35628 - DNA, 1733 bp, Cannabis sativa
cttcttgaggtgtcttctcatgtacacttcttgttggagagtgattcaccaagtagattgcgcaagctatcgcttcagcccaaaactcctttgccattcttttgctttcgagcatgttgcgggccatgttgagtatggttcgattcttcctctctggcactccattttgttgggggatcttggcactgttaatggacgacagattccatgatcctcacagtatttgttgaactcatttgatgtgaactctcctcctcggtcagatctcatggccttaattggaagaccactttctttttcaactagagctttgaatttcttgaagttctcaaacacttctaatttctccttcaagaaataagcccatacttttcttgaaaaatcatcaataaagaggaggaactatttactcttaccaaatgagtttggtttaattgagccacagagatcagtgtgtacgagctcaagcggctttgtggctcttgacagtgactcctttggaaaaattcttcgagattgctttccaagcaaacatccttcacaaagttgatctggttggttgatgaatggaaggcctctaaccatctccatcttctctaagagtttaagcccgccaaaattgagtgtccgaagccattatgactcattatagcagcctttaaacacttcagaacatcatgttgattgttcaagagaaaaattctattctttgtcatgggaactttggcgatcaaattacttttatcatctcttaagaaaaggttattttcttataaatgaatatcataacctttctctagtaattgacccaaactcaaaaaatattatttttcatgttgggcacaaagtaaacatttaagatgaattgatggcctccatttttcaagcgtaagagaatcttacccttgccttccacgggtatttttaattcatctccaaaagagatattcccttttaccatttgattgagctccacaaacattcttctttctttgcacatgtgattgctagcgtcggtgtcaagataccatttattttcttgagcttcatctttgtctttccaggcaagcaacaaagttccttcttttccacctttgtcttcgacaaaattggctctttcttcgaccctccttgatctacattcggaggcatagtgaccgtacttgttgcaattctagcacttgatgtgagatttgtcactccttgacaatgagttgtctcttccgcgccctcttggtgcttgtgaattttgacttcgttctccattgctgaaattattgttactatagctcccccttccttctcttcgttgtgctcaaccacgtccacgttcgcttccttggtcacgtcctcttcatttttgatctttactgttgttagaattttcttcttccaatgtgagctttagtaattgctccttcttctcctttcgcttgttttttcttttttgtttctcctcgtgtgcttgtaaagaacccaggagttgctcaatagtcatggattcttaatctgtattcttttcaatgattgtagcaatgactcaaaggttgggctacaatacgaaaaaaaaaattctataacctttacttcactaatttcttctccatttcttcttaactgattgacaattaatatgctctagtgaaataattagaaattgattcagtatcttccttaaataaagtttcaaaatcacctctaagagcttgaagacaaatctttttcacttgctc

SEQ ID NO: 35629 - DNA, 2227 bp, Cannabis sativa
tttttaaaataacatttttttttatgctcattgctcaaaacttcatatatacaacctaaaagcaccataaatggccttaatattatctatacaactttatttacaatacttgaaaccaatctctatctttttgcttaactttttttggcaattcaaacaatattctattttttacagcccatttaacttgcttaacaatttcagtattttgttgcctatttgagttccaaatcaattcatttttagctctccaaatgacatacaccagagcagcaactgaagccattttaacacatcttcaaaacctgaatcccttggactttcggatccatttcagcaggccatgcgaggaatcaaattgaacctgccagtgtaaccataattttaataacttcaaacattcaatagtgatctcacacttgaaaaataaatgctccacactctctgtttctctgttgcagaagatgcacttaggggaatcaattatatgctgaacttgtgaagtctatcccgagttcaacctattcttcacatcaagccaagtcaaaaaactatgtttgggagaattgagtctgctccagaattcattactccacaacactttatctaaaacaaagtcaaactagcaataacccttgctgattttgtaatcagaaccaacaaacacttctggctgttgtacctgctgcactctgtcttttatttctaccatttttctccagtaccacctgctggttgtgggagctttgtgctcccaccaattctgttgtttaatgtacacacagtgcacccacttaatccataggttgtcttttttgttagccacagcccacacgtgcttaaccattgctgaaatgttccatgtagcaatgttcaatgttccatgtagcaatgttcataatacctaggccacttgccttttttgcggcacaaatcttctcccaagaaatgcttccagcccctatcatcaagccttttccagtccatagaaaatttctacaaatggattcaatctctttaatgactttttttaggcaggatcatcatttgactccaataaatgtgtattgaaataaggaccgagttcacaagcaccaacctaccagcaaaggaaaggttttgagtgccccaaaccttaattttagcagtcattttttgagcaaaggctgctgcaatccgaagcattgatcttcttagcacaaataggtaccccaaaatatttgaatggatctctatgtctagtaaaaccaaacatgtataacattctctgaatttctctatctgtcatacccgaacaatacaaggttgacttttccttattagtgttcaaaccatatgtaagagaaaatagcttgagacctttcatcaagaagtaaatactcttgaaatcacctttgcaaaataatagaatatcatccgcaaagctgagatgattaagtctcatttcagaacacctctcatgaaatgcaaactcctccttttcccccactttaatcaagattagatatttcatacctaaaacaaacaataagggggacatgagatctacttgtctcaaaccttttttagcctaaaaaaagccatgaagagatccattaaatctctttgattgattgtagaatgctttgcaatgatgtggcaccaataggtggtacaattaaaagaatgaaacatgatgtgactaaaaataataaaatcgtgattaattataaattattattgagtaaaatatttatggctaaaggtattagtcacaaaatttataatttatggctaatggtattagtaatacattatatataaatattatattttaatcgcgaatacttttttattataactaaaaatcacatttaattataaaaaaatttatattatgagttttattactaaaagtagttgttttgtaatgaatgctcttgtcaaaatgactcattttgatttaatatttctttacaaattttgtaaaaggttgttttctgtagcctttcaagtttgatatgaccagcttaataaaaaggaaaaaaaaaaaagaaattgaaaattgttgctgtttgttattgtttttgttgttgttggtacttgtgtcattcaatgaatttggctcttttaggcattgagatggagtgagtatattgccatcttctttgttgcaattaatttgttttgtttttggtgtatttaatatataacaatatttaattatatatatacattatattatatt

SEQ ID NO: 35630 - DNA, 1734 bp, Cannabis sativa
  modified_base (1006)..(1006): a, c, t, g, unknown or other
agcgacacattgtccccttaggtccgccttgtacttcagcccattagaacctataaatacccctttttagatgtgagatgtggttggaaaattattcttgtaacttgaccttgagagaaatagaaagtttatcattttctctccatcttttgatagaaattggaattcatattttatatttctttttgtcttagatctgttcttgaagcatagttttattttttggccaacaagttagttgacaagttttcactatcaacagtatacatgaacccctatttgtgttcattgattcactcgttaaagtttttttagagaagatgattcttaaaaaatccattttaggagctcaattacataagtggctgggaacatgtcatactgtaatatcccgataaacctaacggtgaatgattagggtttaatatatattatgggattattcagataatgagtgagattatgatcctactaatctattttagcataaattataaattttatgataagtggataaataagtgtaatttattaattacagagatttatatagcatgtgtaaatataatatgagctgtttgtggaatataaataatttttaagtttggcaaccttagagacttgatcggaggtcaaaatgtcataatagttaaattagtggttttgatgggaatattaaagtaagttaatattaaattataggggtaataagaggtacatgaggtttgacctaatgctcaagattacagatttcttagtggctaagaaataataaaataatttttattagggatattggcggctaaaccaccttaactttaccgtttgtaacacttaaccacaaaaattaaatttttggcggctaaactacttaaaccctggttctgttttgctctgcacaccttcgtccgaaaatcacagttaagtgccacagtggactgtccacgtggcaaatttttagttgtccacgtaatattagttttgaaaaataattataaatatttanaaaaaattaaaaaaaatcagaaaaataaatttaaatattttttttccttttttttttctctttttctttttctttctctttcttctcgagagaaccccctcccctaacccttattcttcttcttcttctcaatagaacaccctcccaaaccgagagatttatttttctagagcgataaaggaactagacccactcactctgttaatccggtagccatgggaaaggatctaagcgacaaccaagtatcttcaatgaaggaggctttcaccctattcgacaccgacggcgatggtcggattgcaccgtcggagctagggattttgatgcagtctctgggaggaaactcgacccaagcccagctgaaatccattatcgctgaggaaaagctcactgtccccttcgatttccctcgattcttggacctcatggctaagcacatgaagcccgaacccttcgatcgccagctccgcgatgctttcacggtcatcgataaggagtgcactggctacgtctccgtcactcagctccggcacatccttaccagcattggcaagaagcttgagccaacctaattcgatgagtggatccgggaggttgaggtcggttccgatgggaagatccaatacgaagattttattgcaagagtggtagctgagtaaaccattgttgtgttgttgatggtgcatttcgtgtgtgtttttagctctgatgatatgatatagtgatat

SEQ ID NO: 35631 - DNA, 1441 bp, Cannabis sativa
gggtttgtgtcccgagtcccgatccgatttttgatttgagtccacatctcggtctgtgtttgggtttgggtcctagacagattctagttccgggaccgagatcgggtcctagtcctctagtcttgttcccaggtcccggtccgtttccagtttcgagtcacagggtacaggttcgggtatgggtctaggtttgggtccgagtccgggtttgggtttgagtctaggtatgggtcccagatccaaacatcgactatgggtcaggtccaagcttcgggtcgaaggttctggtttcgggtcctagtcttgttccacttcgggtcaaaggttctggtttgggtcgtagttcagggtgtgggtccagggtcaattccagggtctcagtgccagttctgaagcccgggtcccgggtctaggttccccatccaggtttgggtactaggtcccagtccgagactaggacctggtcagggttcaagtcctagtccgagttcaggttcgggtttccaaccccggtttcagtcccagatctgggttctagtcgagatcctagtccgggtcttagtctaagatttcgatcttggtccgggttccgtggaccgggtcaaggtcccccatccaggtacaggtccttggtcctagtcagggttcatgtttgggttcgggtcctagtcccaattttcatttcaattctgtgtctggcttcgggtacgggttcgagtcctggtgtgagttttgtgttgagtctgggtctaagttcggatcccgatctgggtctgggttttggtccaggtccgagtccaagtcttgggtacgggtccaggtttgggtctgggtctcgctctagatccaggtcccacgttttgatcctagtctgggtatgggtccgcgtctgggttcgagtctaggtttgtatctagatccatctctaagtccgagtttgggtctgggattgggtcccaggttcaggaccgacatgataccagacctggaaccggaataacactaggactaggactgtaacaggactcaaacctaaacccaaactcagaccagaacccataatgggacttggacccaaaccagaacttgtgacctgggaactaaacaaagattgggacctggacccagatcgggaccaggacctagaccgagacccgaaaactggggccaaacccaagacccaagaacaagacttcgacctcgcactcgaagcccagacccagactgggactagcacccgaactcggacaagaacccaaaccgggacctggactcgggtaggactcgaacccgaaccagcacacgaacttggacccggacctggacctaggacccaaacatagatgggggaccgagacctaggaatttagcccacgaactaggaccagaacttggatctggctcggggacccgaccctagacccaaacctggacataggac

SEQ ID NO: 35632 - DNA, 2582 bp, Cannabis sativa
taaatcgtgccctctaaattttttaggtctttaaaaattctccccgaactattgaaattgttagatttaaggacttccatcaaattttactaatgaacgcttaaagtggatgaaagttcaagggcacgatttggtataagtcaaagttcaggggacgattttgtacatggacaatcaccacgtaagtaaaattgaacaaaatttgacagaagtccttgaatttaacatctcaatagttcaggtagaatttttaacaacatgaaaattttggaagtacaatttagtacttgtcaaagttcgaaggaaaaaaaaatcctaaataggacaagtattattagagttctagctcaattataattaaacaaatacattaattaactggttcaaattacacacatttttatacacacaataatgtataaataactatttaatccaatgtgcatgtccttcaagcttataaatctttactttacttatattttgtaaaagggtatgatttcttctgttattgtgatccaactagtttttgatgatttctgtgccgcaagagggctttctgcaaacagaactaaatctcatatatattttgggggtgtctcgaaggactctaagatgtctattcagaaccttgttcacatgaaagaattgtcctttcccatcaaatatctcatcaacaacttaaggccaaccaaatagaaagctttcgactatggtcgaattattcacaagatccaattaaatgtgcatacttgggttagcaaacacctctcttatgcaagaagagcttattgggacttattttatcaggatctagatatactaaacatgtatgttgattatagtttataatctaacatccttaataagaataatcctaaaaaaataaattaacatgtaaaagtataagaactcttacattggttgtagcagaaataatatgactgcttccatttagtactcttacccttcatactttctgttgcagagtaataacacgaactgaacttggattctccttatgaatagaaaaaacatctttctacacaatctgtcacactgatctgagtattgccttgaattgtatggaaaattttcaatcactaagggaaacatattaagagagagagagagagagattcaaaaatatgaaaggaagagaaagccttttctctcaaattcagttgtctaggtttcgacatacaaagaaagtgttagtgaatcaaaagcctttttgttccttttatagagtctctctaggtttagatttagaatataattggccttaggaaaatgacaatgaccctaaaaggccatagcttggccgaaatccatatggcctaatttaatgagacttttttatcttttcccaaaaatactatttttctattctaattatttaaatgctaattttatttatttagtattataaatacttatcatttaaatatttttattgattagtcataaaatatcctaattaacgaataaactctctctttatttctcttctcaaatttgccttttccttagtgaaattcatacataagacatggtcttcttttagaatcttaattggtttaagaagataatttattgagtaaacaaccaaagggacatatgatcttctatagatgagtaaataagattgtattggaatgagttttatttagggcataaagccccccaacaaactcccacatgcaataatataataataacactatatttaaaattaatcattgatcttgatatatatcaattttagtgtgcttgactttatctgtgtaaaaagaattggaaggttgtaatcagcatcatccttcttcaccattacattctattgagtcacaagacttttcgtgcagcttcagtggccacttcatcagaagtaaacttagccaacctatcaaactttgtagcatattcagtcacagtcatgctaccctgtactaactatgcaaactaatctacttgggcggcacgaatggaatcgttataatacttctcataaaatattgcctggaatgtttcccaaatcatggtattcaaataatgaccctgagatgcctctcaccatatccaggcatcattatgtaacatgtaaacagcacatcgtggccagtcattatcctcgcactgcataaagtcaaagacagaggtaatcatactcatccactattccgccttcagtggatttggaccaccttcaaatataggtgggttttgtttcctaaatcgctcataaattggctccataagatcccccatattcggttacactacctgaggtgccaatataggtacaggacgagcttgttgctctctcaggcctcgaatatgctattccttgctgtcaaaattgtctcttgtgtggtagtaaatacttattcccagttttgaggcgatggaggatgctcttcctcaccacctaccccgggccccaactcgtggcctacacagccaaatcgtcactgcatgatttaaagcacatgcgatccaaaacttctaaccatttagaattcaacatatatcaatatcaatatgcatatgccacccatatattcctatcacaatcatct

SEQ ID NO: 35633 - DNA, 2127 bp, Cannabis sativa
aaaactttctttttataatcataataactcaatatcctaacccaccccccaactattatttctttttagaaaaaagtagtttaaatgaaccgtatgtaacaacccattctttttcatttaaaacaaatactaccccagatagcttcacttcacctgtggctagcttgagttaattaaatactgaaagacgtaatcattttctggtttacatatttagtccctttaccaaataacaactttaatagaaagccacgtctcatatatagcttcatatatcccaattactttatttacttatataactctctctctctctctccaaaactcaagacccttctgagttttgattcatatcccttcaaccaatactaggtatgttgtatgtttctttatgaatatgtagaaatttaaaacaggggtttttattttaaattggttattttctttgacaacaggaatataatattttacttgagtgtttttattttgatgggatcgaacaaggaagagattattagatcatcaccatcatcatcatcatatacaaatcagaaagtagtggagaagattgtgaaggtaagcataggttgttttgtgtctcttttagtgagtttgggaggtgggttgatactagcttggtgggaatctgaatatcacgctgataatagacagctatggatggtgccctttggactcattctccttattaccccactcattatttgggtctctttggtcttttctcatgcctctgctcatcaccaaactgttacaaacaacattaatatttcagtacccgctcttccttcactgcccgcttattcatcatcctctcttgaccctgaaaaattatgatacttaattacatgattctcctttcatctttttcctgacatttttttatgtcatgattgttcaaatttaagttcaggaaactggaaaaacagattggaaaaataaatgtattatgagtttggtcaatgccaatatgaagatcgactgtaagttggtgatgtatacatgtgtggaaaatattataactacttctacttgtaatgggcaatattatttagctacaataatgatatatctatttatctatagcttgttgattgtgaaactactaagaaaaaagtaaggccaatttaattaaaaatacaataatgtataatatacaagattattgatcccaacaggtcattttcagagttacttttcttaagatttatttatataattataaaaaatgaaaaaagaagagaattaggagggatcaactagtgaagcggtaaagaaagggacaaattaaatgtgagatgatgagattattagattagaataggagggtttatgtaggtgcggctacgaatagaatattgccttccccagtatgttttgttctatatatatatatatatatatatatatatatatggagagagagagggttggatttggagatgggagttatatatgctattatataatatgcaataatacgtggcttatactgctcttgcaactaaccatgaaagcaacgccctgcatgttacatgcgctctcttttaatctgtaacatatatatatatatgtatatataactatatattgaatgcatgattttgatatgtactggtatcatagcattggtgtattaacaatgttataattataatactagctagaatggcatttgaatgtaagaattctctttcactaatttttggtggaaagaataattaatttcttcagcaagaaaagaaaatggtaattaaggaaaaccattcatccacgttatcatcatttattttcattatctctcagtttttatagatatacttcaaaaacatatagataaattaaatgatattttattattatattgtcatgttattatcacgtctagtaaataattacaaaaacttgttattaatttagtactacctctctgtaggatataatctattgtggcaattatctcaagaccggccgcagtgtattataattttatttaacatacttttgaccacaaataccacatttaattaggggtagctagcaatttgtgttgtgttatatttgtgttaggttgatatatttaatttgtcaaccctaattcaaccatat

SEQ ID NO: 35634 - DNA, 1800 bp, Cannabis sativa
acaataacataatataacatatgcaactttattatatatataggggagtttcttagttaggggttaaaaatgtcattttttattttcggtacctaaagaaattatatcccaattttttcatatatcaatttacattatagtctcataatttacggagtttaaaatagttagttgtcgtgtgtaaaataaaataggcacgagtgaaatgcattattaaaattttattttttaatattgtagattatttaaaaaaatttaaaatacgagaatgtctactataattataatgtgtattttcatataaaaaagggaataaatttataatttatctatttatcaaaaacaaaaaatgctcctatacaatagtgacaaaagtaatggtgcccttacctaaaggtttcctagatataccataattagttatttgtattatcatgattgtgacaatatgacaatataaaatgaattatatcaagtgaaattatgatcaattaatagaaatagttcatgataaatttaacacaaaatgaccaccaaaaatcatataatcactataaatttttttacttttagttataatgttttagctaattattaattattattatattgtcattaaaagatttgtaggttaaagatattaattacaaaaatcacaatttgttgtaatttaatgtgtttttagtcattatacacttgtatctaaatattatattaataataatttgtatttaaatactgtattttagttacaaataattttttattgtaattaaaaatcacatttagtcacaattgcgactaaaaaattattactaaaaataatatttttttaaatgaaattttaaattttgaaaattgttgtagaggtactcgaaattcaaatttagaaagtgaatcccaaagagcaaacattacataattaatttggaaataaatgtaagagctgtaaagttggcagtcaaagctactctcattaattaataatctctagaggctaccactacaaaataaatttagtgacattattaataattattatacgtacgaataaaatatatgtatatatgtataatattaatttcaatcatttatgttaaaatttattaagacttaccaaacatgtatatatggtttaatatttggttccaacttttggatacatatttatttactttaaggacactgatcatatatttatgctctgatctgaataatgaaattaataatgaaaaagaaaccaaaaaaacattataatctatcacttaattaattataggagagatagatgagatatataaaaatatatataagtcgaccactatatataagagcattgctattgggcactagtggtgcctagtaccttctagatgtgtcgccttgcaattagttagcgatactccataaaaattattatattaaactatatgagacccgatacttaattgcaccaatagcgatattaacacgtaagagggtgttaggcaccagtggtgccctttagcgtttctctatatataactaataaaaaaaacatttttgactaaatttagggttcccatgagtactaaacattatttgtgatttaaaaagtagatttaaaaagtaatgttttttttattattattattatttattaaagaagagtacatactgcaacattaattataaatacctagatagattccacttatcatcaatatatatagtttcaaaatatttataaccattaataatagtatacataattaactaaaacaattaataagtgagaagttttgtcttttttaaaaaaaa

SEQ ID NO: 35635 - DNA, 3001 bp, Cannabis sativa
  modified_base (2009)..(2014): a, c, t, g, unknown or other
ccacatattagatgggcattttaaacaatttcttggatgccatcaactctagggccaatgaagtctgtgaggtggctaaagacagattgaggaagggtaaagtcgcacaagtctccaggagtgtatctcagaagccaacaccatcgaccccaagctaagaggctgctctgaaggctccgaccacaaaaaatttacctaagatgaagtttttctctaaaaaattctacccatgaaaatcaagagaaatcatctgcacacaaaaaaaatatcttttaccattcaaacttttaacctaaattggacccatcagattcatgtgaaaaagttcaagaactctaaaagtgttcacataaggtacacttctgtgagatatttttggttgattgccaaactgacatggtccacatttgcttacagcttctttacccaatttaggtaattctggaacgatccctgcactggataattctttcagatttttgtaatgaatgtgtccaagtttttcatgccataaatcagtggtgttatcaatagcagagtgacaagtagcatatgtagtgatggtgtaacaattatcattagatttcaatccttgtaaaatagtttcatcacgattattaagaacatagcaatgaatactataaaaattaatagtgtaacccgatcacaaatttgactaatgctaaggagattaactcttagtccttcaaccaacattacgttcttaagcctgggtagaccttcaaaattaagagttcccatccctatgacttttccaataagaccattaccaaaagtaacttcttcacattgtattggtctaatgttgtcaagatagtctttttcacttgtcatatgcttggaacaaccactgtcaaaataccacatttgagaagcaatagatttaaaacaagaagaaacaaccaaatatttatttttgacaacccattcttgtttttgagaaacatatttatttctaaaatatttagaattaaacatgtttttcattgtaatacatctaggtcgaatgtgacattttattctacaaaaatggcatataggaatgaatcgattcctattttctttcggattgccaaacttaccaaacttgttcttttttgtaatagcaatacattttgctatagagtcaggatcctgtaaagtaatgttaaaacattcagaaactaaaattttaaatttgagaaatttagtatttgatttggattaagccttaacaaaacccaaaccagcatgactcatttgtcctgaattttgaaccttttcaaaaatattggaacctggatttaacattttaacatttcttttcaattttttaagttccttagttaaagatacaaatttacaatttcttgaaatcaatttagattcacaacatttatttttctttgcgagatctttgatgttatgagataactctttgttaaattttactaaggaaagattttcatcaacaatttgcaaccacttaccaaagattaccttgtaagattctgccaatgattcgttatcaagttctaactcatctgaatctgaaataacttctttatcattatgaacattcaaagtgttgtttaaacacaaaactttttctttttcctataaaaacacttgtttaagtaacaatttttttttcactattttcaaaatcatcatcactccaagtaacattaaaaccctttttattctttttcaaggtattagcacattcagattgaataagaccatactttttggattccctacattgaatacccttttaattattgagagtaaaagatttagatgtatcgttaccttttgaagggtttaagaaattctttttatttctaatatttttcatgtacttttgaaaatttcgtgttaacaaagtcatttcatcatcactctcattgtcagtaacatctttttcaaaaactttaaaggaaatacctttacttttctcaacggaagagttaggcttagcctttttcttaatttgttgatttaannnnnnagttcttaaagaacccatgagttcttcaactttcacttttccaaaaaatatttttcctcttccatcgctagcaattttgtgtcaaaaatgtcaagaaacacacgaacaattttctgaaccaaaacagattcatctaatttttctcccaaggcaaaaaaactcattagagatatcagataatctttcataaaattttgacaaagtttcagtttttgacattcttaattcatcaaatctagtttgcaacatgataaaacgtgatctttttacatcagtggtaccctcaaattgagtttgaagaatttcacacgcgtcctttgcagatttacaagataaaattaatttaataaaacatttaccaccaccattaaagatagtatgtaaacccttattgttataatcggataatttttcatcttcagtagtccaattaagtttaggttttacctcagtattacctttatcatcattttcagtaggtcacgacctacctgtaatatagctctccaagccttctcatcttgtgacttaatgaatgctcttattctaaccttctaatatggataattcaaatcattcaacagaggtggtcgagtaatggagcttccttctgtaaacaaagacatttcacacaaaataaattatacggaataaattaatctcaagatctcactaagagtttagtgacttgctctgataccaattaaaattctgtattttaatattaccagtttattatttaattaaattcttaattaaatacgaaattataaaactggtattgaaacagtttttctgtagctatagaagacaattctataactccagagtaaatcagaaaaaaaatagtgcagaaaaataaaaacatacaaggtttttgtatgtggttttgacaatcatttcagattgttactagtccatggggccacttctagagataagattcattagatagatctcaaaaatacaaagtaattgacttatgca

SEQ ID NO: 35636 - DNA, 3570 bp, Cannabis sativa
  modified_base (332)..(346): a, c, t, g, unknown or other
aatgtaagaccatccatatggggaacaaagtctagcgtctcgaggtcccattgaagtattaaccatgtaagaccaacaataaagatcgaatatccttataaataaaactaatattttaaggagttgtattttcatttgatatgtattttaatctatttattttaatattaatatagttatttaattaaaattactaatttagataactctaaatactttaatttaatatttataaaaattagatacatacttggatagatctaaaaataaaatttattttctatccttagtattaagttttcaataaatattataaaaattacttaatttannnnnnnnnnnnnnnaattaaataattaattttcaactcaaatttaattttctttatatatatatatatatatctataattaaattttaaatccaatgtattaaaaaatacattttcgaattcaattaaaataaaataaaataaaactgaaataattattctaatttgtgttgatctaaaattaaataaataaattaaaaaaggcgtgagtgcgtgttcccctacttctcccatggcgaagaagaagagggtcatccgaaagcttgaatctaagagcacggtggtcgtcagagccgatgaggaacttccttcaatccttgaagagagttcagatcagattgtcggtgaagaatttcatgattcaattgatattctagagaatgagatagggcaggaggttgaatcgagcaacacagttcgttccccgaaaacggttagctaggcagaggaggtcgagaaaagtgattatcaaactaatgcgagtgaattgtggagccaattcaagactaattaggtacctactccatcaaccggactctcttctattgaaccgataaagtaggtgaccaggttgttgctaaactggatttagatgaaattgaaattgaggcttcattctggaagaatgctattgtctgtattgttttcggtgttaatccaccatttaaggtgtttgaaggctttgtgaaaagagtttagggaaatatgggagttgagaaagtagtctgtatgcactcaagctttaccttagtcaagtttagggatgaggttacgagagatattattctggaagcaagagttatccactttgataagaagcctgttattcagcgtccttggatagcagagatggatttagctcagttggtaaattttgttcctgtgtggatctgctttaatggattaggtcttcaatattggggaaaaaagaatcttagcgcattgattagtactataggtaaacctatcatgattgataaggtcacccgagaacgattaatggtgaaatttgctcgagttcttgttaatatggagattcagaggagccaccaaaaaccatttcctttatcaatgaaaggaaacaacttgtggaacaacaagtggaatatgaatggatcccctctaaatgctcggcttatgggaatttagggcacattgtggccaactgtaacatggataggcctatggtatggaagaggaagtaatctggagataacccagtggaggaaaaaaaggagctacaaacacagaatacagggacagatatggagaaaaagctgccaggggatatcagtatttctgctgatgttgtatagggaaatcaagagcatggtaattcagttctggacaaacgagattgtgagaattcaggtaattcaaacacctggattactcccaaaagaagagggcaaaagatgaattcgagttcaaaagtgaatgctcctaaaacagttagcaacaatgggtatgtcgtactgcaaggagttgtagatgaggtatcccaactccaatatggtttttaatggaagtttgtaacattcttggttggaatgtaaggggaatgaataaaaaagaaaaacagattgctattcttgaggtgtgtagattgaataaagttggatttggtgctttgtttgagactaaggtgaagcatgagaaagctcatgatatcatggctaataattttctgaactgtagtttttattctagttcagttatctctagcaaaatcttgttgatttggcaggaaaaatttgtccagattgagattctagatgaggataagtagctggtacattgtagagttaaagtttgtggtcaaaagtgtacttttctggcaacaggagtcaatggcagcaactctatggaagatagaaaatgtctttggcaaaagcttgaaagttatggtcagatacaggagccgtggattatttttggcgatttcaacgccatgttttctttccatgatagaagtgggggcaaatcggttctctccagagatattttggattctcaaacctggctttcttgcgatcaggtggaggaattcaaatgttagggtgcttattatacctggagtaataaacatgaggtgggtgaaagtattttttctaagcttgatagagttttcacgaatgataaatggctgaggttttttttcataatactgaagcttgttttaaatgggagacaatttcagatcacatcatgtgtttaattcggaatcatgaggtgaacaaagttggatacaagtcgtttagacatcgtaatcattgggcctcttatcctaactttagaaaggttgtttctacttactggattaagcctacagttggcagcagccttgacaggttagtgaagaagttgtttagaatcaaacacgctctaaagaagtttaacaagcatgaagttggtgatataaataaggagtacaagcagactagagaagagtattgcagattacagggagaagctgctgctaagccttatgatttaagcttgcaaattgttgctgatcataagcagcaggagtatcttattgcccataataggtatactcagtttattggtcagcaaagcaagctaagatggatgaagttcaatgatgagaactccagctattttcatgcggccatgaggaaaagaaaacttgaaaacagaataacaacctacttaaaggatgactctattgttgatgactttgaggaagttgtgaatcactttgtcagccactttgagaagttcatgggaagtaaaagctttgccacttccagcatagacgaagaatgtattagaaaggggaattgcctaagcttggaacagcaagtaaggcttattaggcctttctctacgggggatgttaagaaggctatatttagtatccactcttccaaaacccctagtttggatggatttggatctgttttcttcaaagacatgtgggatgagataggtaatgaagtttctagagctgttttggacttctttgccaatgggtacatgccaaaggatttgaatgaaactgtaatctctttaattcctaaggtgtcggatcctagcacggccaaacattatagaccaattgcatgtcgtaacaccgtctataaatgtatctcaaagatgatcttctttatgctttcagaggttctcccgactcttatccaaggcaatggcaagtcccgaatagaaataatggtcagccggcatggattcaaaagtggattccatgaaaaagaata

SEQ ID NO: 35637 - DNA, 2218 bp, Cannabis sativa
tattattattattattaacgtttatgagttttttatatatataaatatatatatatatatactaggaaacaaatcacgcttcgcgtgcggttttattttatttagtgataattaagtcataaaactatatctaatgttaaattttaataatattttataatctttttataataatatgagtaacagttcttttaatttttattttttacttttaataattaatattgtagatcttaacttttttaattattttaattaattataaatacatattattctcaagttagtttttataatatatatttcctttaaattaattaaatgagaatacaaaaaataaaattataatgattgatgactctatcgaaagcttattatatgattttaaaactattgtcattacggtatctcatttgtagtcatcactacattcaaagtcgtgtcattattgtattttccaataaatttgctctaacataaaacaaataaaattataaatttactagtgatcatttttatatataaggtgaatctacattgttttttttaatgaaatatatcatataaaatttattaattaacaaaaaaaaaaagataaattgtatctaattaaatttaaattcaaatagcatgttctagattttttaatcaacttatttaattttaatttttttataatcatttaataaaataattatcatcaaatgctactaaataaaatattagaaagatatatcatcatataattttaaaaccgcttttatcaccgtatctcatttatatcacaaatactattcataattaagagttttttatttagaaaaaaagaattactacgcatataccacaaattcaaaaaatctctgaaaacatatagttatattgttctacctcaaaatttagaatttgagatagataatctatatatctatatatattattaaataaaagggaatttttgtgtttgtatgtcgaatgacatagtttgagagaattctctagtttctgatttgtcctttgagaaattgctcgtatggattcatccagtggtaccgtcaaacaattagaagatttatgtgcccaagtaacgattgaagatgaggaagaaatagagttagcctatgatgtagtggaacagaatgtggaagatgtggattatcgatgggcattaggcggtacattcataaaaaaaagagcaattgattttgatgtcatgcgtcatgtgatggagtctttgtggcaaccgaggaaaggtatctatgtcaaggaattggagcctaaccattttctattccaattttatcatgaacttgatatcactcgtgttattgaaggaagtccttgggctttcaataaattataatttgtttttactcgtttgaaaactggagatatcccaaggaatgtaacaatcaatcatttggatatttgggtccaagtgcatgatcttcaatcgggttttaaatctgaccaagtcctacgtgatcttgcgaactatataggtacatttgtggaaacggatccgaagaactttcagcgtatatggcgagaatatctaagggtaagagttaccattgacatcactttacctctgaaacgacggatgaagttacgtaaaatagggagtgaatggttctgggaaaatttcaagtatgaatatgtgccaacattttgttttatctgtggaatcattggacacactgagaggttctctccgaagcttttctcgacaccagttgatcaaataattaagccttatggttctttccttcgtgcctagccgagaaggaggagctatcaaattggttctcaatggctccgtgacgacagtctgagggatgccatttttttttgatgcaccgatgatgcaacaaccgtaatcttccaacaagaacaatctgtcaaatgcagaagatcagggggacaatcaatgtgtgattagatatgggagtaatgttgttaacaatcctatctaccaggatattgctgcgggtcaacagggtatcaataaggttgtgaatgttacagttgacaaagagttgatggtggcagtgattggggaagaaaatcaatttcaacttaatgttgttgattccaaaagaagacgtactgaagaggaggctagtaatgggctttcattgactaaggaaggagtaagtgggtctgttaactcaaataatataatagtgcctcctgggcaagatgtgttgatgaagga

SEQ ID NO: 35638 - DNA, 991 bp, Cannabis sativa
ttgttgtacaattataaaaaataaaatccttcattttttttctctttaaaatacctctaaattatagatttcattgtaaacacatctctttatttgcattttgttattttttttaacatattgctaagaaatagtacttgtaatatgcagactagtgtggcgacaaaaatacatgtacaaattatggtttttttttgagaaaatgtacaaattatggtttaatgataatgtttttggaatgtgtatcttttttcttaaagctagctaacgtctttatactcgatcacgactaatttcaataagtttaatagataattatattgcaactataatatatatagccacattataacaaattgtctgaaaaaatgaagaaaaaaaaaacaatgtaacaaaaaaaaaggcatgtttgtcatgttaatttattataattcaaggataatttttgtgacaaaaaaaaaaaaaagagtttcaacatagatctacaagtcttatagtatataggaaaacttactattttaatatttttctcttctgtaacagaaattattagtttatcgatttttttaatatttttgttaaagttaactattaaaactaataccgttaaatcaatttataaattatatatttttttaaaaaataaataatttcaaatattaaaatttaatttaaaaatattaacaaatttagataattattttttatataaatcttaatataaatttgaattagacattaattcaattaattaatcatatttcataacaaatttattagttacattatttaaaatatttaaacttatttacttattttattgtttaataaaattagttagatatattttttataaataaatttaaaactaaattaaattttatatatttaaaaaatataattaaactataggagaattatcctatatactattttttaaactttttttttttttcaaatttacggtttgagtttctaaagtagttgcagc

SEQ ID NO: 35639 - DNA, 1444 bp, Cannabis sativa
ctgtataaccgtcctccacccctcatcacgccttgctctcagggatagagctcaaagactcactctgctaccgggtgctgcctggaatatcactttgttgacctcagaggacaactttgtggagtatgggctctactcgaaggatttcattcctcagcctctgaaggagaaaaagaagaaatctagtgctggccgagctgagggagctcatcaggagaatgaactcattcaaatcaagtgtgaggctaagttgaagggaggtgcaggagcaaaacagtatgctcatgagcctcttgagcaagaagatgaggctgaggaagagcaggtaaccccactcaaaaggaagaagaaactttcagctaacccaggcctatcgaacatacgattcagattagctagcccagtctacctgctcgaccatccactcctgtagtaggacaggggaaagcttttctagaggagcaaagagactcgtctgatgatgatgagccatcaggtcttgctcgggcaaacacttcttccgaagtgcaagatacttcatcttgcctttaactttcttgattattatgctttcaaacttttagcgctgttgtctaaccatgttgcttttatttcattcagacatgtctcaaaagatgctcaaagctctaaagaagagagtgggaggaagctcgggcctatctcctctggctaagaagtctaggggtggtgagacaaccccatccagagaaagggcgccggccaaagtagtcattgacctcttcgaggagccaaccgtcgtggacccttctgccccataagtgactaagtccaaagactcttgaggttggagctcggacagggtggaatagccgaaaggtgaattcgagctggccaggagcggatttgagcagatttgggctcctacccaacctccagcactgcatccagagactaagaaaggcaaggatatgctcacccacaacgtgactcggtcagtatctgaggtgaattagtagcttgctggagctgacaatgagctttccctagagctggtgatgggaggagtcctgaaggagtttacgagggtaagtcctccttgatagttttctgttatccttctttacttagctcatattctaatgctatttctgtgtgcagacaagtctgaagatggcttatgcttattccggggctaagttgtcttcttctaagaatgctaccatgtctaacaccatgagggcagaagtggacttgaccaggaaggatgttgatgaagccatggttcaacttggagctgtccgaatggaactgggtgaagtcaacaagaaacttcttgctgccgagaagaagatagctaagttgtctaaagatttagaggcttctgatcaacttgaggctgtcatgacctccttgtcgaaagaagtgaacaacctccaagaagaaagggaggttcttcgagctg

SEQ ID NO: 35640 - DNA, 3277 bp, Cannabis sativa
  modified_base (72)..(73): a, c, t, g, unknown or other
aagtgtgaaaactagtttcaaacctagaaacaaaataataaaaagaaacttaaaataaaaaatatacaatannatcataaaatagagcaacctcattaaagaacccaaaaaaacctgtaaaaccagtttcaaacttatgaaccctgtgaaacgagattctacactatgaaaatcataacgaaatataaatactagacaataaagttaactgaaacaagttatcggaattggcatagtccccaaagttgctgctggcactagaaaagtcaccggagttgctgtcggcgccaaaaaaattatcggaattggcattatcgctggaaaagtcacaaaaaaatcactaagaaattagtttcttggtgattttttcggtgacaatgccaattctgacaaacttcccaaagtttgctatcggtacccaaaaattcaccggagtagctgtcggtgtcggaaaaattgtcggagttgctgccaacgccagaaaagtcatcagaattggtattgtcgtcagaaaaattaccaacaaaatcaccaagaaactggtttcttcatcaagtaactggtttcttcatcaagaaactaatttcttggtattttttcagtgatttttccagcgacaatgccaattctgacaaattttctagtgtcggcagcaactccgacgacttttccggcaccgaccgctactccagtgatttttcaggcaccgacaacgaactccggcgacttttctagcatcagtaacagtttcttggtaatttttccgacgactatgccaattctgatgacttttccgaagtttgttgtcgatgccgaaaaagtctccacagtagctgccagtgtctgaaaagtcgtcataattggcattgtcactggaaaaatcactaagaaagtggcttcttcatcaagaaaccagtttcttcttcaagaaactaatttctttgtgattttttcagtgattttctggcgataaagccaatttcgacaaatttttcggtgttgacagcaactccgacgacttttttggcaccgaacgctactccggtgatttttccagcaccgatagcaaacactggcgacttttctggcatcaataacaaataaaattatctaaacaaataaaatattaaatatagaatttgaaaacttaatttacatatatatatatgatatatcaaataccataaacagatctaaaaacaaaagaatatcaaataaattggtcaaacttaaatgtgtcatatttatcataaaaacttttaaaattccatactaaacgtaacttttaaatttgggacatgtgaaatcactaaattttcattataatcacgtgttagtttctctttcttatgtgttcgattagtagtaggagatatgtctataaaatagcgttcctattgttttcaaaaaaaaaatagagttcctattatgtaccaatagttctctatacataatgagatgatgtcattcaaattatattttctttaaatatttttagtaaatatacttaatattttgaaaatattgccatttgtactcaaattttctttttgacagtaacagtaagtatattttttaaaaaaaattattacacttttatacattctttttccttcaaaatatctcaaatatatttatttatctactgctatcatctagcactttaaaagattggtacaatactaaaatattttaaaaatattgagtaaatgaactgccaaagaaaaaaaaaatgagtataaaagtgtaatattttgaatacattagagatatttacttcaaaaaaaaaaaaaggaattacccaatatactattttttaactttttttttttcaaatttaaggtttaggtttctaaagtggtttctccagtagtttctatgtaggttgctatacgattttttgttgcgatttagcttgcagcgctagttgcaatatgaatttctatgtagaattccgtaaaaaaaaaaactattttgaagtgtaaaaatgaaaaagtccttccaaaaaaaatataaaaaatacagtattttaataataataagtattttaaaggtaatttactcatgtagtattaaaaaaacaaagaaatttataaatatatatatataagtaaaattaaaattaaggaagatatgtgttgtccgtattttttttaagacacgtgttatcttagtttaagccctaaagcgatatggatttgagtcaaatatagtccgtagatttgtatctcaaatctacagtagaacctctatccaagaatatacttgggactaagtaaattatattttaattgaaaggttataactaaatagaattgcattcaaaatacaaaaacatatcaatgtaacaacaataacattaaataattcttaattatatcataatataactatttttgagtaaatataatatttatacatgtattaaaatttagaataaaattattaattctatataaataaatttataaaatatatgtatgtattttattaagatgtaattattcttatatagaggtatactttgttaatacaggacttagaaaatgtataactaattacaatttagaagttattcttatttataattggcccaaattgggatttaattttttttttataacaaattagagattattcttgaatagagtattcttagagtattcttatatagaggttatattgtatatatactactttcggatggttttgttggataacataataagcggatctttattactttcaaataattgactcatttcgttcattgatttaactcttatatcctatctgttacagaacatgattaatcttaaaactagaacaaaagtaacatttcttcacaatgttctacagtgcttaaggtgttgcaatacctaagtgtgggctattgctcaacactatgaggcacgaaaataaaggaagagagagctataggggtggcggctagggtttttagtgagaggagggtgtttctttcttgtcaatttattacaaaattacttgggttgagacaagaatgatctccatcactttagtataattttttttttttgtatacgcaactaattagcccattttctaaccattaattaaataaaataaataagagaaagaaaaagaaaaaaaaaatcctatagtggaaccacttgttgggcttcgactatatagatttttcctttattcgtgggctatttacaaaaatatgagaaaatgatgataagttttgataaatatggcataaatacttaattatactaaatatgacattttt

SEQ ID NO: 35641 - DNA, 4240 bp, Cannabis sativa
tacaaacccctattgcaactagcgcttcaaccactttagaaactcaaacagtaaatttgagaaaaaagttaaaaaaaaataaataatatatggagtaattcccctataaaaagggttagaataaatagtatctttgtccgtccctaaattatgatcattgtagagttttgtctttttaattattttttttttgtgaaaaatctcctgaaattccttatttttacaaataccaatatatttattaaattcaaataattaaaaacacaactgtaacgatttacagtaacatattgaaaacttgtcacaatataatacaaatttgcaaaatcaaaatagaagcaactttgcagaaagtaaaaacttggtacaagaaaattatatgtggtatcagtattctttcaaatactactagtttacggggtcacgcccaaagaatgaaatcaattaataaagtacaaaagattataaaagcaattgacttaaacaaatttagactccctctaataatttgtcgcaactcgttgtaatccaccttgttaagttgatctctgaaacacaccaaatagtgaactcccttcagttattgatgtgtgctcacttcctcccgaagatatatactcacttcctctcaaaatgagacttataaaagtcttctcccgaagacccacttttgttcaaagcttctcttcaacctattctatgaacagcaagagatcattacagaaaccaaaaacttgattgaacactctaggtttttacaaaagaaacactcttctcacaaaactaagatatgaaatatgagactagaatagatagaaaatgtttggctgctctctatgtcctatttataaaacaaaaaaaccctaaaaatagtcacaaacacgttttcacaactgtatagaactttcctaaaaaaatccctaatttgcaaaatcaagttcggactctattgcaacaaatcaggaccaaacggaaaacttttcaaataagaccaagatcacaatttggtcttcaatacctcccaaaaaagattatttgatctgatatacacatagtaaaactgaaattaacaattaaagaaagataaagttaatttttcaaaaataggtaactttctataaagagaattcgtttttttatatgacaagtttcctataaaaaaaataacaaaaactatatttatttcttaataaatatttacattaattaaaaaatattttgacaattaaattgtcaaaaaaaaactttacatcctcgaactatatgaatcattgcaaatatcatcaatttgcttatgtggctatgagttacagtacaatgacctatttaacaattttaagctacccgatatccagtttattaacattaaatatataaatattaactctaacaatgcacatacatattcttttagattaacgtcacacgatagtgctatatcaacaaattgtttaaagtaaaaaacataatgcaattctaaaaagaatgtttgcagcaatttttatagtttaggcagagaagatttttgcaactctaaaaaaatcaagagacaactttacaaaagtcataattcagagaaaaatcctatttttctaaaaattatggggacctaactggatgagtattttgtaaatataatcattataaaaactattattaacaaaataacttccaaaataatttttattagcaaaataatcataattagtgacacaaatgaccggaaactacagtgcaaccataacacaacggtcatggacctggtcgcaaaaatatacactatacgaccattatactcacaaaaggtaaattgaatgtagtaattttgctaatttaacattttttttatgttgttaataaggcaaatttcgcatatgggagagtattggggttgggcataaggaaagaatgagaaccaaaaaaaactcaatatattctcgtcaaaataagttgcatttcacaggtcaattatagaactacaaatacaagatctctatgagtttctagcacagaattatccaagaccacaactctgagtttcagcctcacagtccagtcttccgcaattcagtagccctatgtgcaaagtgacatctatctccaaaggtacaagttcctttagtaaaattatcacacagctttgtcttatagttgtttcctgaagggccatgattctgacaaccaggaccatgactctgaccaccaggaccatgaccatggccatgtccaccatgtccatgcccatgtccatggtcggggcctccagagggtttacctgggccactcattgaaacattaacaattagctctctcaccatcgcacttgcttccttgatctgttcaaaagtaccctctagttcaatgtttttgaggtttggatctgactcgtgctctctaatagcaagcttagcttcagtctggcgacatatctgcttcgagtttacaccaccctttccaatgatagctccagcgagggaagcatctacgctgatttttgcagtggctgatgcaccaaagctagaagcagggcctggaggcggttggggtggctccatccgaccactgtaacaatttggcataggaggcatgggtcggggatcgtcaggagatggagcaacaaccttgccaatttcccactcaccatgagcaaaatggcatttgtcaccaaatttgcagccttcagcagagttaaacctgttgcatactcttgttttgactaaagatgcagaagagccattaagtgtatgagcttgattccccatgtttctagatggtagaggtacaggaggtgctaaattcatcatctgggcgacagcattataaccaccaggcacataatgaagaaaatggcaactttcaccgaatggacaaccagcggtgctgcaatcagtagcatatcataaattcattagacttagatgaaaaatacaagcagattaaatgtgactcataacatacttaaatgtaaattgacaaacaaaatattttgggatcccataacaaacccaacaaaacaaaaccgcacaggcacacaataaagtcctcaatctttaaatgtaaacagtgtattgccaaattccaactttcagtgaaatcccacaaagaaaaatatcatatattctcaaatgaagataacatgaaaatcatctgtgatatgagggaaatcggcagttcacacatttcttaccccatgagagaaaaaggtatgaaaggcaaggatgagcctttccttttagaagcatcaaattacatacaatttggcattgttcgggatcacatatgcatattatggcctaagtgaaccagcaacttattctaacaaaagcattaggaacaaatttgatagcttaagataacaatttacacaaacttgttcttaggtataaaaaaacagttcagttcaatgagctaaaatgttacaaactttcttttggcacctgaatgcatcaataagcaatcaataaaatttttaaattaccaatgaaaaatatttgaacctcaaccccttgacaaaatgtgaaccataatacagctatcagtaacaaataaatcaatctaaatgtaattacacaaatgcagaccacattgctgtgaatgcaatccttgtgctccataaataaaattattagtttgttatgtagcagtttttacttcattgaaccacagaatcaatgtacttgtatagacagttaagctaagaattccctccttattagtgaaattacattttctttagtttgtattgtaatagttgagttgaaccttaaattcttatacacataaccgattatacctaaaaatggatacacttcataatatttatttagacgagaaaagatttgaacctgaaaaacttggtgcatggcttcgatttgcttcctacaccacttgaaaaggagtccatttctgttacaaaacattatatattatacttaatacagaattatagtatattggacaacccactcaaaaaataagtatattttaataaaaatataatataaaaatattttttttgagacgaatataaaaatatttttgattcatagataaaaaaaaaatatatatttttcaaattatctcttagaatagtccaactgataccgggccgatataatataaaaggaggtaattaaaaaaatactacttttattaatcaattaatcaaatttatctctaattttatatttaattgaaacatacctctttttatatatattgtactcaaaatacactgaca

SEQ ID NO: 35642 - DNA, 1130 bp, Cannabis sativa
acattaactaaatttactctcaaacaaaatttaattcaaataatatatctttttatgagtattgtacccaaattatccttacacactcacataattaagacataatttcaaatataatagatttgtgttttttatagattgatgtgtaggtttgtgggaaagttgggacaaaattttgattagagaagaatgaaaactattgtgaagtggtacgggtaaaattgggggaatgattgaaaaaagaggtaaacataatacattttgaaaaaatagtataaattaaaagcatcaaattaaaagaaatacatagtgtaaattcttctaatataaatatgaggcggcccgttttatggtctgtattataaatataggtcaatccattttacaaaaacaagctagcctatttaagcactatacgggcttggtccagcacgaataattcgttcttatggacagggtaagcttagcattccatattataaaggggttgtactaggcttacataataaaaagatgactgattaaaaaaatagatcaaaacgtacacagtcataacattaaattagattaaaaaaaattctgaatgccgaaataaataaaaatgtatcgaaataattttttaggaggtgtagcatataattaccctgtatttttttttagtaaaaatttaaagtttcaatcaacatacatgaaataagccttgtatatttatatttataaataattaatataaatatattaatttggattgggaacaattttattttttttagacagaaagttattacgtatctaccaggattaagtgagaaaagaagattgaatataaatagagaaagagatgttacataattttgttaatttggtgaagcattaataaccttttggaccatattctataaatatatatgttttaagtaattaattcttgactgctcaaaatccaaacattaatttgaatttgagttgtattccattgcagcctgctgtaagaataagatcgtacttaattggactttttatatttgttttttgagtgaacaatattaattaattaattaattgagcattcttattagtaggggtgtgcataaatcgatcaaatccaatgagaaccgaccgatccaatt

SEQ ID NO: 35643 - DNA, 3225 bp, Cannabis sativa
tttcaaataacatagaaaaaaactagcataaaatataaaatttagtatacgtgcctcgcacgtagtttttgctagtttatatatatatgtacattgtattacatgaaatgccaaataaattatttgaatgagatttaaaataataagtacattaatattcatatagtctattatatttttttcttaattaattgtagagtcaaaaaagtaagaaacaataaaaaaatatatacaaattagaaaaaaaaaaaaaaaaagatataatatatacaatttaaattattataataaaaaaactttgatattattatattttgtaacatgcatgtcaatcaaattttttcttaaaggatggtaagaccaagttcaaatacaatatatatcactaattaatagggtcgtctttaggtggcgatccaggctctctctctatctatctatctctctctgctttttttttaatttttttttttaacaatagctcacttaaggctccaaaacttttttttaaaattttaccctacgcgtcataaaaactataaataaccataatcatcaatatattaataattatagaatgttataagaagtggtaacgtgtttttaaatatatgcttataagtctttctatatatatattacaattgtttgtatttttttagtaacggtgtagaacaatacgataacaataatatcaattaattaaaaatactatctgctctaaaatatatattttaatgtaaaataacttaactaaaaattaaaatatatagtttcaatttttatgaagatcacgcaacgcgcggttttgttccctagtttaaaatatgttggtgtttccgttcaacaactgtattttgctgaggtctttcaacacagtggtgaatggtgcctttgtgattataaaaattagttaaacataattcttcagcattgtcacttcgaacagatttaatgctaatttggaattgtgtgttgacaaaggtaaaaaaattgtgtattatttgtggagcttcatatttagctcttagtaggtagatccatgtatatcgtgaatggtcatctactatagttataaaatatttgtaaccatcgatagagggtgttggatatggtccccatatgtctaggtggatgagatcaaagattgccttagaaaaattattgttggattgaaaaggcaattttgtttttgttttgccaagtgacaagttaggcaatgaaatggagcaaaaatttcattaggagaacgtaattgtttattgatcttatttgatatcaatacagaaggatgatcaaggcgattgtgccattggtattggtctttttgtacattacaagaaattgaaagatgaggagcaaagctgacagcttgcttgatgtagtagagtttgccatatctcttagcaattcccatcctcgatgtccgagaatgtccctggataatacattcattagaattaaaatatattgaattggaagtagtatctaataatgcaggtgctataagtaagttgaatttaaaaaaggaacatagagaacattggaaagtgtcaactgggtgttaagaacaactgtgccaactttttcgattttaacagaggtaccatttggtaaattgacagtttttgcattatgttcatgattaattgtttgaaagcattgtaaatgagcacaaacatggtgagttgcaccactgtcaattatccaataattaaaggaaaaaaggtcaagattaccagtaaaattgttggcagtaggtgtgtcaacagatgtggatgcatctgtttgtgggttggagatgttgtgtcaacatagaaataatatgttggagatgttgtggcaacatagaaataatctgttggcattgagaattggtgagatgggattgggagatatcaatggtcggcgtggaaacttgcatgctttgaggattgcaagtagatgaagcattgtctggttttcttttgtttgttgcatctgttggttaataatatttgtctttgtagtggccaggtttctggcaatgggaacacatggggcgaggttttttgttttcttaaagcttgatttgcagcaggtgcagggtcagaggcttgtgctgctggtgcagaagttgtagtagcaacaagggtgggaatggtgcgatggccaatggttcttcggcgttcttggtggacagtcatagaaaacactttgttaagagggggacaagggtcaagaaggagtatttggtcacggacaacatggtagctttcattgaggcctttaagaaattaaagaacttgatcatggttgagatgatcatgatattgtgttgctgcagcataggttcaggggagtcttggccttaactggttaaattgtcgtgagcttggtgaaataggagctaacagaatcttccccttgatgaagataggtgaatgtttcattgagttcaaagattcttggcccattcccttggttaaaacgattgtgtaacactgtccacatctcgacagcagtgtcaagatacataatgctgttcctcatcacaggagagactgaatgtaaaatctaagacataaccatttggttacatcggatctaagaaccaaaaggagaatcatttggagggggttgagggagtataccttcaagaaatggtgttttgttgcaggctccaattgagatcttgaagtcgcgtcgccatggttggaaatttcgatctgtgaggattggagtggcaagaactaagcctagatgatcagcattactcaggtaataggggcttcgaatgtcctcgtatgcagggcgatcggtctgagtttactggactgctggtggagctggtgacggagctcgagtattgttgtcagtgaaagtttgagatgggaggtgatcaatcggagcaggggcatcgaccacaagatcgatggtggtagctgaattcattgctcgtttcctcaccattgatgaaagcttgaagacttattgagtttcttctgataccgtattagaagagagaagatgaaaattggttttattattctatgtaatgatacttgaattgatacagaaagaagccttatataagcagagtaggaaccgacttatatgaacaaaggactaactaacataacagaattataacaaccttaactaactcaatagttacacttagatttttgtaacccgatctttatgttaggttgaataaaatgtacctgttgaccgagattttcg

SEQ ID NO: 35644 - DNA, 2335 bp, Cannabis sativa
  modified_base (1453)..(1456): a, c, t, g, unknown or other
tttttttttttttttgttttgaatgattgtcaataaggaaacttataccacattatgtccttgtttaaacataattttttcaataattgtttaaatataattagtaaaaataacatatatgattataacccacatgttttgacgggggttacgtgcatgtggcacgtgctccacacactagtatatatctattctataaaaaatgtgactatgtaacgaaatttttagtttaacgatattttttttttattttctatgttaattttaacagactatactattacttaacaaaatattctttaaaaataaaaaattatgttgatattttataaagaaatttatggcataaatactcaaatcttaaaaattacaataaaaaaacttaaaatccaattgtgttaattctttctaaaatagcacgtgttattctctaattaatctaatttagaaaaattattaaaatatattttaaacaaacaactaattatataaatttaaaaaattaattttaaaataaataaaattaaaactaacaattttttttaattctctctctcccttcattttcttgtgcttggaatgttcatcattcttctaaaccacataccttaacaaatgttaaaggccacctttacaagggaacacaaaaggccaagaagacaaaaaacaagactactgaaagtacctagcatttaaccagattttgagctcaaggaattagagtttctattaactataataattaatgggtttgtgttgaatatatttctagagaaagataattattaatggattttttatttgtttacgatttttaggtatacccatgcttttaggggtgggcatctgatctaatctaatcttttttttctcatccggtccaattcgatcagtaattggatttgaaaaattatcatccgatccaatctaattagaccttaaaatccaatctaattcaatctaattactaattggatacccaattacacacttaaatttcaatattaacttaaaaatatgaagaaaaaaaatacataaaactaagtatcactttttatttaagtttaatacttcataaacatatcatcgtgacaagtataatgcataagaccataaagtcaatttttaataatttatatataataaaattgttacttttaacaacaaaatagtacaaataagaccttctaatgtttcttttaatgtaaataatatatcaatcagatactttttattaaaagaaattgtttcaagatagttttgttttctcatacacatttgattgcttattttgatcagttaacttattatgatttttttaggctgtattatattatgttattgtttaagataccttaagctaattaccttttctttttgggaaaaaaacaaaaaaaggaaaaaaaattacaaatatactatgggtccattaaacatttatacagcccatatnnnnatatttataaaaataccacatgctctaaatttttagccgcacgaaacaaacgatgaagatgaacatacctcgatcgtttaaataagtaaaacaaccaaaatgagagaaatacaaccattaattccggtgaaatcaactggaaaagaatacctgcaatgatctaaacaaaaaatgacgaaaaaaaccaaaaaaactgggaagaaattgaaattacacatttgtaattgttgatactttattaattgatttcattctctgagcgtggccttgtggaccaggagtgtttgaaagaacactgataccacgtacaaatctattgtgtcaagtattttaattttctgcaataatttttatattctgtctgttctgttttgtcttgtcactgcaaaacctatttctgcaataacagaattatattctatttttgcagtatacaattttatattttcgtatttattattgacatttgaaaagactcaatttttttttcaagattaactttaatatctgatccttcaaccttaaaataacatgacaaacatgggttagtattcaatgtataatccatgacctagtctagatttatagtcaattattaaatcgtggaggactcttgtggtaataactacctaatataaaatatttatataatttttgtggcgagcagatgtttacacatccaaaatatccatttttcttgattaacatatgcaagatatcttgaacatgtacacatatgaatataaatcttgtggctgcggactcttcaaacttattacaattaattcttctacagtagtacaatgtatcccgtggttgtggtcatataactcataagcatatatacatattcccatctctatctcccaaatgaaatga

SEQ ID NO: 35645 - DNA, 1002 bp, Cannabis sativa
tcccttttgttcatgggctggcggttatttttcaaaaattcaaaattggtttcctttttgctacatcctttcatgtttatttaaaccaatttccttgtcttttattcttacctctaacccgatccctattttctagtattctttttccttgtttttcattcctctttcagaaatccatggcgaagactaagaatctcgggcatccaagaacaatggtggaatctgaacaaccccctcgaatgctcctcctgctgttccaatcttgctccctgctgctgcaactgcgtcaaatccaggagattcatcgcttcctcaacgtgaatctcagcccgtgaagcccaagccaaaacgaattcctaaacaactggttcgaaaatctgtgcaaccctacaaatgctggacctcattgtcttcatcttcaaagggatctcctccacctgctgctggttcacctcctgctgcaacagtgaaggaggttgctgcttcaaccccaactggtccttcctctcgcactcatgcctagcaagcatctatcgagaaggaacttcgctcgaaatgtagccatgacaaaccagcacctccagccaagaagcttaagacaaatcccccttcggtttcttcaagttcagaagaagaacccaaggaggatccctctgttaattcctctaataagtccgtgtctctgcattctaaaaaagagattcctgaagacattggagccacttctgagagtgaagacactaaactcgaacctgagcctcctttgaccaaatatgctccagtgccttctcgaacatcttcagcagccaaggcctctgctactgccaagggcaagcagcccatgaaggattcctctcctggtaatatccctacatctcactcctatagttctcgtttctactttcgtgataaggagcgtgattggaatttatatgctacccaaaagtttgagagtgaaaggaattatgatttgcatgctcatagggtatatggtattgttaa

SEQ ID NO: 35646 - DNA, 1495 bp, Cannabis sativa
  modified_base (289)..(294): a, c, t, g, unknown or other
atgatctttgaactgcataaccaaatatttctccacccctatcagctgtaagatctttaaccactcacctaaatggtattcataatgactagaaattcataaaatttctcaaacattttaaatttctttgcataaggtaaatatctagagtgatcgtttaagactttaatgataactcatatccaccactgaatgtacatccatatgttcaaatatagatgatactactttcaagtggatattggcatattctctttttgcagaaaatgatcttgtcaaaaccactatnnnnnngatgcaaatgccatagatatatattatgtgattctggtcttttgatgacttaggtcttgttacaacaaagaatttttagaatagtccaagcaaattctggttacagaatacaaaactcataatccatacattaacgtacagttcaaatccattgtagaaaaatggatattaacaacttgtaaagttatactatagtattcaatgtattctggaaactgaaatttaaaatttctatttggaatctaaattttaaagtcaaagacttaaatttatatcaaatattctctaagtaattattccagcttggaccaccactactattttaactctaagtttaaattgcctttagtaagcatatacaagtaggagattctttaagatcgaggatttatatcattttgggatagaatatctagaatatagtcatttgtgctactcattttttatagaagaaaatagaatgacatcataagcagatgatttataaaccatctgtccaatgatatactatctaagcaatttctaaatgaaaaagctaaaaggaaaaaaaaaataaaggatctcattttgattaaagtaagaacccaacaatgtcccgtttaagcgagagtcaaagttatttttattttataaacttcttcattgttttatattgtaaacacttagtctaagttgtcatatttggatgagtcaactagatgtcacatttacaaatatttatctatacattgttatgtttgtcttataggtgacaatctttggaatatcccattaaaaataacaaactaagttagaccaacaatgaagattcaaaattggtactacaataattaattacaaaaaataacatgaatgttcaatataaattcatacactatttagaaattattaagcatttagcaagtaataaagacatgtgaaaataaaaaataatcatatcttaaataatttttaaggttttcaacaaattgatacagtgtcccgtttatgagagagttaaagatataattcattgaatagagttgtcagctcatctaaaatggacacccttttagcaaccttttatttgatggaaataagaatccaacgttgtcctatttaggcgagagtcaaggtcattttatttaatgagtttctaccattgtttcatactttgtaggccctactctaggtagtcactattgaggtgatctttactaag

SEQ ID NO: 35647 - DNA, 1419 bp, Cannabis sativa
ttatggtaaaatgtgggggtgagatttaaatttaataaaatttgttgagaaattattgattatatatatgtgattttgaatttaataatctaaattaatattttgctatgtgcgtatgtgatattttgacatatttagtgtcaaaatttggtggtaataatttcaagaagggaattaaatctaaaatggttagagacaaagtggttttatatatttttaaatcaagatacaaatattatattgtcaatgaaatgtaaaagtgtgggggtgtatactcctatatgagaagtttagacatgtttagtgtctaaaactaaaaatgtgtatatttgagccatcagccatgcttggtgtcttaaattaagtgtaactttgacatatttagtgcctaaggttaagtgtgtaattaaacatatttggtgtctaaattagtgtttaattttgatatgctttgtattaaaattattaaaaatttgaattgtgtaaaaattaatcttttatgaataaattttcaaagcttaagtacttaaggagaatagtggtcaccttaaaggtggacactatatttggctagcatgattcgcttaatcttcatacaagactaaagcatgaattttgagagatgagacctaaacttcctttagtgttttacttaatgatggtaacctatcttaacactagtaaaaattaagtcttaagttcaataggtaataacaagtcaataaaatgaacgtgatactcaattgtcccatctatggacgagtacatgtagtgaatattagaggtttaaaattgaaaggtttttaaatagagcctaatgcttaagaaaactcacttaaccttaaagaagtgtctaaagagttgtgagatactaaaactctacctatatggactttgagaattgagagttattctttaaaaagtcagatttgtgcacatgaccattaacggtgtaaaagcaatccataaggttcttgagtgaacacaacaaaagtgtgtgtgttatcaccgatttgttattaaagaatagtggtttaatgctacgataaccaaaattttgataaactttgttgtaattatactaaggtagaactcaagtcgaaatatattttacactatgcattactctataacatgatatatatttgattgattaaataaaatattgtgttacaaaattatttgctacaaatgagatattatttactttagtggaggaatattatattattttataatttagattaaataattaagttataaattaattcggcaaattattaattttgtcaaattataacatacattatgaagttataagatgtgtggatcacaaaataggagttgcaaatcctttaatttgatgatcacttgaatatggaattctcacctcttttcactcttaaattagtaaaagat

SEQ ID NO: 35648 - DNA, 2672 bp, Cannabis sativa
  modified_base (922)..(931): a, c, t, g, unknown or other
ggttcttctttttggggattagcacaatattcctattattcagccctaccggcatttgttcggttgcaaggaaatgtttaactgtatggatcacatcactaccaacaatgggatcaggtgatgcacatcctatctccactctttcattttaatagcaatgtcagagaccactgataagtcaactgaggcttatacattgtccttaattaagatgattgccaactgaggccctcctacgtagagatactatggtctatcaatagggcacacaaacatttgttactcccaaatgagcgccacttttaagatcgaggataagtgctaccataggaactcaaattctcaaagacaaccaaatgacagacttagtgtaaagccatccaaccaactacaccacacactcggtggtcttttttaaatttgagaaaataaaaaaagttaaataccattttggactctgtattttgtaaaaattactgattagaccctctgctattttgttaaatttgacaattcaaaccatgtgtttatcaaatggtacaaaatagaccctgagtttaatttttcgtaaaattaaaacttaatagtaatctgaactggaggtgttagtactagattgattgcaattttcacatttgttcgtactagatattggcttcaggttaattatactggaaatataaattaccaaaaattgagttcagagtctattttgtacacattttaaaaaatacaatggctaaattatcatttaacaaaataaatagtccaatcaataatttttacaaaacacaaagtctaaaaaagtttttacaaaaaaaaataaaattaaaggataattaacatttttattccctaaactttaacatgtactaaatcatgccccctaaacttttctggccgttaaaaattctccctgaannnnnnnnnntgttaaatttaaggacttttgtctcattttatttaattttactatttcagtaattgtttatatactaaatcatgctccccaaactttgatatctaccaaatcatgtctctcgaactttgacatgtactaaatcatacctcatctatattagactttttttttactaaaattgaacaaaaaattttaattccaaaaatcacaatagttcagaggacatttttaacgactttaaaagctcaaaaaacatgatttgatacatgtcaaagtcttagaggtaaaaatattaattagccaaaaataaaatctttaacctataatatagcctttaacgtgatacatggtcaaaaaatccaaacacaaccgggtcgggtttttctttataaccacgcaacgaacccctattggccgtaaccaaacagtcccaaaacaaacagaggattattatatctcacaaccataaaacagagccaaacacgtgaattcaattaaccaaacaaacaaacaaacagaccccataaaatctcactataaattaaacttcaacaccattttttgttctccatctcctctcattttctcctttcccaaaaccgttttcaaaaacgccataactaaacaaagacccgttttcaaaaacggaaaaaaatgagaacaatcagttccactggtttatcaccttctccggcgacggctaccgtggagggtcagagatcaccgtggcactcgccggttccgtacctgttcggaggattggcagcgatgttgggattgattgcttttgcgttattgatattggcttgttcttattggagacttaacggtcaaaacaataatgacggcgaacgtgatgataacagagacttggagaacggttccggtgacggagagaaagattccgttaaaggggttaaggtttatgaagaaaagtttttggtgattatggctggtgatgaaaaaccaagttttttggctaccccagtttttgctaaagtttcgatttttaatgaagaaaaaactgagaaaatggaagagaaagaaaattctgatgagaaagttaaacaagatgatgatcatcatcaagctttggatgatcaccatgatgatgatgatgatgatgaaaacagagaagaagagtgagttttttctttctttttcaagagaaagggcaattatgtcttttcacctttctttttgatcacgtgatcaggtgaagtgagtgaactaactgatcatcaagggcttttctttcttttagctcattttgttgttgtttttgggttttggaggggtttttggtaattttattttcgggaaatgtaaatttttgttgagagagtaagaatagttattaattattattattaattaaatatgtattaatattatggtaatgagagaagataaacatctctttccagctatttacagccaaaattatgtcttttaatttttatttatttatttatttttgcactttactttgtgccatgcagttttttacagttggcttatattatcacaattctctctaattaagaaaaaaaaatgaaaattaagaataatgattatatggacgtaaaattaaagaagctaattacgaaacaaaattagtaaaatagcaaaatgtgatatttgatgtggtttgagtatggtggttcgtgagtcacatgtaagattatgactttgttgatttaagtactttttctctttaaataacagaaattttagctttaaaaaatgt

SEQ ID NO: 35649 - DNA, 1473 bp, Cannabis sativa
cccagccataaacactctcataaagcttttaccctctcttccccacactggttctatcaaagacctcaccttttgccatgcgtgtcagttgggtaaaagccatactctacccttttccacttctgacacaaaagccacccaacctttagccttaatacatactgatttatggggtccttcccatgttgatgccaaacaaggatacaaatactatgtccactttcttgatgattatagtcggtacacatggattttccccttaactcagaaatctcaagcctttgatgtgtttattaagtggaaagggctagttgaaaaacagtttaatctcccaatcaagtctgtccaagcagactggggaggagagtacagaacatttaaaaagttcctagaagatcagggcattcattttcaacacccttgtccaagaactcatgagcaaaatgggagggcagagagaaaacatagacatatcactgaaactgggctcactttgcttgcacaatctggtttggatttatcctattggtggtatgcctttagtgcagctgtgttctctatcaacagattacctactagagtcttgcattatctatcaccctatgaaactctatttcataccaaacccgattacaatattctcaagtcctttggatgtgcatgctatcctcatctacggccttacaatcaccataagatggattatagatctcagcaatgtctatttttgggatactccaatcaccataagggatatctttgtgaaaatcctgaagggcgtgtctacattgcaagaaatgttgtttttcatgaacaactttatcctgcaaaaagttctcctattgaccatcaggtacaatcttctcactccactactttcccacttaatacatttaatactacacctttatattcaaacactaatgtacctgctacttttgaccaaattgtgtccccaccattaccaaattcccaacctttaaccgagacatcacaccaaactagacatgattcatcacatgtcactattccaacggctcctttatcaaccttatctcccaacattgacatgtccatgcctatccctgtaccatcttgtactatacctataccacctacacatcatgaaatccgtgtcccttcctccccattatctccaaacaatgacttgtctctttccttgcccacctactctgatgctttaccaacatgtcctagtgtcccatcttcccttcccaatgatcccacgcctaccaccatttcattagataaaacaaatatcatcccaactccttcagtaggccgtactcaccaaatgaaaaccagatcacaaagtggcattactaaacccaaagcatatcttgctacaagacaccctctccctgaatctctcattcccacagaaccaaagtccctcaaagctgctcttagtgatcctaaatggcttgctgccatgaacactgagttcaaagc

SEQ ID NO: 35650 - DNA, 3175 bp, Cannabis sativa
  modified_base (343)..(346): a, c, t, g, unknown or other
aagccgaatggttcagagagcataagccgatgggagatagcggattgggatgacttcaagtcttaagagtaagacttggtgttatcaagtttgttaaaagttagtgagtcatcggagaatgaaaggttgattttggaaaatggacttgtgacagttttgagagccgacacaagcaggagccacaaagcaaatttgtggttttgggtgattgatagatcattgaccacatgaaagtagctcagaggagcgagtatgcagttgttcaaaggggccttttgcatgaagccatgtgtgtgcggtaggacaggagggccaatgttgagaacttcgcgaagagattttnnnnaagagtgcacttggtgctgcattgggtgcagttggcttgcaagcctcacccatgtgggacacacaattttatcctgccatcagagtgtcttgctcaattgtcatcagaaggatggtgcgccatagagttggcgtgtgaaatttccgaagggacttggcttcagtggaagcgtgttctgtaggtgccgttgggtacggttggtttgcgaacccaccccgaggggtacaccatacttagtccttgtcaaaaggagtatgcattggacaattggcgggtgagcgactaacagaggatgtgttagcttcaaggtcagtgttgcaagggctacttggttgattggaaggacgttgtgattgactcggaggagttcatgttgggggaagtattctagtgcggaggcactactccatgggagattctgaatagtgacagtggcacaagttctatgatcgagtccaagagtgagcgagggagttcgccaccaagagggtggttctacggaggtagagggacaagtgcagaattaggattcgggtgaagcttggagtaagcttaagagtcgagatcaggtggatttgcctgcggtccgtcgatgagggcatcgacatgttaaagtgggggagaatgtaacgtgcatgccaagacggcacgttacaagataatctacaactgtacagtattgactctcgaaaatttggtttcgatggagagaaatgatctagatttattcaagacaaggagaaattaaaacatagctattttttggaaaagacaaaactttggatcgttttttggctcaagagagtataacattatttcattctccatttctgaattaataggggaatgggagtttttgttatagtttgtttataagctatttcggattctgttttggttttcaattatgttcgtaatcctgagaggttagatgttcgttgctcaagctttaggtttaggcatgctgcctaagccaatctactttgtttgtcacatatctatacaattcttaaaaaaatcagtctcatttgttataataataaaaaataatattaaattaatgaaaggcataaggaacgctataaactcacctttccatccataccctcaatacctttcgcggcatcatctaaggtagcatattttacaaaaccaaaaccctttgaatatccagatacacgatcagtcaccactctagctataaacagcaaaagattggtgattaatagttaataaaaataatattggggtaatagattcgaataaatgaaagaattatataccgtgcacaacttctccaaactgagaaaaggcttcctgcagtttttctgttgttgtgcgtttactgagtcctggatgaaagtagataataagttccaacattgaaaagacaacagcagcagaaaacatgtattgtcaacatattaaacaaagaaaaaacatatagtttacactctgcagaagaaacttatgaggtttacaactaaatttttatttaagtactgatttgattgtaatttgggctcagcaaaaggagagtaacaaaggaaaacttgaatgtgaaaaaaagtagcattaggctcaactcaacccaaccaaagaaagaacaacttaacactcatccagctattaaacatattattctagattaaataaacaataatttaaaagaaaattacataagaatgaatatctaacccaacatataagctggtgggacagaaagtaaatggtaagaaaaacctaacactttgtactatggacctacataaaataaaacaccatggtatgttattatgcagtgtacatgaaatggggttgtatgcgtcctaatcacagattgaatgagaaatatagcaaaagaaaaacaaaataccatctttatttatcttaatactatcaaaacacacagatagcccaaatcaacgaatcacaaaacaaagctttgagctatgtttatagaaatagaatattaaaataacaatgacccagataacaatgaacagcatcaagtgaaaggaaaacaaaaatagttaaaaggaacataccagagacgaagaggttggtgctgggctcagccttctcccgagcctgagcggcagcaggggacggcggaggaacgaaatgagaagttgaaatcgtggagaacaaccgtgatattccgcgaggtgccgctgctgccgccgatcttagagccatctattctgttgtacctgggtttaaccttaaaccctctattctcttaccacctgattgtctagaagaagattttgtgttgtgtttggtctgggccttggccttagggccttccaatgagcggtggggagaaaatattaaattacagagttccctctctttaaaagattttagcataaatgtccctaattttcgtcttgtttggcagtttagtacctaaaaaataatttggtaaaattgctggagttccatatagcaattacgtcctttttgtttatttttctttctcgacgctggaggtaataaaatggaatagaatggaaatgaaataatcttcattccatttctttatttggttgcataaatattggaatgtcattctaatggaatagtttttacactatttttgtagaataactatttcattttgaaatgaaagaaaaaatcattccaatgcatgatgagaaaaaaaacattagtaattttatttgttttttttttttgagtatcgcgtaatggtttttacaatcatatattagcttaataacttaaaggtcctaggttcgaacccatgacctctccctttttcccattcctccctcaccactaagtatagcgtaatggtttttacaa

SEQ ID NO: 35651 - DNA, 2523 bp, Cannabis sativa
ttaagtgtataaatttaaatgtctcgcgtgtgtaagaatatattcataagcagtgtatggtagctctgataattggataatataccttaaatttactaacagttcagtagtttaaaaaattttacagccaaaacttaaacttggaggattacgtgcaagtaaaacaataattaataaaaattaactacaaaaaaactcaaatacaaattattaccataacaacaataataataataataatgccaattctaataaatgttgcccatgtagttgactaaaaaatagtgggttatatgacaagagagatataaaataaagacaatgaaaagattttatattgagcacaagtactctttcatatttcttattaaaaacaaaagaaaaattgtgattggctaaaaaataaaagtaggtcaagtggggtatgcttgtaaaacaagcataataccaacaaaactcttattagaccaaaagttgagaaagtaattttgtgacatttttacatgaactaaatgtcattatagaagtaatttttgaaagcttcaaaatgttggagaagaagaccaccattaacaaatacagagtgatcagcatcattattattatccctaagtatcaaaaaaccaccatcaatttcttcataagcaagcccaaaatggatctcatttccccaaccaaaatcaataccctcaaacgacaagttcaaccaactcgtcactatgatgttaggattcccccaatgtcttccacctccgccgttacttgacgtcgattcataactgttttgaaactttgtcaaatctttttcactttttagaaactcagttgctgacattatgtaatcgtttgtaaccatctcaataaccgaacgtactttactaactccgtaacttaacggtttacacaacaactccccagcttcacaactcgccattggctggaaagctccgttaccgaagtaagaaagcggtaacggaggctgaagacgttgacgcaagtcgactgacactagacaagcagttacttgttcctttaagttcttccttgccttaaccgaacacctccaaatatgagccgttaaggcctcgtaacacgtgtaaggtcgagatcgacggtcttgatcgttgttattcgccttgttcttaagtttctggacttgttcttttgtaagttttaacgtgaacaatgtcgtttccatctttttacgctcttcggttgtggtgggagcggcggcgttagactgtttcaacaaaaacggcatcttattacaaaagtcgtttgagtgatcaaaccgctgtgggtttgcaacacaacaatcaccaactccaaaggcttttttgtcgaataatggtgcgttttgtaatggcaagcctcgtgcgattcgggcccactctttcgtgaaactggcggcgcttactccatccaccacgacatgtgacatagtaatccctaggcttaaaccaccacaacttaatttggttagttggacgagaagaagagggcgttcgtggattgggagagactcgtttatgtaaggaataagaaaacgattagactcaggagttggtgtgaagtgatctttctcgaaatgagaaagatctgcgttcagctcggctacaacgaaaactgccccgtcttcgttgcattcgagctgaaaaccgctgttgtccaagttgcgcaagcgcccagctagtggatagaagtggagtagagtgtggctcaaggaatcgattagggtttgagtaacggtttcgaatggggttgtgtttggcgcataaaaataaataacacttgtgtgagttgtgcatccgatctgatcccataccgacaaggattgatttcctttccaagttggttttgaaggagtcaccataagtttttgcttcatcttcaactccatcttatttttgtctttaaatttggatttggaataataactaatatttgtgaaaatagaggtaaggatactcatatatttatagggagaaatttgatgttgcgtatgctctaataactaagacgagtatttcaatttttccaaggaagatgaattatttattcgttattattattaattatatatattaattaatattttttttccataattgtgtatattggaactatatagggttacatgtaaatttttagaaaattttaaatagtttacatacggaaaaaaaggttcaaatattttattacaggcgtgattatttttttatacgtggtaagtaattgtttgaaatttatttttaggacggtaaattagtcagaattttctaaaaattcactaataattttaaataattataacctatacgccatcattacaaaaattattggactataaaactttgttgaatatcaaaacaaaaaataggtatatatatatgataaaaattattgatatttgacattttcaaatatcaaataccatattaacatgttaatttattattcgttagcggtttctcatataaacataatatttgtatcttttaagttattaatattttgcaccaa

SEQ ID NO: 35652 - DNA, 1087 bp, Cannabis sativa
agaaggatgtaaaaacccatctaataataatttaagctccatcagtgaagctaaattactttgttgtttcgaaaataatgaaaagttgttcagctgaagaaagtttttaactgttttatctctattccatttttggatagaattagagacacgtcttctgtatattcagatgcacttaataggtagtagagaattcagcatccctatatgagtaatgcatatagaaagtgatgttgcataatgttttatgaaaacgaaggaagtaatggtggagaaatcagttacttaccacagacttacagttcctgtaatttgggtttagtaaaatacactacacttgatctggatatcgagacaatagatggtcatagtgaaaaaaaaagatgtgggctttaggagcatgaacaaaaagattgtcatagtgaaatggttttgcaaaaaagcttagatggtcaaaatgtacctgaaaattgattatggcttaaggaagaagatccaatatcaaattgttttatggctcatcagcaagatcaaatatgcctttgagaaattgaggatgcagagaaataggggattgagatattgggaggcgatgaaggtagaaaggaagctgaatttatgggtggcccgagtaggaagaaagatgagctagggacgttgatggtggtgtgaaagatgcacggtggtgctcgatggctgcagaagtaactgctacaatggttgagacggttgagatagataacaacgtgggaactaggaatatggggggaacagtttacaaagtcaaagaaagggggactaccaaatgctaactattcaaaaagttaatataacaaatatgggccttcttaggaatgatagtggcaatgggccaagcacaataggttgcactgaaatgggtctgcttgaataacacttatagcccaattcatttaaggaaacttgtcccgatgataatattggagttactcatgatgcgaatagctcagttggagctaaaaataatttgaaaaaaaaggaaaaaggaagggacgaacaacagtgcaaactatgaagagacgatttttttcaaaaaaggaaacaagtg

SEQ ID NO: 35653 - DNA, 2816 bp, Cannabis sativa
tgattgtaggcccgctttgagaatttatggacctaaaactcggataagttgaggaatacttctttaatattcattaattaaaaatattttcatattatatttcatcaaaatataccaatttttgtgagtgggttgcctaatataccatcatcttctgtttaagtccaacacataatttacattaacttaagaggtacaatagagacttcatctataaaagtaagtatattttaaagaatatgacaataaaagtaaaaattaaaacatgtaaaataaagtggttatacaatataatttcctcatttaaatttaagaaatttttatttttatggtttttaatgcataagtttgtaaaaatatgattttttcttacgaaagttattttaagggaaaattttagaaaaaagttaaaaatacgaagaaaaaaaaaatacagcataaggtacctagttaccctcttatggtaattggttactcatctggttaccataagcatacctagttactcttactcgatttttctatatttcttaactttttcttcaattttacgataaaataacatttttgaaaagaataaagaagctacatttttgtacacaaattattaaaaaccataaattttgtaatttcctctttaaattttgggatcctacactattatgtaatgtgtgtcatacacttcacaaccaaccaaagttatgaatatttgttgtttacaatacttataattttacttgaataaaagactaatgaggcttttcgttttttatcttgggcccctgaaaagtgtgggccctaggcacggggcctagcctgtctatgcctaggaaattagattgtataccccttttaagtcagtgtctctcatatttacctcttgttcaaaattctttaattaataccctctttttccttcatccttccaattataaccctgtcccttttcacacgaatctcttctctaattcaacatatgaattaacatttctttgcctgaaactttcagcaagaaacaaatctccctataacttcctagccatctcctttgtcggagctatacgctctaattctctctcgaagattcacagtcatcaacaacaatcagagttgtatgtcctgaggttaaaagcttcgcaaccacacattcgtcggaccatttctgttgtcgcacctcaccatttccgactcccttgcgcaactacagcagtgactagtttgtgcaagactcaatcaatctggtaacataaatttttaacaaaataaaatctgttaacataactaagggtatattaggtagttcaattttaaaagagggtatattttaattaaatgtattttgcaattatttttggttaaagtttaataaaaacatgtttatcaacttatccccctactgcctagcacctatgatcctatgatttttaggtgtcatattgatattgatgtaattaagtatttagttctatatactttaatttaataatttttaaaaaatattaataaccaatcgtaagatgccacctataaatagtgttagacaccactaatatttaataccaacactctgtttataatgacaaacttaattattggtattattattttaagtttagttatgatccacaaaattatgacataactttcttaaagctaattattattaatattttactaaaaaaataggataagtagctaaagctttttcctaatttattatttttattttattttattttacttttgtagaatttttctccaatttttgcatgtacccttcttttatatattgatgtatcgttaatgtgatgtgataagatttgagtttttagacatatagggtctaataaaaaaatttaaaaatattgtactctgtattattagtagtttagttttaatatttttgtatatttaaggctaataaatttaattttaactataaataacttcatctaattaagtagatcctactataactatacatgtggattaatttcgaagttatatttatctttatagattaatatgagaaatgataagaggtactttaaggtgtcaaacactataataagtcgtatactaatattagtaaaggcagacccatatagaaacaagacgggatagccatctcttaaaaaaatcgaacaagaaaatgtatatacattttaataattagttacaatatatatttgtaataaaagatgatattgataaacataacattaatttttgtattatgattaaggtagataacatataagataggggttaaaatctcaccaagagcatttttatttttatttttaagtttatttttgtcccatatcttatagaaaagaaaaaaaaattatatcatttattactttaaatcttaggtatattacgagctattagtacaattcaatatcgagttttacattttaatttaaccaataatatatagaaaatgaggcaaaaagtagagtaaacctatttattggtgttatattacttaggttgcatgatgatgcaagcatggtgatgcaataggtttaattatgataaaactaccaatctgtcccattaaattatttgtatagattccttgttattcaattgtctaatgccacctcacaacaatatttggtagacattaaaagactagggttcacatcacaccggggccgagccagaacgaaatacttagagaggccaattattaaaattttgtattttgaagaaaatatttttatagaattgcacatcacaaaaattattaataaggacatgtttggatataattgtataattactatgatattaatttcataattaaa

SEQ ID NO: 35654 - DNA, 1474 bp, Cannabis sativa
  modified_base (35)..(41): a, c, t, g, unknown or other
ttaggttgttaatcaaacatacatgatagtaaatnnnnnnnggtaaaataattccaacacctagttggatcataagtatcctcacttctaggtacctaccctatagaagtataggtttcttcgttccttccttctgggttttaattatcaccactttagtttcttcttgaacgtgttgttccagaagtatggggtctttgaaacccattggttctttcctagggcgatgggtagtttcctcaagatgacttccatcattctaattgtgatcatccatggatagatttttgtttgtaaggagagatttttttgagttttatcacgtaggctctcaatgaaagtgccaaactattagggcatattttcgttaaccaattataagccttttaataataaattttaatagagaattaataagaaataaataatgtataagtaacaccagatatttttacgtggttttctagttaaatctggatactccacgagtctatctcatttaagatattttctgaatacaagatacaatatacaattgatcgtatttattcttctctcttgaatcatctgtctctttttctgtgggatctgcctctatgtatagaaatatatgtttggaagttatttacattaaattcaaattatattcgttaataaaacgtaattaactctcacatttcatttaaataacatgttagataacactggataactgcttaactccttcttattctttatcctttcgatggtcaatatcgatttggacaatgacatttcgcttgactcttagataattaatgctgatttggataataatatcttatatatttccaagttgttatccttatttattatgatgtggaaaaaatactaagtgtttgtagtagattcgcctcgtcaagtttttttaaaatagcgaggtggttttcttgctatttgtgacctgggattactttgtataactgtattgtactcctttgaataaacagattatcttcttgggcctgtgtacttcgaggcatgtgtgtgtctcgttgacatgggttctaatattctcttatccttatctcgcttaaaactatgtagtctgcgagttatgaataagtttcattgatcctttattaatgagtcattgtttttctttgcattaaatgatataattttattatatcaggtggttcatattccattgtacgacatgtgttaccctcttcagtgtagctaaattttaggtataacaatactacagtgaagaggttctttagtaaaaaatgcagcatgaatcaatgaaatgagcagtaaaaatggcggtatgcacacatgaaaaatgcctataaaaattgcataaatttattccccatcccttagaaatcatagagttgagacaaacatgaagacaaaacagttataatcaattttaactaacgagttccaaacaattcaaatatttgtataattcataagtcaaaagaga

SEQ ID NO: 35655 - DNA, 1249 bp, Cannabis sativa
caatgaatggggtgtggcggtggagattgaaagtgatgtaaagagagatcaagtgacaaatttggttaaagagttattcgatggagaaaaaggtaagaaaataaagactacggcaatggaatttaagaaattggtacatgaagccactactccaagtgggagctcgtctacaaatttggatgatttgattaatgaagtgctcttgcatcaaactgattaaagattttatatttataatattatatatttaattaggtgagcccattttgtggtgtttggtaataaaatgtcccttttcttttttaattgttttttttagataaaatctttagttgttaatttatgtaatctctgtatgtttatttgtcggtgttattttatttaaatgtacttattaattgcaacacgtgaaaatttcattataatattatatatatatatatatatttatactttgaatgggtattaattagaataacttatatttttatgtttaatttataattatttaattaaaaaaaaaattcatttttaaatcatatggaccgcggttgttccatcggttgaacaaagaataaaaagaattagcaaaacaaaataagaaaaagttgagtttaacttaaatatttatatgaacatatttttgatatagtgtaaaagatatatttttttttgatatttttttaattaagtagttaaattaaacataaaaattcaaatttatcttttataaatttaatgatttaatattttgaaaattaatatttatagttaaatttgtttagtaactattaatagataatacccattaaaaatattccatttatatatagactaggttattgatacgtgcacgtatactttgttatatttttagtttttatttttgttatatgtgtatttttaagattttataaattaaaggaaaataattaatttttaattttatgttttttttttaatatttacagttttaaaaatttaaagaaaataaatataaaatttaagaatagtaaaattgaacatactgcccaatattaaaaataacaataaaaaaataataatgttacaaataatatattgatattcatatatatttaaattaatttaaaatttgtataagtttaattaacctaaaacaaataatattaaaatgtatagggataattgcagcaaaagtccccaaaaacttagggttgatgcagattagtcctcaacctcaaaaattggcggtaataatcctcaaggt

SEQ ID NO: 35656 - DNA, 1556 bp, Cannabis sativa
ttataatcacgtaataaacatgtgaacaaagtatatgacaatgtcaagatatgatttctgatctttattgaaagtaaataaaattacaatgaaattgaattttacttagggcatgaatcccaacagaaggaacgtcttaaaattgttgtaaagactgctattgaaaataaaacaggaacaatgttacagttatgaaaattctagtatgcaagtacacgtagtcaaaataaataaataaattcccacgaagacggcagttaattaccaaacaaataaattcctaaattctattttgcgacaacaataataacaaagaaggtttaaattctaatgaaaagaaaacaaataattaaaatgcaattaataatgatcagagcttagggtgattaatttcagctgaatctactttctatggtttaatataatttaattctaattttaaattttcatgtgatagcagatttactaaagaaacttatatttgggttaggacatataaatctcaacctatatgaaaactttctgcatttctgtgataaatttaaacatatagaaggcattaaacatgaaaatcctaaatgctacacagatcatacatatactcttgtccaataatgaaattggtgtctatttcactatagccaaatcaatactccttagatttttcattaaaatcataaacaattaactagtgacaagacagttaaaagaaattaaataggaatgacatagatgcacatagaaaataggaaagaactaaatcatattaaaatcataataaagtgtcaaacaatctccattaacaaccctaattaaaagtctagctgctcatagtcattgtaaacaattgataacaattaatttagagcataaaaataaagtagaagaaagaactcgtagaaaaataatgtgaaaagtctctaaagctgccttctgcctctaatttttgtctctcaaaaatattgttctcaaaaagtatcaaaaggtcccttttattctcaaaattagggtttaaaaatcctgattttgtctaaaacaccatagcgggccgcgacattggtccttcatgccgcaggtcctgaaggaggtttttgggcagcgagcttcttggtgcaatgactgataatattttggccataactctttcaatattacttagaattgaacgattcaatatgttttgaaaagataaaagagatatctagaacttttattcacaatacttttcctagaagtgaacaaattatagtaaaaatgggcttaaagctttagacttgattttcaatcataattagagcatgttgagcatccaaaacttagaatctttcacaccatcatatcttagaactccaaattccataatgaattcaacattttcatctcatttaacattttcttctcattttcaatttatattatgaattttaccatttaaactttaaacaagcaaaaaacaagcgtaattctacaccaaaataaatataaataattgaaacacacatctaaaacactttataaaatgcacccaaactacccaataaaactccccctaactt

SEQ ID NO: 35657 - DNA, 1333 bp, Cannabis sativa
tcaaggctcataccattgtagctagaagaccttgtcgaagtcaaacaacgacaaggagaacctttgaaggattacatggctgaggccaccaaggtcaaaggtcttacagaataaagtcagtatacagacatattagggggcatcctcccattgagtgacttctggaaagacatcaagaggacttaaactaataacatgaaggagttcctcactagagctgatggatttatcaaactaaaagaagttgtctgacaggcccagacagagaaagtcaataacaggcagtcacaagacatcctgcagtcccatgacttgccaagcgcacatgtaggtaccagcaacactgcccaaacctctagtggcaagaacactaggagcaaacacaataatgaaaactctagaagaaatagtgggaaaaaggggaagttttacacttctcccattccataaaactagaaggacaaggaggagaagaacacatgcttcacccttttgacggagaaacttgagaccatctttatggccatccagggaaaagtctcatatagaaagccctttcccatcaaaagggaacttacgggtagaatgaccagactcaggaacaaggttcccagaacagagatccaatgccaccaccagtggcaagacacttaggggtcacaagagaagaagacgatgtacaacaccctttatactacatcagtaagagattgattgacgctgaaagttagtacccactcatggagaagctgacctatagcttgctcttggcttccagaaagttaaggccatacttccaagcataccctataaaggtgtataccaattaattattgcggaggttttacaaaaacctaaagcattaggccgactacttaagtgggccattgtgcttggtcagtttaacatcacatattaactaagaatgtccataaagggtcaagcccttgcagactttgtggctgagtgcacaaactcatctattaaaatctctcaagatttatgagaatagcaagagccatagaataagagagagcaagagcagctataaaaacctaaagaaccaacatggaaattccgtgttgacggaagctacactgaccaattgtctggtgtaagcatttcccttataacaccttgggccaacaattgcacggagtaatcaaattcggcttcaaagcctcaaacaacatgaatacaaagccctaataactgaactcaagctggcacataaagtacgagcttaccacctagacatattcaaccactctcaattagtcgcgaatcaagtcctaggtgaatacacaactcgaggtgaaaaaatggtggccta

SEQ ID NO: 35658 - DNA, 1096 bp, Cannabis sativa
  modified_base (90)..(111): a, c, t, g, unknown or other
tttatacattaaacatataatcataaagtaaatcatgtgaaccatgcaacataaaatgatttttgaacttttattaattagtaaatctgnnnnnnnnnnnnnnnnnnnnnnttaggacacaaaacccaacaggttggccttcaaatggttattaaagtttgaaaggggcacattatggtctgacctatgagaaagcaaaaggagaactggagttgaaagaattcgtggatgctgactatgcttcgaatagagataccaaaaaattgaccacatcttacgtgttcatgtcaaatcaaaactgtatatgctggaaggcccagttacagtctgtggttgctgtttccacttcgaaagtagaatttatggctactatggaagcattctaggaagcttaatggctttggggaattctgtatgaattgaaacaaataaaaagaggagtgattgtgtacttggatagttagtcatccaaccatctttgcaataacgtgatttatcatgaaaaaagcaaatatattgacttaagactcaactatattagagaaaagatagaagaaggactagttgaattagagaagtttagatcagaagataattctgctgatgttgtgactaaggtattaacagtgaacaagttcaagcattgcttggacttgatcaatctcagaagttagtatactgagatatatggaacaccaaccatgatggctgcattctttcttcatcaccatcatattttaatttgaagaaactaggtggaatttgtggtatagttcctctaaataaataagtcttcaaaggttattcatttacaaaaagttaaatgtaatccaaaagggcgttccttgaagtctaacttgtccatccaaaaaagagttctggatgactagttgttccctcctggaagggagttctggataatcgactctaattgtcactattcctatctaagaagtcccttcaacacccacttttgtcgattgtccagaagtttggttctcattcgaaagagctttaacttaagctgacatggagatatggttacaaggagtttgttcagtcataactgacttaacaacttagttattgcagccac

SEQ ID NO: 35659 - DNA, 1612 bp, Cannabis sativa
gccctctctgcctaatgttgtagtcgcgaccctggtctatgtggtcgcgactactgacttaaaaaaaaaacacctctctgccaaattcccatgtcgcgaccttggtcatgaccatagaaaagggtcgcgacccaggtttagatagtcgcgactactgggtcatggcaaattttttttttcttccttatttttttttttttgacttttcacgctttgcacgattcaaagcaaaaataaacgtctgaaattttacaaaacaaaaacttaaaatgctaaaagctaaaaaataatattcaagagtctcaaaaataatcaaagtaaataaaatcacttgggttgcctcccaagaatgctatctttatcgtcatatagtcgaacattgagtttcttttcaaagaggcgccagtatgatacagacttggcttggtcagtttgacctcccaagtagagctttaaccgctgtccattaactttaaaagtttctggactctcgcctttcagttccaccgctctatatgagaatacattgaccaccgtaaatggtccagaccatcttgacttcaattttctaggaaaaagttttaaccttgagttaaaaagtaaaacttgctgctcgagttgaaattccttcctgactagatttctgtcgtgccatttctttgtcctctctttgtatatctttgcattctcatatgcctcgattctaaattcttcaagctcatctaattatagcagtctcttctctcatgcagttgctaaatccatgttcaaagtctttatttcccagaatgccttatgctccaattccaccggcagatgactagcttttccatacaccaacctatatggtgacattctgataggtgttttgaatgctgttctgtaagcccacaatgcatcatctagtttccttgaccagtccttccttgatcgttgcattgttttctccaatatcatcttaatctctctgttggaaatctcagcttggccattactttgcggatggtaaggtaaaaaagtcctatggtggactccatatcttgctagcaatgcttcaaactatttattacaaaaatgactcccttcatcgctaatgattgcttggggagttccaaaccaagtgaagatgtacttttgaaaagaaaaaattgttttaccgtcattggcgtgtgttgcagcagcttccacccatttcgatacatagtccacagccaacaagatatactgattgttaaaggaagatggaaaaggtcccatgaagtctatgccccacacatcaaacaaatccacctccaaaaaacctgtcaaaggcatttcgtttctccttaaaatgttccccattctctaacaatgatcacatgccttcacaaaatcgttagcatccttaaaaagagtaggccagtagaactcgctttgaagaaacttggcagcagttcttgtgccactgaaataccccccacattgtaaggcatggcagtggctcaagacagaatacatctcttcttcaagtgcacatcttcttattatttgatcagcacagtgtttgtagaggatcgactcttcccagtagtagtgcttcacctctgcaaagaactttttcagttgttgacga

SEQ ID NO: 35660 - DNA, 3477 bp, Cannabis sativa
ggaggaggattcgatgccgtggcaacatcctttacaatctgctcctttattacatgttgcttagcctcctcagcaattaaggctagttctaccactttcttatacaaagtgtcatggctagtggtaattttcaagtcccgattgattgtggcgttcagtcctctcacatacttctttttcctggtgaaatctgtaggcaccaaatcaccagtaaatttggacagccgatcaaattccagaatgtattcgaccacatacattttttcctaagtcagtttcacaaaatcttccatatgtgaggtctaccttgagtgtctatatcatatcgatgatagaatttgtaagcaagatggccaatcttgccacaaatttgacaaactagacgagaaccatgttcacaaccattggagggagcacaacctccaaatttagagcctcgactttacgagttgccacgaccactggattgacctctgcctgtgttgctgcaagtggatccaaaataattcttgttaaattgagcataattggcttgtgcagagtccagaagttagggcataacttgttcaattcgtatttcatggtttttaagcatgtactggacttcttggagagtgcgagcatcagctcttgcagtcagtaaaaccaccaccatttcatattcatggccaacacctccaagaatgtacgtggccaattctttcttgatctgaaagtttgtgaccaacatcagcaagagagtcaccaagattcttcatcttcaagatgtactcatccacacacatggatcctttcttggtgttctgaatggcaagtcgaagttgatgttgtcgagccttcgattgagtggaaaaaaggcttgcagagacggtctaaacatcagtagcagattcacagtgaagcacatgtccaagcatagcctcagagataaaattcataagccaactcattaacagagcttcacaataagtccaatgatcaaaggcagggttaatcgtgttcgtacctgcaagaagtggatctggccatggagtggtgccaagaagaattccttcaagtccattagcacgatttgatggaagaatcaacgagtgtcagtaagaataattgtgtcgatctagtcagatatttagaggaataaggttatttagaatttgaatttgtggtgcggcagcctaaggaatgatcggtgcttctggtggatgatgaggagcattatggtgggaatattcaggattggccataggtatgataccatgtaagagtagagaatatggagaaagaaagagaaagacaatgagaatgaaagaagatgctcaactcaagatgtgagctgttatggccttttatagagtttttaatagaaaatatttacaccagacaataacaatcactaagtgaaacttacagcaagaaagataattgaaaaaaacaaacaacataaccacttaactaactctcacattaatgcatattaccagttacataagaatataaagaaaagggaaaatgagacggtctaaatggtaccaaaaaatcgacaccgaaaacaaaatataaggaatgaaatttgttcttcaatttaatcgtcttctctataagagctcaaaataaataaatatctactttaagattgttagaaataatttaaagagaatatgaagaacacaaacaaacataacaatatattattaattaattgaagaatataaatataaatacaaatgataagatgtaaaactagtaattgaaaagaaagtcgaggtacgtgaaacacacttttcttaaagcagatttgcgccctacttgagtggtgctagaggattagggagaaaccacttcctaagatacaacgactaaaaaagtagatgaatacactatttttactactccagtgaactatgattaataccttctctctatcaccttaagacttacgaaaaacacaaaaaacatgaagacaagagaacttttaatgagtgactctttttgttggtgtatttagaatgaaaggtgaagcctccttttataggcttcatacggggtggaatatcaagtgtgaacactagaaaattaatgccaaaaatcccacaaatttagtaatattgatcaaaatcttcaccataatttctgatatcaatcagaatatttaccattattacggtgattacatccttgaccaaatctacatttattagcagctatcaatggaccacgtttaaggaatcaatttctcattcacatattagcctaaattggctatttattatatattaaatataatttttttcaacaatgtatattcgggctaggacatataaatctcaacctatatgcaaattttctactctcgtgataaatttaaacacataggatgcattaagcatagaaatcctaaatactacataaaccatataggtattctcatcctatgtcaaaatctatgtctgtttcactatagcatattcaatactcacttctaatattttacattaaagtcattaaacaattaagtagtgatcaagcaattaaaagtaatggagtacggatgaaatagatgcacatagaaaattagaaaagaattaaatcacattaaaataaaaaatatagtgtcaaataatctccattaataaccctaattgaaaatctagctagttatgtttattgtaaataactgccaacaattaattaagaacataaaagaagagtagaggaaaataactcgtcgaaaaatattgataaaagtctccaaagttactttctacttcatactttcgtccctaatgattggtgctttgaaaagtgtcaaagggtacattatatagcctttcactagagttaaccctaattttctctaattaaatgagacgagctgcaacattgaccctccatgtcacgacccctgaaggaggtttttgggcagccagcttcctagtgtgataattgataatattttagccataattctttcaatattgctcgaaattggacgataaagatgttttggaaagctaaaagagagatctaaaatttttattcgcaatatttttcctcaaagtgaatgtgtcatagtcaaattagcttgaagctttagacttgactttcaatcacaaacatagtgtgttgagcatcgcgaaacttagaattttttaccaattatatcctagaactctaaattctatgataattcatcatattcatctcatttaacatgtttcttcttatttttaattcatattataaattttataatttaaacctaaaacaaatagaaaacaagtgtaattatgcacaaaatgaatataatcaattgatacacatctctaaaacactaccataccaatcactcactaccaccgccaccactgccgccaccaccaatgcagcaaaatttcgagaaccccaaaactccgagaaccctaaaacctagaagtttgaaacccgagtatgtcgagaacccctctccctttcgcatga

SEQ ID NO: 35661 - DNA, 1281 bp, Cannabis sativa
  modified_base (38)..(47): a, c, t, g, unknown or other
  modified_base (166)..(171): a, c, t, g, unknown or other
tattgttatataatgaaaatattgattggttgagtatnnnnnnnnnnatgatattatgcatgtgatatatgggctcacctaattaagtgatgcgattaatactggcgacgtgtagatacgccatcagtgatataaaaaatttctaggttatggcatagaatgaaannnnnntagggtttcctcctggcgacgtgtagatacgggcgtcagtgacatatatgataagtaccgggcgtaggtacgagttcgtctaattaggcgatgcgacatattggtaccaagttgtggtacgggctcacctgattaggcgatgcaattatatgatatatgggtgtaggtttttagcacaggctcacgagtgctatgtggtgcatgtaaatgcaaataaaagctagatcaaccatgaggtacgtaacagtcttctccagcaatgtacatattgaccttatcggcctacgtgccgagtttccaggagttgttttggactgggaacctttcccaagtcgatcgttatgactcgagactactcaactccgagatcgttttttcttgctactcaactccaagactaaatatataatcaaagatacataaattattatagaaattgatatatatatataaggatattaattttctatatacataaattattgtttagcagtgaaaattcttagtaaattattatgttattgtaacacaataatattcaaattatttttttggccataaaattatttaaattattatatttatacttaaatacccaaattattttttttttcagcgaaagtactcaattgtaattttgtaagcaataatgaaagcataatttcggactcccaattcatattagatagaaaaaatcattaagattttatgatctgctgcagaacttattccacataaatattataaacataataatttcaagaaaataattttcgataaacacaataatttagatactacccaaataaaaaaatatatattttttgaaatcaaaagtaaaataatttgaatgcatattcaagagatggatttgcttggctgccctaaatatataatttgaagccaatgaagaagagggtagagaaagatcagagggaccatgtatatatatttatatatatatatataaatatattatataaggtgaggtgaaagtgacctaaacgaccaaaagtactaccaattatacggcctgaagataaactagctaggctggagcctggtgataaataacactctataatattttcataattgcctttatgagtc

SEQ ID NO: 35662 - DNA, 1113 bp, Cannabis sativa
taattcacatcacataaaactaatgtcttaactttaattttcagatccatgaaatgtagatctcaaaaagttaaattagagttcctaagcaatccaactgaagtataatctaaaaaaaaattacatcaatactatagtaaaatatttattttggtatatttttgttgttttctaaattttcattggtgaatttattcatattaaatcacgaagagacatgtacatagagttaggtacgtgaaaatactgttatgacttttataatagttgcataaatattttgctaacagttatttctccatatattactattaaggtacaagtaattatcgatcagtgataaaaagatattgatgagtagttttttacatataaagattcacatttaatatttttagttgcaatgaagttgcattgtagtttcatcacagttgccttgaagttgacttcttctttcccttctagtcgtcgaagttgaaatttttttcaggcaaagataccttcgactttttcttcactggatgacgaccaccttttgccacagagggagcaaaataagagttatcattgtcgatgactagacgtattcctttagccttgttaacaactgatttttgactaatttttgaagctttttttggtaatagagatggagaagcagaagataatatataaaaaaagcgaataaagaaggcagttgggagaagaagatgacgaaggttacgggtgggaggtggtttgcgtgggttttaaacgtgcgtttcgaaagtataatggctggaagatgattttgcaatgaacaactaagaaagaaaagggaaaaaaactgaatggaaaatttgaaaatgaaaaataaaagaaaaagagggaaaaaaagttaataggttgtatacacagtaagtgatagtgtacgaggtatattttgataaccatctccaatgggagatgttaaaattgtgccatatttggcacaaaaagtaattttgtggtaaatttacactaaatttttgtgctccaattatgcacaattcaaaattttgatgtaaaatttattatctaattaatgttttattaaaaagaataaaattgaataactttataattaattttatt

SEQ ID NO: 35663 - DNA, 2049 bp, Cannabis sativa
gggacatggcgggtgtgtatagacttcactgatctaaacaaagcctgcccaaaagactgcttccccttactccgaattgacgagatggtggacgccacctccggattcaagttattgtccttcatggatgcctacgccgcctacaaccagatcaagatgcacattgcagatcaagaatgcactagattcatgaccgataaaggggtatactgctacttggtcatgcccttcgggctgaaaaatgctggtgcaacgtatcaaagaacggttaaccggatgtttaaaggcctcctgggacggaacatggaggtttacgtggacaacatgttggtcaaatcaaaggcatgtggaagtcatgcagacgacctcacagaatgctttgaagtggtccagaggtatggaatgaaacttaacctgaagaagtacactttcggggttaaataaggaaagtttctgggatttatcgtcagccaaaaggggatagaggcaaacccggaaaaaattcaagccctcctaaacatgccgtctccaaagaagcacaaagatgtgcaaagcctaaccggaaaagttgttgccctgagccggtttatttcccgatccacagacaagtgcattcccttcttcaacattctgaagaaatgccaaaaatttgaatggaccaaggaatgcgaggaggcattcaaaaaattaaaagaacacatggccaaatctctgatcttgtcaaagccagttcttagagaggactggttactatacttggccttctccgagaatgcggtcagcgcagccttagtccgggaagaggaaaaacccaacaccccatgtactatgtcaacaagcatatgataggggcggagatacagttgccagtgatcgaaaaactagttttttcctcctgatgtcttcaagcaagttaagaccctacttccagtctcaccctatcaaggtgttgacaaaccatccgctctggcaagtcctgcagaagtcggaggcgtccggaagactcctcaagttggttatcgagttaagctaatcgacatacactacataccacgcacatctataaaaggacaagtgctagcggacttgataaccaagtgcaatgaagttgaagctagcgcaaacgtaccagtgccacaaaccccaacatggaaagtattcgtggatggagcgtccaatgaaaacggatccagagctggggtagcaatgatatctccgaacggactccgactctaggcggtgctgcgcttcgaattcacggcttcaaataatgaggctgagtacgaagtcctgattgcaggactaagattagcaaaagtcgtgggggccacaatagtagaagtcttcagtgattcgcagttggtggtaaaccaagtgtcgggagaatatcaaatgcgtggagaaaaaatggtcgcgtatgtagcaattgtccgggagctactccatgagttcacagattgtaaagtggaaagcatcctcagagaaaagaatgcccacgcagactgtttggctaagttaccgccagacagcgagattgagaaattgagggtggtgcccgttgaacgcctcacaaaaccaagcattaaagcgaaaaatattgtggcagcagttgagccagagcctaactggatgatccccatcatcgaatacataaccaaaggcgagttccctcaagaaagagaactgtccagaaggatacaataccaagcgcaccgatatgtgatgatggataacattctctaccgaagaggactcagcatgccgtacctaaggtgtgtatcggaccctgaagctaaacaaattatgctagagttccatgaggggttctgcggagatcatataggaggccccagtctctcatagaaaatattgagacaaggatacttctggccaaccatgaaaaaacattgtacagactatgtccggaaatgtgattcatgccaaagatttgcgaacataccaagagcccccccccctccccccaaacgagattatcctgatgactagcccctggcccttcacggtttgggggatagatcttattgggtc

SEQ ID NO: 35664 - DNA, 1313 bp, Cannabis sativa
  modified_base (977)..(991): a, c, t, g, unknown or other
aatatattattttaattttaaaatgatttttaaataagttttaatgaattttaaaatgaaaaataaaaatttatgatgtggactaataaaagggtgacacttatctggaagaaaacggagaggtatctacggaagttccaaaagtgtgacggaatgtatttttacagccaaaaataagacttgggtatttatctgctactcgggataaaacttaggtatttttgccgcaaattactcaatattatttttttgtttttataaaaactttacatttttacgtttaaaggttttttattatacttttgcggtattttataaaaacaacatgaaaacagcaagaaaattacataagtaatataaaaataacatttaataactaatatcaaaacaatcagcaggattttcagcgattttaatttaatatagttgatatgtgtcttaattttcagcaattcctcggaaccaaacaccatatttgaagtaccataggaaggatttatcaggtgtgattagctggataaaaaattgctcaactacaagatggagaggcaaggttttcttatgtgcagtagctgctttagtatacaacattttggaagagtcacgacagtgctttttgggataaaaaattcaactctttagtgtttaatttaattgtgcatatttctgatagaataaaacacatgaatatacttcacaaattagtaaacatgatcaagattgggtgggtttgctatatacaagttattgtaattaatttttgagccgagttttttgtgagttgagttataaaaagttgtatttattttgtgtttaatataaaaaaagttgatttatatatataaaaaaaaaaccaataaattaataagagtacatcataaaaatatattaaaagatcgtattttttgtaaataaaattataaaaataataaaaacgtttaaatttcgtacaaccgtatttttttaatttttttttnnnnnnnnnnnnnnnttgtgaaataatccctaaattaaacatatatttattatgtattttcttaaaagaatttttacatgaaaaatacaaattgatactttctttacaaaaataccttcataaggtgtgagcaacaattttttctttaatgagcttttatttaccaaaataccactcacacatattcattcatgttagctcaaatatcaacttttcatttttttttcctagtttttctttcatttttcatttcaaatttagcattcagtttcttttttcttttttttttctcagtttttttatttcaaaattaccttccagccattactctttcaaa

SEQ ID NO: 35665 - DNA, 1573 bp, Cannabis sativa
  modified_base (1527)..(1527): a, c, t, g, unknown or other
cgctcttgcacacagaataagagcatgttcaattgattcttctgcatcctggcaaattggacaactggtttgcacatcaactcttctcatccgcaactgtttgagagtcggcaaacactccctacccgcacgccaaaccaggtttttaaccttgggaggaatttttagcttccaaaactttgtccagaatttagtttgctcatcctcctgtggttcccctctgccatttaattgttgaagaagcttgtaagcactcttgacagagtagaagcctgatgtttcataaatccaattcaatctgtctctgccttgagtactatacaaaggtatgtccagtataagcttcttgtcccgctcttcaaataatcatctaaaatctccttgtcccaactcccacccccagcctccatgagattacacaccttactatttctcaaaccgggatgagcagacaacacaaaaggctgttcttcacaaggcagccatgggtcatgaagaacattgatctcttccccattaccaacgcaccaccgagttccttttcttaccagctcttgcgcttcaagaaggctacgccaaacaaaactcgagttgttacccaattcagccgcaaggaaagagctgttagggaagtaccgagctttgaaaactttcgtaaccaaggaattaggacgagtcatgattctccacccttgttttcctagcatggaaaggttgaaatctctcaaagaacggaatcccatgccacctttagccttgtgcatacaaagccgatcccaagagaaccaatgaatgccattttttgccttattagacccttgccaccaaaacttattcatggttttctccatatcacgggtgatatccaaaggtaataagaatacgctcatagcatagcttggtagagattgagctactgttttgagtaatacttccttaccagctcgggagaggaatttcatttcccacccctcaactttctttctgactctttcttttagatagcccaaaaccgctgacttgtttctgcttaaagtactaggcagccccaagtaaaggcttccttcccctgctataaccatcccaagcaaagcactaatgttgtctctggcatccgaagttgtgttggtgctgtagaaaattgatgactttgaaaaattcactttgaaaattgagtgaccttaatattatagaactggtagaaaaaaaattatgaaatttgtttcttctcatgtatgttaattattttgtaagatatattaattgattatagaagttttataaaagtgtatatggtaaaattattttattatatttttggaaaattctataacgcaccctcttaaaagggatacactgatatatctctatctgttatagtatccgaaataattttttaatcaatttttttctcatggtcatgtaaattatacttatttaagaaattctgcaaaattttaagaaattcataagagtttaacaagtcgaaaattgcgttcaagtagtgtgttgcacgcgtgactattntattttatacgcatgtaaaatagactgtttgaacattgctttctat

SEQ ID NO: 35666 - DNA, 1669 bp, Cannabis sativa
gtaagtcctcatggaatcttatgaaataggatggcctaactgctcttcacacagcaattatagggagcaaaatagctgttattagccatctgttgagaaaaggtgcaagtcctcatatcaaagatagggtgaggagaaatttaggaattagttctttatttctcacttcttttctcccaaattgttgggtcataattatttttctataacaggatggtgctacaccacttcattatgcagctcaagttggctccatgcaaatagtgaagttactcataaaatacaatgttgatcttaatgtagctgataatgtaagtgttaattcaagtttcctcaactctaaaaggtatatatcaactgatctagttttcgattatgcttatatttcaggaggaatggacaccattgcacattgctgtacaagctagaaatagagatatagtgaaagttttattattgaatggtgcagatgccaacagaagaaacaaggtaaccttctcaaaacatacattagagttaaattagtgcttctggttcatgatgattaaactgagttgagtccctgtgttcaggatggtaaaacagctctggatttgagcttatgttatggtaaagatttcaagtcttacgatctcgcttctttagtgaagatcataccagcaaacagagagatttgatttgcagggtgttgctgaaacttacaagacttacaactttcatcgtaaatatcggatatatagtaatggtactggttaatgctgcaatcttctcataaatttccatctgggaattgtcttgtggtcaatttatcttcattctgaaccagaatatggaggatctgtaattgaactatggattttgggttgctgcaaaaaaaatcattatcttgaatttcatgcacatatggagagatctgaagcacattgagaaaggtcaaaaaagatctgaagctctttccttttatgggtgctaattttgtttatggatgtctctcctgacaaaaatacttttgtttctgtaaatattccatattatagttagtatcttgtacttcaatcttaaaattcccaatgtttgattttcaattccagctcatgaaggaaaaaattgaaaaaatagattcacaattcgtcttatcttttgtgattatatcaacaatgcataatttacagttgcttgcttgtttgaaattacagaaaaaattagacagtgatactattttaaaagataatgagttccatctgaaataaatgtgattaattataatatatgtaacgtcttgtatataataatttggtggacatttcatcactcaaaaaaaaatattattatgttaatgtaagttaagttcttagtaattttaataagaaagtgaggaaatatataaagagttgatataatgattttttttttttttggagttgatgtaaagattttaaaacatagaaaacataaaactattttttttttcaatttttaacctaaaattctataatttttgaaaatattataccgatcaaatattttatagtcaaattctacatttttaagttttcaacaacattaaattataccaaattagagaagtagagttttactttcgttaccaaagattctttgaagtaacttggacaagatgtaggcatgaggttgttagcccaaaagttac

SEQ ID NO: 35667 - DNA, 2113 bp, Cannabis sativa
aaaaaaaaagccgaaaaagcctctctctaaacagtcttgtattattaatcccactaaaatatataactttacaatatattataactttacacaatcaattattacaagtaaatatcaaacattgtattgtattaaataatactaatacaatacaatacaacacaatccaacacaatacaatacaatacattaaaatacggcgtaccaaacgagccctaaattcattttcttgatcactcggataatccaatattgacttggaaggtcaacctgaagaagtctggaaaatttaattttagcaacaatcctaagtgaaataaagagtcgtattcttagataaaactaatatttttttagtgaatatgataaaactattattgatcactcgtattttttgatacatacacggagataaaattattattattataattattaaaaaaaaatatacaagaagaggggcaatgtccaatctattcttttatttctactcaaggaaaattggaaaaaacgaaaagttgtttattgccaagaaacgagaaaatcttttacttttcgtatagatccggttacaataattataataatttatatatagaggtaagattcattaattataatttatcactattttttagcaaaattatttattaattatataataaagctaggaattgtaacttaaaactttttattacgagatagtttactctgcagcagcactactggtaaaaaatgttttttatggaaaaaaatatttgatgggactactatagtcaacatattaggaataaaaaaaaaaatagcatgtcaaacaaccttacgatctattgtgatataaaatgtaatgaaatatataaaattgaatatttttggctgatagttaatgttaacaaaagtctaattaaaactgaaaatggtttatctccattcgtacgtacattacacttagcttccaaaaggatgccttccattcccttaaaagaagaagaagaaaattgatagatataaaaatgcaaccggtttgctttcctaatattaataaacttaaaattctatataattttataatttagttattactaaataaaatacaaccggtttgctttcctgacattaataaatataatggcatgtttacttaaagggaatgaaaatgaatgatatagtattgattcccatacaattgtttactaaatttttaaaaagagaaaactagtggacccacacaaattaaggagaaaacaaagagaaaggttctcccccgtttttataggaaatgtctttcctttccttacttaatttactttaattttaatttttttaattaaaaatgaaaaagacaaatataccccttaaaaatctataaatagaaaataattacatgttctaataatggcaattttatcaaattaaagcattccaattacctttcctagttatgtaaacaaaataatatgattctggttttctttccagacagtttagtaaacatcataataatatattgtttccgattattttctattttaaaccgatacatttctcccattgattattcttattccaattacaagtgtgaaagtgtgaattcgttatgcattgtgtttatatttatttatttatttttatattactctcataggaggtagactcaaaaaaaataagtaattttttttttcaaaattctctacaataatttttaattagagatagtataaaagaaaatgcatatagaatctcgtcctattttttcttttacttttaattaatcataataaaatttgcgaataaacataaaaaaattgtgaataattataaatcattgtttctatagtatgactaaaaaattcgtgattaaaagtattagtcacaaaaattacattttattgtaacgaaatatgtttttagtcccaatacatattgtaattaaaactaaattagtgacaattaatttgtatctatattatattttagtccaaaataactttttgtatctaaaaacttatgttttggctaaaaattactagtaaagttaattttttttttttttcatacttattatctgccaatattatactttaataaactccttacttgttttccatgtctc

SEQ ID NO: 35668 - DNA, 1744 bp, Cannabis sativa
gctaataactccgccgctattgggattatttgttgtagtgtaacagtataaaatctaattactcatctaaactaaatgaaaatactaattagattagatgtattaaatttttaagtgaatatttaaaaataacatttaatccgatctgatcataattaaatattctgtttgatagtcgattataattagatcagttaattcttattaaattgaattaatttatgcacatatatgttatcccataagaaaaggttaagaaccgaagatcttaattatcataattaacttgatattattaagccaaagggcatttcattattgtttttgctgtccttccttttttatttacacccttatattgttataagtcgatatatagcaaaagatttaccaaattgatagccacaattaattgttaccactgtatattagtgtctctatctgtctatcaattaacctcataatattgttttttattttgacataagggagggccccttttacatggagaattattaatattaggtgtagtttccaatccaaacccggttagttattaaaattagtaatcatgatattaatcttttgtattgctcatcattaatctcatgttatattattccccaaataattactctctctctctctacaaaaagtcagtgcaacttattacaacttgatcacaaattacatgtatatcattaattaatttcaaatttataatatttctctataagttttcatattttaaatgacctaaataaacttacataatttttatatgcgattgggtgggacgggttgtagtctttttttaaatcaaactgcatatgcagtttttataatttttcaaaccgcaaaaatcacaccacgaaaatgcggtgtagtgttgtgcggtttaagcgatttacactatcatcattatcaaatattattatgaaaaatttaaaaatcaaactaatattgttttaacaatacaaaccaaaataaccttattaaaattttaccatcataacatgtataataatcatcaaattattttattaaattttctttaaaaaataaaataatatacacatatattatatatttattttatgaaaaaaaacataaaattcatattgtaaagattggtaactttataatatatagtgcggtacgatttgaactgcaaaccgtactgcaccgcatgatttggcaaaaatacaaactgcaacggcaccgtaaaaaatttcaaatcatatttttttatgcggtgtggtcgagtgatttaatttatacagtgtgagtatattgatgaacacaattaatcatgtaacttaagcatcaacccaaaaataatttcttcaagagcaattacaatggagatacttatatgtagtatttgaatctagctacaatattaaattatcaaacgagaccatatatttataaatagagatgaaattttaatggattatatttatttttaatctttggatcattattaaaagattataactaattcaaaaattaaataaaaataattaataaattatctgtagcataatacaaatttgactgtatttattttcttacaaataaaaaaattataaatattaattataaagaagttcttataaaatattttaattaaaaattaatttattttatatagttgataataattactttgagtataaatatgaaatttttagtttgatataacagtttatattaaaatgtaactatcataattatattt

SEQ ID NO: 35669 - DNA, 2339 bp, Cannabis sativa
  modified_base (43)..(47): a, c, t, g, unknown or other
catatctctgcaatctgatccccaagttatagggatttctttnnnnnctcacgatgcgaaagctaaattcggtaagtgttgatcgcgctatgcagatagttgatcgctttgcttcgagcatgcatatgaggtatcctgtttagactatatcctgccagcatatactcagagtcgattccacgtgtcaccatcatgtgaggccacgttagagtgcaaaaattgggataacaatagggatccaaatctgggacttagaccaggacccgaacccagacaagcacccaaacccagaccctgacccagacccgggacctaaaactggaaccagaacaagaactgctagactaggaccctcgaaaaagactaggaccgtgacctggactaggacccagacctagaaccgaactcggaccaagccccagacccaaacagagaccggaactcgggcccagacacggttgtgtacccagactgggaccgagaaggagacccaaacctagacccagacctagacatgggacctgatccaagacccagactcggacttagatagggattcgggtacgaacctggacttggaccaagacttggacccagactgggatcgaaatttgggacctagatccggaccgagaccctaacgcagacccaaacctggagccgcacttgggacccgaacttggacctggacttcaacccagaccgggatccgtacctggacccaaaccaaaacccagacccagactcggactaggactcagtccttgacccaaaccttgacccaaacccgaacccaaacactcaatcaaaatcaaaactgggactaggaccttaacccgaacatggacccagaccgggacctaggacccggacttggatgggggacctggacttgggccttagaacctagacaaagatcagaacttgggacatggacgcagacttggacctagactcgagacgcgaacccgaactaggatctatgagccggactaggatgggggacctagacaagggacctaggtcttggaaccagacctcgatctaaatctaggactcgaacctcaaccatgaccaaacctggacccaggaatccgaagtcggatccagacccggacccaaaacgttccccggaccgaaactaggaaaggaacctagacatgaacccataccaggaccaaacccaaactcagacctagacccaaacctagacctgcacccgcactcgaactcgaacccagactgggattggaagcaaagacttagacccggaactaaacccagactcagatcgagattgaaacctgggactcggacccaaacctggacccagaccgaggaccctattccacacctggagcccgatttgaacctagaccgagatccagacccgaaccaacactctgaccaagactggagccccaacccgaactcgaacccaaactcgaattcagaattaaaactggagttggaatgggactaggactaggaccaagaccaggaccaggacctagacccgaattcaaacccaaataaaaaaccagaccgagacccaaacccgaaccgcgactaggacccaaacccgaacctagaccgggagccaaacccagactagaactgggacttggaaccggaatcgggatagggacctgggcatttgaacaaggaccgatacccaagacccgaccccaaacccggacttgaaactaggaccaagctcgtgatctgacacacgaaatggaaccagactaggactcgagatcggtgttttgatttggcagccagcccagacctcgacccagaccaggtctggaacccagacctgaactcaaacccagtcccaaccaaaacctagactgaaacgcgtaccctgagacccaaaattggaactcaaattagaagtagaccaggaccagggaacgggaccagaacgagaactttgacctggacctgaaatcgtaacaagacctgcacgtagacccggaatcgtaatcggaccaggaccatgactctaacccaaacctagactcgaacttggacctggacccagatcccaacctagacctagactctgtgtcgaacctggactcgaacttaggcccaaacatggaaccagatttgggacagaattggggtcgagacctagaaccgcaccccgtctcgttcccgaacataaactcagaccaaggactcgggacttgaaccagaactagaccaggacacatgacagggatcgagattcgggactcaaactaggacccaaacccagaccctgacccaaactcgggacccaaaattggaacctgaataagaatcgcaagactaggcccctcgaacaa

SEQ ID NO: 35670 - DNA, 1565 bp, Cannabis sativa
gagatgatgaatgttgattgaaattatgcattgagttaatgataattgttatttattcttttttaattgtgaatttatccatatttgtgcttaatttcatgtttgagattgatcaccttaggcatgcttaatgatctcaatacaaaatttgaaaagtgagtattgacaatgctaaaatttgataaactaggttttgatgtaaaatgaaagtatttgcatagcctatgtgacattaatattattgcttaatgcggattgtatgttagtctatctcagagatgcaatagataacgtatgatttaggacctaaaagatgttaggttaattttataatctgtcattcacttaaagaaagcggaatagtaattagcattaataattgagtaactgaaacaacaggattcatttcccttccttgattaaatatttttattgcgttaatttattttcttgtttttcttttcttttatcttcatcaatattattgtttgccaaataaaaaaataagtctaatttagtagtatttagttcaatttcccgtgggatcgacctcacctgtgtgaatactactttattatgtgcacttgcgtagtttataattttcgtaacaagtttttggtgctattgctggaaaattgtttaaaaattgatattatagaaattatactaaattctactttgatttcttcctaacttcttgctaactattttgtctcaatttttcttatcctatctcgagtgcttttggtttacgcgacgtcaaggaccacgttcaagagtgcctattgattctgagattgagaagacctatagaaagaatgtaaagaataagaggttagaaagagttgcattaagggttgaccaataagaggtgatggccacaaacgacaacaatgggggtgtcgtggaagactaggaaaacagtcataatccacctgattgtagtatgagggctatgttcttccaacattgatgggggtttagtcttgtatatgaccactcgccgtagaagctaacaattttgaaataaggctagccatactccaaatggtacaatcttcagtccagtttggtggattgcccttagaagatctaaacatgcatctatctaacttcgtggagttatgtcaaacattcaaggtgaaccaagttagtgatgatgccattcgcctgagactgttccaattctcgcttagggagcgagttaagagttagttcatgtctttgccacccaactctattgctacatggactgacttggcaatgaagttcttattaaagttctttcctccagctaaagctgccaagctgcgaggggagattaataatttttgtcatctcgacaatgaatctctttatgaggcttgggagaggttcaagaatctcattagaaagtgtccacatcatgggattgaaaagtggatgttagtcgataatttctacaaagggttggttggtaatactcgaacaatcataaatgtcgcagctggtggggcttttatgaggaaaagtacgaattagacttatgacttgcttgaagagaagccaataaccaataatggcca

SEQ ID NO: 35671 - DNA, 2090 bp, Cannabis sativa
ttcaagatgcttggtcgaccactatgaatattatttaaagctggaatggaacaaccaatagacgtgatggactggatacaacatcattcaataactaaatgcctcatgcttataggaaatgtggatattacacttaaattgataatactttcataaaaacagttgttggcagatacagaagaatgttccgtgataccaaaacgaatcaatatgtcacaatgcaacacattcatagattatgtcatatagtaatttcaaagcccacatgactgaatattagcaagaattacaacgaaagacaagttaggatcttaagcttattcatatatgaaaaaactatgatgagaaatttgaaacaatgataggttccttgaatgtaatgggactactatataaaggaacaatcaccataataatattagtgtattagaagtataataatttaagaagataacatacttgtcatatggaagatcagcacatttccaattcacatctgcaaaagcatcatggtgcatcctgcattcctctttgcttcgcaggcgaaatcggcgttccttgttgcacctagtacaacgaataaactcgtcacgatgacaggctcgtccattgtgggacctatgagatccattggctgtttttgatgactgattgtagtatttcagcagcaccgtcttaaacagtggaaccttttccccgttaactataacccaaatattattcttccatttcctagctgtctctctgccagaatgcttttcaaatgcagctggagttaacttgtctgatagaaacacaataatatcagaaaagtttctaataagagcaaaacaatatgaacaaatttcacgtttatactgatatcatgtagtggctccatgattgtattagcaatcagaatgacacaacagtgaaaaagaatatttgccaaatggaaaatatttcgtaagtccatgatttatttcactattcacgagtatttcacaaacaataaatctcaactttcaagggaaaacgtaatacaaatggtttaaccatctgtcatactctgagacaactcttacactatgtacatgccatgaaatcctttcagagagtgatgagcaggcaaaaataactggatgatgctaccttactttaagttcttaaactcttcaagattttcttgaagaaacagttagtggatgctaatgaagcaagtcatatatattaatattacgtctgcaccaccacacttataaatcattacaagtatatacgcccgaaaaatttcacgcgtcacacttgatgatgcttcaccatgatagcattacagaagcaaacaaacgcatgtacaaaacagaagaaaaacacaaatgagttgtgctttttccctcgtcaatattcaagtccataattcgatcacctcaaaaaaggcaggcaaaacacttgccgtagatgagtctagcatgaaaagcaaatcaccaacgatcattcaagatacatatataatgagagaagccaaaaggaataagacaaaaaccctactctagaaaaatcatgccaacaccttactctgtaaaacagaaagagcagaacttggagtgaaaatgaagtcataaggacccttaggatcacaacaaggaaaaggctgtatacatagttgatgttaatccatatatgcccactaaaaataaatatatatgatatttagcctacaaacgacgcaatatttagaccaaactcgatcatagaaaagcaaaacgtataaccatatatacaactgcattatcatgttccatactgtaaaacataacgcattcacttggacaaagaagcatacacctgaactgtatgacaaaagaaaacaacgaacaacttgcaatgaaagaactctttacatgattacgaactctttgtctcaaggtattattataagatgacagaaaatgacggccatcaacgtcaaaagcagttgacgatgaactcaaaacacaataatacacacatttttcatgcataaaaatcaaaaaacccatttcccaaaaagcgaaacgaaggcaggaggagagagagaaagaccttcctgacaaccaggggtgcattcacag

SEQ ID NO: 35672 - DNA, 1906 bp, Cannabis sativa
attagccttccagaaatcgaagaagagctcaaggccgactgtctccaaggcattgaccttctccttcaacctgtccacctcgaccgtaagctcccccaccactactacaaaaattacttttgcttcagttgtaaaatgaaacgcaaacattttgtgtcggttgtgtaaaccgacgtaataacagcagacacaaatagtcaagttatttgcttcatttataaaccgacgcaaattgttttttgcttcagttgagaactgaagcaaaaattacttaaatgaagcaagaaacttagcttcaaattgtaaccaacgcaaattgtttttttttttaactttttgtgtcagttataaaacgatacatagttgtagataagaaaaattaaaaatttctctacaatttccccacctgcatttttaaatttcataatgtttttgtataccaatatttttatacactaacaataacattatagtaccaacttacaagagcagaaaccaacaagaaccacaacaaaatacaaacaaaagaaattaataccaaattaaaagttatctaagacttctaataacataatcacactcttacaaaactagaaaacaatgaaagtaaaaataaatgactgaatgtataattatatatataggaaggaaataaattgagagaaaacaaagcaaggaagaggcaacattaggtaaggcagaccgcaccacaactcctttcgaactagggacttggccctctcgtcgtcaatctcacttttttaattctccaactcttcaagctcttttcttcttgggtcgttggagcttggttttggggctagaactagatcttgaatcactttgactatctgaaattaagccaatccttaactactcattttttttcttcaagtttgtacaaataaattcagacttgtagcattgaacaatcaaatcctaaatgagcaggaacacaaaattttatttaccaaaaaatgaaccacttaacaagctcattttgatacattcagaataatctacatattctacaacccatatagcagactagagcaaccacacccactcgagatgacccaaggaggttcaaaacacaaaaaaaataaagcagccagtaaataaagcacccactcgattcaaacttgtaactttctaccaaaatcaaagaaagatagaagcaaatcaaacagcagtaaactcacttatctgcaatattgattccaaagatccgaaccttgtgcatattagggaactttaccatgaaccaccacaaggattaattctggttgtaatcgccctatttcttgcgcaaaggtctgcagtagttgatgagaaaccaccaatggtacatcgtcagagagagagacagagacagtttcagagagagacagtttcagaggagtgtaccagttggggaccgacggtggcggcagacaagcactgggcaaaggcgcggctgggtttcaaattaggtctggtagggttttcaattgaggacgacacttgaaaataatgaagttatagtttataaaatttgagtattaacctcaatttttaactgaagcaaaagagattggcttcaattttgcactgatgcaaaatgcaaaagacaattttttaaattatcacattttacctcggttacactttttgcatcggggtatgagctgatgctaatgtttattttttagcttcagttacacaatgaagcataaaatctccccttatttattgccttggtcaaccaatttggtgagacgcgttgaccgacgcaaaaattactttttgtagtagtgcaccttggcatccttcccctccttcatttgaagaagaacttgtcgcagagaagtcctctcatcctgaagactattaacttcagcagataagatctcgatggtctcctcaa

SEQ ID NO: 35673 - DNA, 1836 bp, Cannabis sativa
  modified_base (1459)..(1465): a, c, t, g, unknown or other
  modified_base (1787)..(1796): a, c, t, g, unknown or other
ggcattcccaaataagtcataggccacttgcccacctcacacccaattaggtctgcactatgggccactgcttcctcgttcatacagattcctaacaattgacttttattcaagtttacttttagtcccgagataccacagaacgcttcaacaatcttgatcagctttcgaagagaaacctcatctttaacaaagaaaagagtgtcatccgcaaactgtaaatgactaagccgaatatcatctttgcctatctggaaccccgccaaagattctgtttctattgccctatccaccattctgccaagaacatccgctatcaatgtaaaaagaaacggtgatagggggtctccttgacgtagacccctagaaccattgaacttgcctcttaccctaccattaatgaatatagagaatgaagttgatgagacacatcctcggatccattttcgccatcgctccccaaaaccttttttcctcaagaccatgtctaagaaaccccattcaacacgatcatatgctttctcaaaatcgatcttgagcacgaacccttttttaccacgactcctatagtcctcaactgcttcatttgccattagcaccgaatcaaggatctgtcgcccttccacgaaagccgattgggtttcagcaatagtctctcccaagacaccgcgaagtctagtggcaagagtcttggcgatgattttatacacgcttgtgatgaggctgataggtctgaagtctttgactttgcagctgtttaatcttttagggatcagacatataaaagtatcattgatactgccttcaattcttccctctctatgaaaagcccgaaacacttaatcttgtttctgtttcattaacctttttctgctactgcaacttgcgattctgttactgcagatttgtcagattttaaggatgaatgaattttatttaaaggaatgtttctaacagttgtaaaaatatatttgtggttgcgtttagggtttctatgatcaataatagaacctagagagtggccatacgttttatctcttctagtcttattattttacatttcacatttgtcataagagtgctctttgtgtaaaaacctagaatgttcagcaaggttttggttttgtgatattattcttttactgttcttagttaggaaaatagttcgagttcttcctaataggtttaatgcgaagattttggcaatggaagaggctaaagactttagcataatgaaagttgaggagttgattggatcacttcggacgtttgagaccataattttggcgagtttttttggacgaagaccttatggaaaagcaggtgtccttctaaagttaaagtctttggatggttggtggcattaggaaaaattaatgtgcatcctatgatgcaaaagaggcgaccatttatctgcttgtccccgggatggtgtgtttgttgtaagaaaagtagtgannnnnnngcacatttgtttttggggtgttgtcttgcccaaagactttagataaagctgttgaacgtcttttagatccaatgagtacttcccgaatcagtccctctgatgattgtgagcaaggtggggggtagtaaaggtagatcatacttatggaggacagctgttctagcaatcatttgggttatttggcttgaaaggaataatagaattttcgaagggattgaagcctcagttgaagatttatgggaaaaagtcagattttggaccgttgtttgggtttacaaaactaaggaggcgtttggttgagaggaatgaaaatataggaatnnnnnnnnnnatgggaatgggaataggaatgaaatggaataaaatttaaa

SEQ ID NO: 35674 - DNA, 2814 bp, Cannabis sativa
atcatttatttattgatagtagggtcgtaaatgttctacgttctagtagttctttattagcgagccatcaagtcgagccaatttatacactccggctccaactactacttcaatgacatagggaccctcccagttcgggttgaacactcctgctgatgcatctctcgtatttgcaaagactcgtcttaacaccaagtctccaacattgaatagtcttttcttgacttttttattgaagtatcctgtgactcggtgttggtatgcggcgttggtgatttgtgactgagttcatttttcctcaagtagatccaaggacaattttaaaagttcgtggttttcttcttgattataaaactctcttttgtgagtcgatatattcacttcaacaggcagcattgcttccgagccaaatgctagcgagaaaggagtgtgtcccgtggctattttctcggtaattctgtgggcccagagcacctgaggtagctcgtcaacccatatgcctttggtagcatctaacgtcttcttgatagtatcctttagggttttattaacgacttccacttgtccatttgcctaaggcctggatactgacgagaagcttttgataattttattcctctcccagaattcagtgaacaagttgccatcaaattggtttccattatcagatactatcttcatgggaattcaaaacctacagataatgttcttgacaatcttgcaggttgtggagacgaggggctcggcctccgtccatttagtgaagaagtcgactgctaccaccgcatacttagctcttactcgcccagtgggtaatgccccaattaggtcgatcccccatttagcaaatgtgtagggcgaggtcatcattctaagttctattggcggtacgcgaggtatatgtgaaaacctctgacacttatcacatttcttggcaaactcatgtgtttccttattaatcattggccagtaatatccttgtctaatgatctttttagacagactttgccaccccgcatgatccccacagaagccttcatgaatttctctaatgatttcgtttgcttctgctgaaggaacacaccgaagtaggggcatcaaataccctcttctatataggttgccttcgatcattgtgtagcgaggcactgtatacaatagtttttgtgccttatttttgtcatttggaagttgctcatcgagtaaatagtttataataggcatcatccatgttggagagctatctatcatctcaacttcttcagtttcacatatacttggctcgctcagcatttctaccagaaccagatttagttcatccagatcattctgcgaggccagctttgttaaggcatgggcgttggagttttgttctctcacaatttgtttgattttaaagtaatcgaatctttccaagttttccaaactttctctaaatagttcgtgattttcaagcctttggattggtattccctaaggacctagttcacgatcagttgtgaatcactatgacaaatgagatttttaacatttcaggcctctgctatctttaaacaggcaatcaaggcttcatattcaacctcgttatttgatgcgtcaaattggaacctcagagcacagtgaaacttaaagcctttcggcgatattaatattatccctgcacccaaaccctgttcgttggatgggccatccacatataacttccaagttttcgagtcttgctgatcaggtgggattttttctggagttataccttctatcaagaagtcagctaaagcttggcccttgataaatgtttgaggatgctatgttatatcaaactgtcctagttcaatcgaccattttatcaatcttctagaagcatctggttttgataaaacttgtctcaagggctgatcggttaacacttttatggggtgagcctggaagtatggccgtagttagcgtgacgcgtggactaggcataacgcgagtttttccagagggggatacctggatttttcccttagtaaccttttacttacatagtaaataggttgctggtgcttaccctcttctcgcactatagctgcactaatcgcatattccgagatggctaaataaagaaataacatctctctagttatgggtttcaccaaaatcggaggtgttgcgagatgcctttttatgctctgaaaggcctcttcacactcctttttccagtcgaacgttttgttgcctcgcagtatgttgaagagctgcacacatttatcagttgactttgaaatgaatctgttaagtgccaccattcttcctgtcaaggcctgtaaatcattaggctttgtcggggatggcatgtctattaatgccttaattttttcaggatttgcctcaatacccctcgcattaactatgaatccaaaaaactttccaaaggagactccaaaggaacattttttggggtttaggttcatgttatacttttttaatattttaaagcattccgcgaggtctgaggtatgatccttactctttattgattttaccaacatatcatcgacgtaaacctccatattttgcaaacatttcgtttactagtcgttgagacgttgccccaacattcttcagtccgaacgacttgactttataacaatagagtctcatgttggttacgaaacttgtatgttcttgatctgggacaaatatttttatctagttatatccagaatatacgtccataaacgacataagcttgttcccagtagttgcatccactaattggtcgatcctggaagtggaaaacagtctttttgggcatgccttattcagatcgga

SEQ ID NO: 35675 - DNA, 1445 bp, Cannabis sativa
ttttaggtggacaatctgaaatctcaatgtccactaaaactctagcatatttaatcatagttctacttaaagtgaccttgtcaaccataattggtttgccaatggtactaacaagcgcactaagattgtttctaccaatgtatatgagactggtacttaattagtttagtaagagtattttttttagatccgttatatacatttttaagaaagtaactgtatttattatgttagacgtgttcttggtaaaaatgtaaggatgttagtcaatttcttttagtgtgcggtgtgggttagttttaatgagaagtatctcttatttttcttatggtattaaagagatagcattattaaagatttttatctagtgatgtgaatcgaccgatgtatgatttttgtgtggacactttatagctaccaattttttaacttactgcaagttttattaactggggaaaaaaataccaacgttttcaacaaaattcgaaacaacaaaataccctggatgaaaagaaaaatcaaatgaaatcaacgacgatatgatggatatttaattttatttggttgtgttattatactaaatgggtttacactacagaaatataggtttacattacaaaaatagtgaaataagtgttgaatttctttaaaaaaaaatagaaaagggaattacatgtacccaatttcttaaggagtaatagcatcttctagacgtgttgttttatgactggctagcgatactctttgaaaattattacattaaatcatatgagactcgatacttagttgaaccaataaagatattgacacttagaggatgttagacactactggtaccttttagtatttctcaatcacctacaaacacaattatcactgaaattgccccacaaaaaagtttgggaaattctacaatgcacactcttaaaataggtgcactatccttatctattttggtatttgagagaattttttagtctaatttttttatggtcgtatttgttgtagttatttaacacattttgcaaaattttgaaaaattttaaaaaaatttaacacactaaaaatagggttcaaacaatatgttgcacgcgtgactcttttattttttacgcgtgtgaaataaactattgaaatattattttctgtattataaattattctgaatttttcaaattttgcatgatgctttggataattataatatacacgattataaaaaaatagaataaaatttcttctgaatatcaaaacagatagggagtgcaacaatgaatctgttttatggcagtgcattgtcgaagcatccaaaaaagtttacaattaataaaaatgagcattgttatttgacattttaaggtactcaatattatatcaatgtaatatcttataattaattaattaatggtttcctatatcaattattaaatcaaaatatacgagag

SEQ ID NO: 35676 - DNA, 1707 bp, Cannabis sativa
tagttagggtgttacacataatgtattccatgtatcgatgttgaggaagtatgtatctgatccaatgcatgtcctaagttatgaggcattggaattacaataggatctgtcttctgatgaacgactagtgcaaattctggataggaaggaaaaggtccttcgaagtaaaaccatcgcattgattaaagtgctctggagaaatagtaaagtggaggaagtcacttgggaattggagtctgacataaggactcaatatccagagttattcaggttagatttcgaggatgaaatactattaatggggggataattgtaaagatcgcttataattaacattttggatcaatgaataattagggtttattcatgagatttgaatattatttataatatgcatattgtggaaatttatttaatttaataaatgtttattatgctatatgtgaatttcttattttttgtgattgtgttcggaagctgtggaaagcgacgttgggccttttgagagtcgcattttatatgttttagaatattattttcgaggtatcattgttgggaattggaggtgtttgaatttttggggtttggaaaatgactaatttacccttgggagtttgtagccactttagtaagttagaggcgcaaaaaggtctttagacaaagactctatttctcttatttggtctcttttagtgctgaatataagtctaattacttaagaaattcatttatcttaagtgtaaaggaatcaaagaaacaacctagaattttctaagtctctctccttctctttcgaacagcaaggggaaccagctgagtcttgactgtgtttagctcaatcttgtgtgatcttagctgattagaggacttcaattcaaggtatacaactctagccctcttctccatgattttccttagcttaaagtaagttttatgcatgaactttggtgtttaggttgctgtaggttttggggtggtttgatttcgtgttttggggttaggttaggtttatgttgtttgatttgagttgttttggtaagctttgatgaggtttggctaggctaaggggtttgatttgagtttaagaaaagaactcaactcaagccatgcccttcctttaatggtggattgaatttctgtgattgttgatgagttttattgcttgattatgcttcattatagtgcttacaggtatactggagagtttggtaaagtttggatttgatttggaattaggggagaaattttcgggttcccagcacagaaccggagttctggttctggggacctgtagcaaccggtggtccgggttggtcccaggaaccggacttctggttgggaaccggtctgccggttgaggctttttctagatacctagtttttccaatttttgggttgctaatggtgttagcatcatatttattgatacggttatcgttagtttcaattatcaatccccgatagatgttttagcgtgtctctcatccaattttgaatattatggtttagggccctgtaaagcgttgagctgtgtttccactcaggctgaccgacacacttgagcacggaacgaggtaagatagcataataacgtatatatgaatatatgcttttttttaactagttacactactaacactaattgtttatgtgattttaaaggtgttagtatagtgtaggatatcggtgtggttacggtgttaccaa

SEQ ID NO: 35677 - DNA, 2486 bp, Cannabis sativa
cgtcaggaactaagtcttctaagaagggggcggccgctctggccaccctggaggaagttatgaagggcccgattgcccaggagaactacacgtgccgttctaacggctgggaagcggatgaactccgctccaccctgatctgcgctcatcaattggagaagatcgtgacggttgctgggattaagtcgtccgcgtcttgggtttttcatcgcttacctcgggacgaagagacgcccaaccacaattatgggggttttggagcctggagccagacccatcttatgtccggagccatgcttccccttcaagattatttcattaatttacttgtatttgttggcctcacgccttaccaacttattccccaagcttaccgcctgctctcaggcctatttattttttatgtagccagaggctgggcttcacctagcccggctgaaattttatatttttatgaacttgtgtttgttcccaaaaagggggacaagtttaaggactgttttttcactctccgggaccatccttctaacgagggcccggtcccttttaattatcaaaagaatgttaaggagtatcgccaccgctttttcttctcttcaggcttccaagccgtggatcgcccgaagctcctcacggagtgggtcaggatcccttctcttctccgtactgcccctacccagctgttcctccagcatgccagggttttctccacttatgacaagaaaggtcttaacgtgggggacttggtcacaacggagaactgccggaaggccaagctcatctcagggagtcaatcagtggacgacttcaatctctccaaggttctctacccaaatattcgtaccccgaacgttgaaaaggcactcagggaggacatcatcgcctcagcggaggaccggtaccaaaagtacctctttaggaggaaacatgagttggcctatatcaaggctcaggccaccgctgggaggacccttcgactggaagcgggtcaagaacggacgccctctcggcgaaagacgcttctcctggttcccaatactggggctcctgatgctagcacatccggattcggtaagtctcccttaacagttcatcatgctatttctgcccaagagtattcccggtgtaggcctataggatttgacgagcgtcttcttagatttaggatgccccccactcggtggggtgatcatgccaaggccttttatttttccaacttaggtcattttctaggccggtcccggatgggttccggacctcctgcacctattcccctggatcattcagcttatctgtcttccagctggtttctcccctcgaacaactttcttggggatgatgaagccagtattgtagtgcaagactttgctagggctgagttagatagtcagggtaggactagttttaccgctttattttcatgtgcatactttcttatggccattctgacacttagtttatttgtctttttgaagcagcccagccaatggaggatcttttggtgactcttgcccaaacatatagcccagactctgctcttcctctagcacccgcccagacggtgaaccaggggaggtcttcttctagtgtgcccttaggccaaatcgtcttaatcgatgaagacggggaggtcgaggaggaggaggaaggtgagatcgtggccccgttggaccgaaagcgcaagggcaagatggtggaggctgagtcttccaaaaaacctaggagggtggacactccggccgtcagctctgattcagggattccgcctgaagccgagaaatacactgtacctcccagcatcatccttactcccgtccccgctgatgaggagaggcagcaactttggattgccaagcataactatgccatggccgagtacacaagggggaatgccaaggtggaagccctaaaaaaggtgttataggaggctcagtaaaattccttacgcgaagaggcctttaggaacgcttgggacctaaacatggccctctgacggactggttcaaccgcttcgtcggtcctacccttgctcccttcgctttcgagttgacgagccattttgtctccaacctgacccaactcccggccaaaagatacgcagcctgcgattccacgaactctatctatcagattcaggatatcagcgctgctatgaccgcggtaagtctttattaatggttttttcttttcttttgtacttcactttgtggcatatgatctctcatacttaactcttttttcttattttgccagatcgctgcagagaccggtcgcctctcaaagactttaattgatcatgggtacgtcatgtccgagttcgggggcatggacgaggccatgaagagtctgagagatttggcggttgagaggaaagcctttcggaagaggcccaatagagggaggttcaagcagagaggaagcattaggaggcactggaagccaaggcggaagagctgaagacccgggatgaggccgtggctaaggcg

SEQ ID NO: 35678 - DNA, 3572 bp, Cannabis sativa
ccatttcataagaaatatatttttctttccttatcttattttatattaattatatatttattaattaaaaattaaaaaaaaaaaacaaacatgtccttcaaaaatctataaataaaaaataattacaagttccaacaatgacaatttagttaaattataacattttgattacctttcctagtttcttttccgtcagtttagtaaacaacataataaaatattatttttgattatttatattttaaaccgatttattcttaataagtaatgagaatcaatggcaaagtagatattcacttacatttatttactttattgaaattatgaaaatgagaagttgaataaataagggattaaagaaaagaaatacttccccaccaattttttaagaaatgccattaaaggtaatgatttttattttttaatattaaatatacaataataattttgtcttttaaaatatattatataaaataaatacaatatattatagtttaactcaaacggacaatttattaaatttaagcattaaattgaatttaagcattctgattacatttcttgataaaataaataagataaattattattattctatttccaaacaattttaggaaacaacatattacaaatattgatttcaattttttttttttacttacttatattccgttatacatttctccattcattaattaatttattttaattattctaaatattgtatagtaaacttgtacactttaataaacatgccatataaacaatttgatttatgtggtatttctaaaagttttggggcaaagttgtaaattaatgggaacaagttgaggcaggcccaagtttggcccagttagccaagcccataataatggggtccatatcatttagttttcctttactcttgttttcacttttcaacgcacaacaacatcagtagtagtttttcttttcttatcaaaaaaacatcagttgtagtttttttcattttaagataaatcaacataggattagttaaactactttaacttagtccttaagaaggagagagagggagagatgtgagtacttgctttctgaatttttctgactgaggaagcaacgaatattgatatttcaactgaaatactttcttggggtaatacaaaaaaccattgatctgattggctgacacagacaatctttcattctgggatcatcaccatcatcatcatcatggaatcgaccagttttgtcttttaactggagacgatgtcacaagctgatgtctcttacaggtgggtacatatatatatatatataaagatagattttcttgatttttgattgtttgtacaagtttaatttttgattcttttaagttttgtggttaaatctttttctgggtattgctaaaattggacttaatcatcgaatttgatctcattatataccatttgattgaaaaggttttgtcttttataggcaagaaataggtttgatcttatataaacaatttaggttgtggtaatgctcttatataatgattaaggaagaaaagttagtacctttggtgtttgataaaaggttaatggtgtttttttctttttttctttcatttgtgagtataatttatagatttgaaagagcccccacaatgtatacttcttcccagtaataactggtgttgtattttgtagatttgaaagagctgaggattgctatcatttgggtgagccctatggtttatgctgtttctttgagttgaaacacttagtcatataacataggccatgttgcttttttgtcttgatgaatttgagatattagattatgttgtagcattagcatataactctttcaactgttgcaatggaagctattggttttggcttttgttaatatgaaattgattttggttttctggtttgcaatttgcagttgtgggtcttgtggataccctctgaatttgatatcttcaaatcgaattacttctggcatagactctgaatacagcaaatccataaagaaaggtttaatctcctttatttcggttgatctcagtcgattcacacaggttgatgaggtaaattgttttcctctaagttggggtcgttatcgttcaaaaaccaaacttttgtgtcgtaaatgtggagttcatgttggctatgcatatggtgacacaactgctctttgtggttttgattctcccaattcatcaaactcagcttataaaaaattcactgtaaagattcgagctttgcaaccttctgaagagtgatttagacggttgacatggagggtcattccaatattggtttaacttccatcatgcaccttcctgatgattgtctttacttcatttttcaaaggcttgattgtttcacagatcgtgaatcgtttggcctgacttgccaacgatggctccaaattcaaaaccatagccgacgctccttacagttcgcctgttcattcacccatttgagtctttcttcattaggccaccccaattttaacttccattccttccacctcaatagggtgctcactcgctttcagaatttacagtctttatccttagccggttgcatatacctaaccgattcagccttggcaccactacagttttatggttcaaacttgcaagctattcatttcgattgttgtttttgtatcactgataatggattttccattgctgctactgcttgccccttactaacacgagttagtctttaccgatgcaatgttactgatgttgggttagcaaatttcgctaaagcttgctcgggtctaaaacaagtaaacctctcacactgctcatacatttctgaccatggattaaggacccttgttaatggatgtcatcaacttcaagcagtaaaaatatcattctgtagccgtataactggcattggcttcagaggttgttcatcaactttagcttatgtagaagccgagtcttgtgatctagagccacaaggcataggtggactagtgagtggaggtggtttagagtatttggatgtttcttctctaagctggcatgtaggcagagatggcttggtagctataggagcaggacttggctcgagtctgaaaatcttaaacctcaggctgtgcagaactgtgggcgacgagtcaatttcagcgatttcaaaagggtgtcccttacttcaagagtggaacttagcattgtgcaatgaggtaaggatctctggatgggtttctattggaatgaactgccataacttggagaaacttcatgtgaaccgatgtaggaacctatgtgataacgggttgatggctttgcgaaatgggtgcagaaggctctcggttttgtacatgagccgcggtgggaagatcacttcgacagcaattgagatgttcaaatgttatagaggagatgttgttattaaggatgaagagattatgacaatgagtataggacttcaatattttatttgactatctcttttacaaacttgcttggcttgtgctttgctgcatatctctcactctttctaattaattataaattaattgtttaaacttgggatctactcaatctgttgttagatagatttgcattt

SEQ ID NO: 35679 - DNA, 1556 bp, Cannabis sativa
gtctataggacaaggttggtgtctcgaaaaattttgtcttaacaatttttgtctttttttctatttaattaatttaaaaaatttatttattttattacaaaagtaaacaattattattttttcaatttaaatagattttcttcaaactctttatacaactctttatccctaccattaatagtgtttaaaggtggcgattcgaaaaccatggagctataattcgaagctctagtaaactagattatttattgagtctcatcaacaaaataatcatttatttattaatttcatgattactccactataaatatggaattacactcttaataattgtagaattatatttattgagcttaactatagtgttcattcatataatcaattctagtgattagccctatatgtgttggttcgtaattagctttggtcaaaataccattttaccttttctaattaattttttacctttagttttagtaattcactagtggaagtataattcaagatctcatctgaatttgtgcacaacattccagttccaaaataaaaacttgaagggaatcaacattcaattcgttaggaaagttaggattccatatttgtacatcatatatccagccatcaatgttattagattctcaaaacagaagttgtaagaatcatcttttgtgagaaactttaacaagtgaatcaaagaaactgataaatgaacaggagttcaagataactcaaaatttaagccgatctactattgatcatctttatgatatgaattaggtctttatgataaaaggcatgttgataaagatatttttagtcatatcggtccatgtcatatataatcattattatatacagtaccttcacttcgatgtctcactacatccataatttgaaccaagattagttgcaccgaagagcaaacatcaatgaactatactagcaaccatagattaaagatttcataactttcttatgttgctaactgttttattcataggtaagtagtattaattctctatttagctacaaaccacaagctcatatatgaataagaaattttttgatgtttaatataaattaattattcaaagataaattattaacaattgaacattgacacacatagattaaatatttactctttatttaataatcagaattgtctttacagacttttcaggacataaactctaataatatggtggtttatcatatatgatggtttgttttgtatttttcttaaggatgacatgaggtagcagtgacacatgatctgtttcacagatagtaaagataaattttttcttcattaaataatattttacaattgtttttccaaaatataaataaaaattttcattttaatttaatattaagataattagtgtattaatttaattttatatattttagttatgtatgtttttattttactcacttggtcattttaagatgcaaggactttaaaagaaaagttttattacaattctctttcttaaatgttttactatattattaatttatatgacataattttaaaattatttatttta

SEQ ID NO: 35680 - DNA, 1598 bp, Cannabis sativa
gggtttcacccagcgcctaggttgacattcctaattaggatttcagtttttgggaccgtcttagtgcaaatgggtcaaaatttgaattgggacatcaattaaacataccacagacatatttaaggtattagaattagatttggagaaagttcatttttaagcacccggtgctcgagcactcagcgcctaggttaacaatttttgtcaatctaggcaacttccatgtatcagatcgataatttgatttttgcatcttctttgtcttcatcaaaaatagggaaatgtgtactttcatggaagaaacaacactttctgggtgccagaagcaaggcccagcgcctaggttgacacttggggctggcccaatacccaagttgataatctatcaatattggccgattacgatgatgttttctgagaactcttctgagtatcttctctgtcttcaaaaaatattaagatttaactatttttggggactaaacggaagttttcgaaggctataattgggacccagtgcccaggtttacacctagcattgggcccagcgcatatgttgacatattttcaaacttggctgtttccgatcaagttctcaaaaaagtgttctgaatatattttccattaatagaaataataaagattcaagcaaactcggggagaaaaccacaaacccaagtccctaaaaatagggtaatcgcctaagttgacttggtaatgggcctacaggttgtcaatcaacctggtgttctggtttcgattattcaaatgttgaatctgattcgaccaatgaatatggaatggtcaaaaatagggtaggataccttgtcctcaagttcaagaaccttggatgtatcaaaatgaaaaacccaagagcttgaaaacagggtacccagggcccaacttgacaaatggcttggtgcgttgggttctgtttatccaattctgattctgttttgatcgtttgtctattttttcacaataactaagattcatgaagtcaaaaaaaaaaaaaaatcaaattcacaactttgtatttcttatttcaaacatgggaaactcactcagaaatgaagagtttcgagtctctcatttctgcagaagcaacatctccaagaactagtgaccagcttcgccggaacatagaaacatagtaagtgatgtcaaaatatcacttaggcatctcaaagtacatcccttagatatttttacacttacccagcatccaagttgatgtcataggtcaacatgggcaatgagatgtcaatctgggcgttggatgttgacttgggcgctgggtcatgaactaccttcagtaaaatagtcataatttctcaatattgatccgattgacgtgattcaacttgcgtttcaaagctatttcaatgctatttgaagtcatgtttcacacttaaattgaaattctaaagttatagacctcaaatttgaccctaatagagttacaagaatatgctccgagttacccaacaggtctcgtcgggctccaaaaaatgaatatcaccattggaagcaaattttcaccgttggatcatcatctacggtcaaaaaatatctaatttttatttttctcctatttt

SEQ ID NO: 35681 - DNA, 1462 bp, Cannabis sativa
tcattcttttaaaatattttaagcactccaaatagtgatttaatagttgtcccaaatgaaggctttctagaatttttataaatgagtctaatctctcaaccatatagtcaaatttggcctccattgaaacaaacaatattgtcaaataaacttacacatctaaaactgtttagcgagattttcaaaaaataaattatttaatataagaactaaagaaaaataatcaaaagagaacactcaaagattttgcgtagttgcagcattaaagagccttagtccacgagtaaattttattatctattacactaaaaaaagccaaaagaatcacaatgagtataattgctctattctcttctcaagctttgtgaattaagaatttttaacccttttcatgaaggattcagtgtgtatttatagagtaataaagtttatacttagttaccatttttcttctaatggggtgtttacaaataatatagtacttcaagcttatcgtataaagcccatcccatgaggcagtgactgaatgctgacttggcaggttgatcacggtcgtataaagtccaccccatgaggcagtgactgaatgctgacttggcaggttgatcacggtgatagctattcataccatgtcatttgattatgtataattaactgtgcattaattatttaatcttcaattatgtagtttctcattttagtttgatattattccctgtccgagatttgtgaaagtaatttcttgattctgcaccgattggtaaaagggaaactgtcgttgacttccaggaacatgctagtaaacccttctgactacgcggagctagaagtcctccggatacgaattatgcttggtggaagctcacctaggcaagtaacgcgattgccctctcacaaggcttgctgatattgggtttggcccaattcttgtcatttagggccagatagtgggctttaattatctgccttgtgtccacgtgtctcttgtcagaaacacggataacaaaaactcatgtatatatctaatattttttaaaaaattataaaaatatcatgtaatatcatattttttttttaaaaaaaaaaaaaagaaaaataaaatcttacatcattctataaccatatttttgtatcttttttaaaataagaatgatgaaaagttttaattatatcaatcataataaatagatatcacacaacatttaatttgattctattatatcaattatattgatttctctcgaagagtatgatggatatcaatagaattatttgtgatattttttaatataaattatttttggggattttttttttatatttttcgtaaaaattttttttgtcaagaatattatttgtggacttaatatcaactatattaatattttaatttttttggacaaaaagattgatttattttgattaacggatataatgtaaatagtttgcgattcatgatgaa

SEQ ID NO: 35682 - DNA, 5133 bp, Cannabis sativa
ttatttcttcctggggcatttagacaaccagctaagagaggtaaggcggctggagaagagaaaataggtgctgatctagtgtctggagcaggtctggtgtggtctggtgtgagtgggagtagcagacctggtaggtgagggttcatgaacctgctgtgatgttgaacttgcagtgacaacagcaccattttcaggagagatagcagctggtatagatctggtatcgggtgtgactgaaggagttgcataaccacttgaaccagatatgccatctgcagcaacaacaatgggctgttctgtatgcaaattgttagcaacatcattacacggatcaggcacaagggaagcacccgaaccagatatgccacctgcagcaacaaaaattggctgttctgtatgcaaattgttagcatcaatactacactgatcaggcacaggtgaatcaataaaagcattatggtcaatattatctgaagtgctgggaaaaccagtagttgagttaaatcctggggagacaagatcagcataggtgtacatttgttttgagtgagaacatacagggatcaaggctgaaacacagggaggaaggtcagggagttttctagcagtgttatggctgacatcttgctcaaaagggaaggaaaactcatcaaaaataacatctctcgaaatatatagcctacccttgggatctagacacttgtaacccttatgattgagactataacccataaaagtgcaaggagctgatctgaattcaagcttgtgcttgttatagggtctgatattaggatagcatttgcacccaaaagttctaaaggttgtgtagtcaggcttagtgtgaaacaaggtttccaaaggagatttatcatgtaataagggtgtaggaagcctattatgaatgtaaacagcagccctaaatgcttcatcccaaaatttaaggggtaatgaagcttgagcaagaagagctaaaccattttcaactatgtgtctgtgttttcgttcagctaaaccattttgttgatgagtggttggacaaggatgtctatgatgaatcccactatcagcaagaaaggttgtaaaggatctatattcacccccccaatcggtttgcaaagttttaatggacttgccaagttgtaactcagcttcagctttgaagtgttgaaaagttttcaaagcatcggatttgtttttcaagagatacaaccaggtgaatctcgaataaacatccacaaaatgtatatagtacttatagccattaaaggatgttgtgtgggatggtccccacaaatcagaaacaaccagttgcaatggctcagaaatgacagttttggatgctttgggaaagggaaacttatgaatttttccaagacaacaagctgaacaaatggaaaactgagattctttattaacagtaggaagattacaagatttgagaacggtttgaacaaccttctctgaggggtgtcctagtctattatgccacaaggtgaaattgttttaaacattggtattacatttaaaacaattggacatagtgacagaagtgttattcaaagtagcaacaaaggtacacttagacttaggagaatcactaatggtgttgctgagttgaaaatggttctgctgaaaacagttgagtgtctcggcctggtttgggatggagtagattggtccaatttgggaggggtcaaaagtatataggccattcttgtgtctccccatcagcaaagtagtatgactcacttcctcctttacaaaacaaacatcggcatgaaattcaaagtagacattattatcttttgaaaatttagcaacacttatcaaattctttgtaatttcaggcacatgaagaagattattcaagacaagtgagtgagaagtatgctgaggaataaaataagattgaccaatatgctttattgacaaacctgtaccatctcccacatacatttgatcctgtccaccatagtcaaagcaatttgcaatgttctgaacttgtggagtgcaatgatttgttgctcccgaatctggataccagttaccatcatctaggttgctatttgtggcaatattggcttgagttatctgtgtctgctgagtgttgctactgccagttttcagcatagagttcacaccagatgtggcaccagatgttgcaccagaaaatgacttatcgaatcgataaaagcagtcatgtgctgtgtgcccaaaacgcaagcacagctggcattgcactttgttattgccattgtttccaggtgcagatcttcctcctcgattatagaagtttcctcctcgaccaccagaactctgacccgagaatgagccaaactcgattccacgattgaaatttctgttaggcaagaaatttccatattgaccaaagccactagattggggatttcctcgaccgaattgttgttgtttgaaccttctccaggcaacattagcttccatcaatgaatcttgatcatcagttacaagattcgcactgagatctatatccttcgcagatcgttcgatcctcgattcagaggctaagagcagagcctcgatctcacctactgtgtattgttcgacacgagtattggtggagatcacaaaggtgtcgtactcgctcggtaggcctttgaagattgctgcaatatggtccctgtcacttaatgtttctcccacagatgcaaggaggtctacatgttgttttactttcagcaagtaatcgttaaggcttagtgttcctttctttaggttttgaagttttgtgcgaaactccaaaatcttcgacgagacctgcaaagtatagtgtttctccaatgatttccagatctgatgagctgaattacaccctaccattcttgtgagtaatccttcagtcatcgacgacaacaaccatgagactaggagctggtcctgaacttcccaatcgatgaaagtttggctcactcgatttagattgcgatcttcatctgtatcgaactccggtggtggtggttctttgatgaacttcagtagacgatttcctctaatggctgcaagaacttgctgtttccacagcaagaaattgtagtcattgaggcgaatcgaaatgttgtggttgaagtacaccggttcttgagaacctctgttctgtgtggtttgatgattgttgacagctgcaccattgttggagattccagcagctccaaccgtggccatgtttgcactgagcggaggccagcgctctgataccatgttaaacctctgtgccattagaacctgtaagctgaaaccatgaaagacagaacaaagaagaggaaagggagaaaagagaaagaacagagaaagagtggagaaggaaagaaagatctcattgaatcaattgtgatacaagacatttatacaagctgtcataacaaactaataacagaaatcttaacagtagctaactaactaaccaactcaatcaatacagctcaaccaactaactaattctcattaacagtcttaacatctcccctcaaactcataattgaaaggtcttcaattgtgagtttgcttctaaagatcgagaatcgttggctggaaatggccttagttagcccatctgctatttggtctatagctgcaacatgtttgacttgtatcattcgattcataaccttctctctaacaaaatacagatccaattctatatgctttgttcttgcatgtagaaccggattctgtgtaagcattatagtgctaaggttatcgcaccacacagtaggaggctgaaccagctgtatgtgaagctcggaaaacagataatggagccaagtgagttcagccgtgacattagcaacactcctatactctgcctctgtactagaccgagaaatggtttgttgcttcttgcttttccaagcaatcaaatttggaccaaagaatatagcaaaaccagaggtagacttcctgtcatctggatcagaagcccaatcagcatcacagaaggcagtaagatcataagaggctggtttagtaaagtgaagtccatggctcattgtgccactaacatatcgaagtatcctctttacagcttgccaatgagtagtcaagggattttgcatgaattggcacaccttattgacactaaaagatagctcgggtcttgtaattgtaaggtactgtaaagcacctacaatggatctatacatctgaacatctccaatcggttccccctcgtgagcggataagcgaaggccactagtcatgggagttggagaaggtttagagctgagcatttgggccttgattaacaagtctcttgcatacttagtttgacacagatgaatcccatgttctgtataggtgacctcaattcccaaaaagtatctaagaggaccaagatctttgagggaaaattgattgttgagtgtggtgatcaatttggttacagctatctcatcactccctgttattagaatgtcatcaacatacactagaactagtgttgttgagttggaagaatgattaataaacagtgagtgatcagatttggaagagatgaaacaaagggagttcaagctgtgttgtaacttctcaaaccaagctcgaggtgcttgtttgagtccataaagagccttgtttagtttgcacactaaatgctcttgtccaggaatctcaaaacctggtggttgagtcatgtaaacttcctcttgcagatcaccattgagaaaggcgttgttgacatccagttgtctgacagaccatcctttggacaaagccaaagtcaacacaactctaattgtaacaggcttgacaacggggctgaaagtttctgtgaaatcaaagccggcttgttggtgaaatcccttggcaaccaaccttgctttatgtttgagcacactcccatctgggttttccttcctcttatagacccacttgcaccctatggcttgtctcccttcgggtaatctaacaagaacccaagttttatttctggccaaggcaagaatctcatctcccatagcattgttccaatgctcttgttgtaatgcctctttaagggatgtaggttctctcaaggccatgagtgctttaggtttaaacactccaagcttagacctggttgtcatgtggtgagagttatttcttcctggggcatttaga

SEQ ID NO: 35683 - DNA, 1383 bp, Cannabis sativa
  modified_base (180)..(180): a, c, t, g, unknown or other
  modified_base (240)..(251): a, c, t, g, unknown or other
ttttttaaaaaaaattaacattttttttattcaaaatatcaatagattcaaatgactttattaaaaaaaaaatagatcgaatagctattgaaaacaaatatatacagaacatttcttaatgaatattagctattgatggttactaaacaatttaagtataaatattaattttaaaaatantaaactattagattttgatccaactaacgaataataaaaagagaaatttgaatttctatnnnnnnnnnnnntacttaattaaaaaaatatataaaaaatattactttttacactatatcaaaaatatgtttatatacaaaatacttaagtcaaattcaattttttttttttgccgatattttttttttcttatcttacctcatataatgtaaaaatgagagattttttttaattagatagaaaaactaaacataaaaactcaaattttcataaatggataatatcctttaagagtgtactcatacatatatataccaaaaatactagctatttgaatctaactgatgttttgaattagtaattttttttttaagaaaatgaatacacaatacattaataaatatataaaaatcttactgcatgtatgtataaatttctttaaaaattgtacgtgttttattttttttctctcctaaaaaaattgtatgtttctgaaatagtgttggttcaatctttagtgtgaccagagtttatctctctctctggggtattctagtaggcatgcgaaaccgtgtttcctgtgcaatcttggtcccgagcatggtggttcttgtccaccctaaccagttaagtggtggtttaccttcttcttttcactcctactgtcgatttgggtctcctttattcattaattagagcatttattactctgggtagtattatcttttcaaacaatcccatctcatttattgtaaaaacactatctatatttcttctatttctttctcctcgatattgttctttcctggtcttttaatttgggatcttttgcatttaattctggctttccatatctctcaccatcatttcactcttggagatagtaaaataggggcggaggtctagttttttgaagataataagtcctttgtcatcatagtggctcttctagtggaagctagggatgtgacgagggactcttcgagaaagcatctcagagggctttggctttatctctatataatgcggttgaggtatgtttcttttcatctttctccttctttggttgttatctgctttaagtgttctttctctgtgtgcttatgggttttccttttcttgagaatggaagtgtaataccctagaattaagaaatggattagtaaaaccctaattagataattatgaataattgaggaatta

SEQ ID NO: 35684 - DNA, 1837 bp, Cannabis sativa
tttagggcacaaaacccaataaccttctgtactttttatgtggaagggatcccatatatccatgtgaactaaatcaaagaaatccatggcaaagttgttattggaaacaaatgggagtttttttttattgctgatcgagacacataacagtgattattaggatgagtaataaaagaagagtcaatctttttattgactaaatttgaaatgtacatagagggatgaccaaggcgattgtgccattgatctacattgtttatattgaagacaaaaagagaatgactggcagtggctacgggggtagtctcctgatgcagaagatacaactttctgtgccttttagatgtcccaatcaccatattctgagaaggatcttggataacacaagattttttattaaggaaaatatgataaggggtattatccataagatcagtgatggacagaagattaattttgaagctaggtacaaatataggaacttatatggactgtacctacattattaacaaaaatcttgttaccattaggaagaacaacatgttttaggaatgaagtgttagaaaaagaggtgaaacatagcttgttaaaacacatgtactgtgtagcaccactatcaataatccatgtcatagaagtaaaaataggttcattactatccatgttggaagttgcaggagtcatagccggatcagctcgaggagaagcttgattgagttattgagtgaggagggaaatcaacaattggcatttagaggaaagatcagctgtgatggattgtgcagctacatcatcaaagaaagaacttgttaaagcttgatttgccttagcttttcctttgtcttgtttcttcttgtctccatagccaggtggagaactgtgaatgaaaaagcatttgtaacctagatggccaagtttgccacaattagaacaagaaggttgagacttcttatttattgagagattggaagagggaggtctgacagaggaagcaaggggaggattatcattggatccaaaggtgcgtcggtgttcctcttgaatgatcatggtaaagacccttgacaaatttggaataggctcattgagcaagatttaggcacaaacaaatgcgtatgattcatttaaaccagtcatgaactgaagggcctgattctgggtgttatagtcaagaaagtgtttcattgcaccacaggtgcaagttgtcttcggttgaaattctttccactcatcccataagaagttccatttggtgaaataaaaagtgacagaatggtcaccttgttgcaatttagtaagcttagtttgtaatggaatcgttcagctagatcttaccacatatcaacatcaatatcaaagtacatgatactttgagcaatttcaaatgaaacaacgttaactagccatgacataaccatgttgctacaatgaagccaagaattgagagtgttactacttgcatcaggttgtggaagagattcatcaatgaaggagatttttttcttcactgccaaattcatggtgatgtcgctcttcgatgattgatagttggcagcattaaggacggtggagacaagaactaagccagggtgatcagttgaactgaaaaagaaagggttggatacatcattgttggcattgtgatcgagataagatcgtcgagtttgagttgctattggctcgtcaattcttggagattgatgatcaacatcgttagtggtggtctgagatctggatcctgaaggattggtttgtcaagctgctgccaaagaattgacaagtggagctgaagtaacatcagtaggaacatctgatgagatattttcattcatagatg

SEQ ID NO: 35685 - DNA, 1666 bp, Cannabis sativa
ttttttttttttttttttccgttttttcttttttttttttttctatttgaggtgtgtgagaatcattgacgaagctataaattgtaggtgagccagctccctcacctcaattattttacatcttcatatatatgctaattcacacataaattaatttcattctcatattgtgttgaccccggaccttgctagggactgaacgataatttcaatcgtttatgatgtttcgtgggcaatttgttaaattctttggccaagaatatttcaaaataaaataaatattcaaaagtaagtaattgattatataaataataaaattaccaatttttataaagtagaattaacatatctattctatataaaactagtaaacaattcgggcttcgcggcggatgtttaataaattttaaattatattttaacattattagttttccataatttattttttaaaatatgagaaaatagatgtaaaatcaaaccaactcgatccaatggttcataatctttactttatatatgtcctgtttatgtcgctatttactcaaaaattttattgtgatttatcactatatctaaaattaatattatcaccgtcctccacttgatataataaataattaaaacaatatttcaaccaaactaattaaaaattgatcattatttttaatttgtgatcattataattttattgtgactattatttgaataatataatttttttaagttaacaatattaatttttaatgtaatttttattatgtgatacttgaaaataaagatatcttataaaaaaacgtgaggttttaaaatgaaaaacaaaaactttattgttgtattatctctatatctaaaattaatattatcaccgtcctccacttgatataataaataattaaaacaataattcaaccaaactaactaaaaactgatcattatttttaatttgcgatcattataattttattgtgactattatttgaataatataatttttttcagataacaatattaatttttaatgtaatttttattatgtgatatttgaaaataaagatatcttataaaaaaaaaaccgtgaggttttaaaatgaaaaagtgattttagagttataattttttaaattatgtgatatttgggtttaaaaaaagtgtaaaaaaatatgaaaaaaaaagtaattttagataattttgttatttagagaaaaattaaaatgttatgtcactacttcatatctctcatttatatataatatatagagatattgataataattattaaatttatattaatgtatttttttattaattcaataaaaaaattccaaagtaaatagtgtggtgccaagaaaaataatgttattattattatttaaaataaatatcatttcatacataaaataaaaaaaaaatggtttaaggacatattttttttttatgattagtatttaaaattatacaatattattgggatatatgatatatgttaataagatagccgtataagtttatatttttaaataattacaaatataattaaaaattttaaaaaaaataaacaaaattaaggagagatgatagttaaatattgaaaaaaagagggacattagaaagataagagaattaaaaattaaaaaagacttaaaaaaaaaaaaagaattaagga

SEQ ID NO: 35686 - DNA, 1714 bp, Cannabis sativa
attacacaggctcgtaacatatcttccagtatctgaattgtccttttggattgtccatcagtttgagaatggaaagttgtactgaatttcattttggtacccatagtccgctgaagactctactagaacttaaaagtaaactttggatctctatctaaaattatagattttggaacaccatgtaatctcactatctccttgacatataattctacatactgatccactgtaaaggttgtttttttttccggtagaaaatgtgcagacttcgtgaattgatttaccacaacccaaattgaatcgtacatacccgtggttctagctaatccaaccacaaagtccatggtgatatcctccaacttccactcaggaagtgtcaaaggctgcaacaaacctaccagtctctgatgttcagccttaatctgtgtacaagttaggcaccgggatacaaattctaccacattcttcttcattttgctccaccaaaaataggatttaaggtcttggtacatcttggtagtgccgagatacaatgaatatggagaggtatgagcttctttgagaattttgtttctaactttcgcactactcagaatacaaaccgtggtcttaaacaacagcatcccactatttgacactgtaaaatctatggcttaaccagctcaaacatcttctctaatcttcactaattctagatcagttaactgagcagctttaattcattctaataaattagattgtagcgtcaagttatgaagtttgcctacaacaaactcgatgcttgatctgaccatgtcctctgctaactgaggtgaaatcttaatcatacttgttacctgcccaggacccttcctgctcagggcatcagccattacattggccttcccaagatggtaaaggatttcacagtcataatccttaaccaactctaaccaaggcctctgtctcatattcaaatctttctgagtaaagaaatatttaaggcttttatggtcagtaaaaatttcacatttctctccatagagataatgccgccaaaatgacgtgaggtatatgcgatgactcgatcggcctgcatcagtacacaccccagacgctatctggatgcatcacaataaactacaaacttttcttcatcagaaggtagggctaacactagagctgtgattaatctctgttttagctcctgaaagcttgctttacacttgtccgtccacacaaactgctaattctttatagtaagctcggttaagggtgttgaaatcttagagaacccctctacatattgacgataataacaagccagacccaagaaacttctaacttctgtaactgttttcggtattggccaacctctgatggattcaatcttcccttgatccaccttgatcccatctttagtgacaatgagttctagaaaagacacctgagatagccaaaacttgcatttctggaatttggcatacaacttatgttctcgaagtcgctgtagaaccatccaaagatgttgctcatgctcctcttctgattgacagtacacaaggatgtcgttgataaatacaataacacaaatatcaaggaaatcattaaataccctattcatcaggtgcataaaagatgcgggagtattggttagtacaatagatataaccagaaattcataatgcccatacctagtgcggaaaactacctttgggatgtcctcctctcggat

SEQ ID NO: 35687 - DNA, 1523 bp, Cannabis sativa
taaatccaatttttttttttttttgaaaagaggtatgaaaaaacagagtaatgaaacacaacattaacagaaaaagatttatattgaaaatcatataattgttttcaaattgttgtagatcatacaagaatgagttgaaaaattgttgatcggagctcccaatcaaatcccaacaaaaattaacaaggtattgaattacttctgatgatggcatgttaatgattgaaacatttgattcaaaaaaaattttaaaaaatgaataacagtgaataattattgttgtttgattgtttaatttctgtaaattatttaaatgatcaatttgttcaggtataaaataaaaaataaaaaattgagttacatttaccttgaaattaaaagaaaaatgttgatttattgctaataagttggaatgaaattcattttctttactccctgttttttatgataaattctgatttgataaagacataatattacattaaaaaaaataaataaatattattgatgatttattagttaaaaaaatataattaagatgtttttatatatgaaaaatacaaataaattcaaatacataaatcatttgaatgttaaaatgattcatgaattaaataaaaaataaacaaaaaaaaatatagttacatatatattcaaataaatagaaattgttgatttaaggttaataaattagaacaaaattgtttatcttaattgcctgttagaaattttaaaacttgacttgaaaaagaaataatatttcatttaaaaaaatattgatttatttgttaattaatgttattcgaatatttttcatacatgaaaaatataatttagcggacatactgttaatttgcagacatatgaaatcaatacttgtactagttcaaaacaatagacattaggatgagaacaaccagtacactggttttgaaactactgggatatgcatccaaataaattgcaaatatacacaattagtggacagactgttgaagaaacataactgcaaaaaaaactcaagtacccgacaaatgcagtttcagatacagtctggatatccaacattaaagatcacagatgatgaaagcccggagttttacttgcagttaaaatcaactgaaaaggacataacaaaacatcctttgtgcataaatatggttcccaacacaaaaacaacatcatagttacctttttttttactgaggttgacacaaaacatgaagtccacatgcttgaatatggaacttagtcagggggaacaccaacacatcaacaaaaagaaaacaaaaaagaagataatgatgagtttgactttgttgactatgcaaaaataattgctgcagaatcgatggctcaactaacaagacagacacaagatcaacaagaaagcaacgatgaagaagcatttgtcatcacaaataaacgacatccagaaattgagaaaggctaaatgtacaaagataaggaaactttgaagaacgtactcagctacctttcaataaaacaacaatttcaataca

SEQ ID NO: 35688 - DNA, 1346 bp, Cannabis sativa
tataagatcatatatatctcaacctggctactaattaattaagagaattattaggagacaatctggtatgcagtttaagtactataattaattattaaaaagcttaattcaaacaataattaacaactaattaattaattaggatgttcaagttcaactaatctttattaattaaaaatatattacaccaataattatatcatcacttgttaaaaggatcttctcaaaccaatcacttttttttccttaatattttttatgtacataggagaaatggggaaattataattatatatctataatatatgtgtgtgttcaatttctcttgatatataatcacatgttgtccattattaatgcattatttaaaaatttaattagttatagttattacaaatatgtaattaatttaggataattaattaattaattagttaagtactttgttattctctgatatatatctttatatatgagccaaatatatttttaggattaattgaatttattgtccttataattatatatgtatattcatgtatatctttagctaatacatgaatgtcccacactcaattaccttaattaataatcactaaagtttgtggcaagcatgttctatatatatatataagtttatttatatacatatataaattatatattaattaattaagcagagagaaatatattgcaggataatattgtttaatttattattgtgttttaagaatttcggtatcatatattccatttccaatataggttattaacaaaaggtaaattgttcttttgattttgttctttaatgtctttaattaattgtttattattcttctatatactaattaattaattttgaactctctgcactgcaaattaaccttattaattataagcttcttcttctaccttttcatgataatttatttaattctaatttataagttattatagttaaacacatatgagatcttgtcctgcaagaagaaaggaaaataatattgttaaataattatttagggttattttagtttttttctttattttagtgtcttatgttaattagttgtttaactatataaggcttttttattatttgtatttctgtacacttttgatcttgcagttgaataaaaccctaatcttctcttattttctttgtatctttttatttttcttttcaaataattatcaaatatatatatacatgtatatatataaatatgcaccatttcaatatatagttttcttcaaaatgggctcctcaaaagtggtgtaataaaagagatagaataaacaaacaaaattaatttattaataacaatttccaaaaaatatatata

SEQ ID NO: 35689 - DNA, 2856 bp, Cannabis sativa
  modified_base (1758)..(1758): a, c, t, g, unknown or other
  modified_base (1880)..(1883): a, c, t, g, unknown or other
ctttttagaatagaattatgtttgacacatttcagaaaacaatgatctataaaatagaggaaattttgtaagaaaataaagctcaaacttcaagcctaaattcgactatattctgatcaaatatttgaaaaagtcaaaacattaaagttttatatctctttttcagctttccaacgcattttgaatcagcccatttgaggtttgaatgtgaaagtaatatatattttactaagagaggttgaagcaaaacattgaattttggtcgcgacgagcctgattttcagtcgcgaccagaagtattatggttgcgacaaaaaatggacagaatgggtgctttttgacttactacagtcactgcgactagacagttcgtgactagactgtttgtggtcccaatgacggctccgtacgggacatggacaactttttcttttcttaatatttttgggctgaaaaactctattttaattaaaggggttcgtgaatttagaggaacattcagaaaaaaaaaccctaaaaaacaaaaggagaagactcttggagcgagcgtggcaatccgatcgagttcaccatctagtttctttttagtttaatcatggatttgaatgttgagattatgaattgatttcctaatttagggatatgatgagaatgttggataacacaatacgtttttacagttgtacaaaacttttctaaaataagtgttttgcagcgatagaatcacactctgcagtaaaaaattaggaaactttccaaataggtcaaagatcataatttggattgtaatacatacaatataaaaattatacaatctattatattcatagcaaaaccaaaaaatacaactaggaaaagagagttttttttttttaaaaaaaaaaataactcatttaattaaattttccgtaaagagaattatttcttctcttttattaaaacttttctaaatgaaaatgatagccattaaaaagcaactaaacataaaaaaaaaaaaaacaatattttattctcataaaatatttacaataaattaaaaaatattctcacaactatattattaaaaaacattttacatatactatagaaaaattctataatgcatccccttaaaagggatgtattgaaacatctctatatgttttagaatccaaaataattttttactcaattttttttttcttatggtcatgtaaattattgttatttaagatatcctgcaaaattttaagaaattcggaaaagtttaacacgctgaaaactacgttcaaaatagtgtattgcacaagtgactattttattttatacgcgtgttaaatagactatttgaacattattttccatattgtaaattattctgaatttctcaaaattttgtatgatatcttaaatagctataacgtacatgaatatgaaaaaaaaaactagactaaaaaattcttctggatgtcgaaacaagtagagggtgcatttattttaaggggatgcattgtatcagcacattcattttaagggggtgcatgtaaaattttcctataatctataactgttagaaaggtcagaggtaaggttgagtataaaggataggatgaggagtaagatgtataataagggaaatttatctacaatgcacctccttaaaatggatgcactgatgcacccctatctattttagcatctgaaaaaaaaaattagttaaatttttttctcatagtcatgtacgttataactatttaagacatcttacaaaattttaanaaatttgaaaaaatttaacatgctaaaaataagattcaaaaatgtggtaatgcatgaatattttattttatacgcgtataaaatagattttttgaacactactttttatattgtaaattatnnnnaatttctcaaaattttataagatatcttatataattataacgtaaatgaatataaaaaaaaattagttaccagaataagtgcatgcatcagtatatatttagtatatattttttaaaaaggtgtattgtaagatcaccttaacttatataccatgaccgactaacaatagaaattaaaccatgactacatgcatattgcccacttaatttgtttgacaaaaaatattaacatccaattccattcacatgaaatgtagtgtgaatatgtatttttgtagacttaattttgatattattagtggactgaaattaattgaagtcaaatgttaaattttataggaaataatattagtaaaatgttcaatacgctacaatatataaaatgaataaaatataaatttttgtcattttaaaatcttatggtgttttgttcaaattttttaaaactattattcacatttttgttttattaaaaataaaaatcaatattctacaccatatcatgacatctaatttctaaacttggacccaaatccggactcggatccaaactccgaaccatgatccagatcctaaacccggaccaagatttgaaccctggatccacgcccggacgcgaaactcatacccaaacgtagaccccaaattaagacttgaatttcgcacccaaatccaaatctcgacccagacccgtaccctaaaccgaactaggtccaagatcttacggaccagcgcatgacacgaaaccattatatcaagactttgttattatctattacttttttgttttttatttttctttcttattttcttgaaatggtaattattaaggtttttttattataattaaaaaaagaaaaaatattataaaagaacttttttatttttaccctttaaaatatttatatatatatatatatttgcatttttatgaaattctacataaaaacacatattgcaactagcgctgcaa

SEQ ID NO: 35690 - DNA, 1602 bp, Cannabis sativa
  modified_base (1087)..(1101): a, c, t, g, unknown or other
attcaattatcaataaagaaacagatttaattttattacttgtttaatgtgataacatcagtgtatgttcgcagaatagtaaaagagatacaagcttaaaatctaaatcaagaaaatatctaatgtatggaactcattcaatttgcagaaaccaacctcatgattcttgagtgagtgaaggcgaaaccgacccttggtatcgtaaagaacgttctcgttggtttttgggatagaaatcacatctaaaataatacaaaataacctaatgttcagccaaattctaaattacggaaatccaaacaactatttatcataataatcatagttacaaaaaaacataagcacaaaataacaagaaaaaatattttagtattagcatgacttgaacagtaagaatgtactttgtaagatttaaaaatggaggcttcatgatgattttttgtgtgccaaaatgtcaaacttagctgaactgcaacagactatttcaaaactacaaagttaaagaaagtctaatgatgcagcaattacaagaaaaatgcgaactttcaattttgtaagataataacctggagaagattcctactgagattaaggcatagattctaaaaccaggaggcagtgagatttttgatgccttgattgggaatggccattgagaaccaaatcaagggcatagtgaatacggtgattgaaatcaaatcattcttcttaaatctacaggcattagtgagatttagaatgcctcgattggaaatggagactggaaaccaaatcgtgggcacagtttttaaaaccaagcattttaagatttcaaatgcccttaatttggaatggcaattgaaaaccaaattgttcttttttttttttaaacgtgagtgaagcgattaatgttttgtttactttttctaaaaaataggaaattgttacaaaagaatcgttagaccaagaaaaaaactgttaaacaaaaaaatatcgttagataattacttttaatgtataaaagataaagatatagatttgattatatataaatatctttttttatgattaaatatatatataataaaattaatttttttatataaannnnnnnnnnnnnnnttatttttaaatatatatatataacaatattataaaattaataaaacaatattctcttaagtaattgagatattctgtcaaagttaacgtagaaaacctaacatcactgttaaaccaaaaattccgttaaatagtcacatctatctgtatatctatatatctatatgtatataacacgaaagagagaaaaaggaaaatctttatttactaaatgaagagaaaatacaatctgcttgattacaattgaagaagaacaccaatatatatacaggaagtaaccgacatttagacaaaaataatatcagctaaaagatagctaatgtaacagaatagactaactgaaataacggtaaaaactataactagcaaactgtcagtaacaaactatcagtagaagatggcattagactaattctgttataattctaatattccccccttaagatggactggatatgtcatatacagacatcttatggatatgagaagcaagaattgtgg

SEQ ID NO: 35691 - DNA, 1503 bp, Cannabis sativa
  modified_base (34)..(68): a, c, t, g, unknown or other
atgcaacataaaatgtgatttctaatctttattnnnnnnnnnnnnnnnnnnnnnnnnnnnnnnnnnnntttagggcacaaaacctaacaagacattcttctacttgttgtgctcttcatatcgtaaagctattcgtggggtggtgttaagagcgagatggatgaatgtaatcttctccatgtacaattacgtgagtcaatgagttgcaagcttttattcccaagtacgtggtttaatgagctgtaagctccttgatgtctcgtcttgtaggcttctatcatatactctaattatcttgagatggacatattgtctcgtcaattatatcagtttactagttattattcttatctcgcatatgcttatgtggcagcaagtttgaatatttctatcaacttataattaattgaaacgagttattttaaattgcatttaataatacacttcaattactatattctttgagctactttaaattctttttgtaggacatgtgtcagcttcagatgaatagccggatttcgagtataacaattaacttaagttgttctgtaaataaataatttatcttccatccttaagtataaattttttaaaataaatttctgtgaaaattatttaacttaggtaggtccaaaattaataaattaatttttacccaaataatagaattttcgataaaattaacactatagtatcttaaaaattaattatcaaaattaactttcaatacttaaatattaatttctatcaaaataattgtatgaaaaattactaacttaagtagttcaaaaattaattaagaattaatttacaacttaagtattatttttctatctgtttattttaatttatttatttcaatatattaatatatttatttaagtataattactattttagataaatctaaatataaattgtaatttaatatttataaaattataacttaggtaatctgaaaataaataaaatttatttttcattctcagtattaattttcaataaatattataaaaattacttaatttaagttggtccaaagttaattataattaattttcaacataaatttaattttctataaatatatttcattaattttgaaaaatttaatatatttttaaaagattaaatatataatttttcaaaattcataaataaaaaaaaaaaaaagtaaattctaacaatcattctattttatgctgaactaaaattcattaagaaattaatttttagcataaatataattttcttatttaattaaatgatacaaaattatgtaatatttaagtatcttgaattaaatacttaaacattaatttttatttaattaaatatagaaaaaaatacaaaatagtttacttagaaattaattatgtagaatttacttcataaactaagtattggttttctaattacaatatattttaatctatttatttgaaataattattaatgaaaattccttaatttaagtagatctaaaattaattaagaatt

SEQ ID NO: 35692 - DNA, 903 bp, Cannabis sativa
tataattaatgtaagtatatactaccactagtactatagtactatagcatatgatgcggttccaactttcaacgacacaggtactcagcttgcatatcgcgatcatgccagtagaattagtaaacataattaattggaatattcttcttaatcactgagggaaaatattattataatattaaaatcattatcaaacatttacatgtatatatatatatgtcatgatgagtagttcataaatcattttctctatgtatatttttctttttttttggctgaatgtgtaattgatgaaacaataattattaattgcagtgtgtgacgatcataattatatgatattattgtaattgaccaattcatgatttattataagaatctcatatttacgattacctttggcttcaaggagaaggcaacaaaaaccgtaacttacaaaagaaagtccaatatatttataataaggtccatgtgacctcgtttgatttgccttacttctcacgacgaaatattatgaaagagtaatagtatgtatacatacaattcgtacacaaacttaacacatgcttatatgataaataactttaacaaataatttaattttatttaaaatgattctcatttatcaaaataatttaccacacgtatgtgttgtgtgtgtaaattatatggtttatcagtcttcttaagccacacattgaattatatggtttaatatatctatatatttatgaagattatacaatataatatactttttaagagaaaaatgaatatttgtttcaaaattaccatcctttttatggaattctgagcccaaacaaacttccttataatttgcgggttattataagtggcaataaaactatgggtgacatagggtacacgtacgtattaattata

SEQ ID NO: 35693 - DNA, 1109 bp, Cannabis sativa
tgttcatagtgcattcgattcaaactaaagtagcgtttggttaggaggaatgaaaacataagagtgagaatgagaattggagtgaaattaaataaaatttataatgcataaaaaattgataaaaaaatcattaattaatttttttttcatgttaatacaaaatggtctttttttctattttaaaatgaaatagtcattctaccagaatgatgggaagaatattccattagaatgatattttaatactttaaaatgcaaccaaacatgagaatgaaatgaaaattgtttctttttcattttattccatttcattaccttcaaccaccgcatttggttgggaggaataaaaacataggaataggaataggaatgaaaatatgaataaaatgaaataaaatttaaaatgtataaaaaaaattattaaattttttctcatcatgcattaaaatgatcttttttttttccatttcaaaaaggaatagtcattccaccaaaatggtggaagggccattccattggaatgacatttgaatacttgaatgtgcaaccaaaaaaatgaatggaaagaatattgttttctttccattccattcccttcattaccttcaaccaaacgccacttaagtgtggatttcatattttggatcaaattcaatttgcactagagctaaaatcaaatccgtaatagcgcggattgaatcaatttttttggaatgataacttttttaatatttatgaaaatataaattattttcacataatcaacaacacaataaaataaattattattgttgtctagaacaaattaaaataaacaaataaaaaataacaaaatccaaaaaagaaagaaattgtatgtaaaaaaagtttagtttattttaaattatatatcctttatacataaattactattttttttttctttaaaatatgaaatatatatttataacttttgaaatatatataaatagatgtgaattgtattggaataattacatttgtatgtaaatcaacatttattttgtataagtgcagattttagatttctcaatccaatttgtaaagtccttttttggcaagttagttgacaaaataatttttccttttat

SEQ ID NO: 35694 - DNA, 1007 bp, Cannabis sativa
gtattgtattacaatagagttgtaatattttgattttctaattccattgtaataaaatctctaacaaacccaacataagtgataactcgatcagcttgcatcagaacacaccctagaccttgtatggatgcatcacaataaaccacgaacttctcttgatctgacagtagtgctaataccgaagctttgatcaatcgctgctttagctcttgaaaacttgtttcacacttgtttgtccatattaactgatgattctttttaattagtttcgttaagggtgttgagatcttagaaaacccctcaacaaaccaacaatagtaaccagctaaacctagaaatcttctaactttagtgactgtcttcgttctcggccaatccctgacaaattcaatcttgttcgaatcaatcatgatcccatccttactgacaatgtgtccaagaaatgacacttgagatagccaaaaattcacatttcttggacttagcatagagcttgtgttctcgcaaccattgtaaaaccatccgtagatgacgctcatgctctacttctgactaagagtacacaaggatgtcatcgataaatactattgtaacgccctgactctcagggacgccacgtgtgtgcttttttataaacttattattactaatcttgtaattttgaaaaagtgtggtttaattaaaacctttaattaaattcaaaataaagacttccattttaaatactgtcgtaatatggagatcccctgctaataaaattcttttataactaattacaaaaccgttaatacaagaataagttatacatctaatcatagaaaagggttgatcctgcttctcgaaagtcaagacagcacggttgatatgcacattgctaggaaacctccaagtcatggtcgaacacctccttacctgcaccacaaagcgcctgtgagtcacactgactcagcaagaaaagctacaagataaagaaaattatagaaagtgatagtagatttcaatacaac

SEQ ID NO: 35695 - DNA, 1858 bp, Cannabis sativa
gcataaaagatgccaaccttgttttcgcaagcatagcaagattgaagtcatgtaagtgtctaaacctcatacctccttcatccttgggaatggctagacgctcccaagacatccagataataccacgatctttgctagagtttgatttccaccaaaagctagccattagtctctctatttctttgcatgttccaagtggtaaaagaaatacactcatgacataggtgggtagtgattgaatgacggttttaaggagaatttctttcccaacacgagacaaaaattttccatcccaactattaattcgcgcaatcactttgtttttaataaagccaagcatggtttttttatttcgaccaatgatgttggggagaccgagatagaggctaccttcaagagcttcattcatattaagagtagaacagacttggatgcgggtagggccatctgtgttggggctgaaaaaatggatgattttgaggtattcactttttgaccagatgtatcttcaaatagctggagtaaattagagatgctagcagccgcacctcctgttgcttggcaaaataagtagctatagtctgcaaagaacatatgtgtaagtgagggagcacgatgagcaacgcgacacccttggaggagtctattctcttcaaacttttgaattaaagctgatagacctttagcacagataatgaatagataagttgaaagtggatcaccttggcggataccacgagacggacagctgggatccaagatgtagcttgagataacacttaaacgctctccagtaggaaaataattcttagccacacgccaaagaaaaagtttttgtcgttcaaccattggagcttgctaaataatcttttataaatctgagtaacactgaatcagttctattttaattataactgatttgcgttattttgtgttatttgttttgatttattatattacataaccggttatattttagttataacaagtttgagttatttgtttttatttatgttatataactgattctatttttatttatatttgagacatctatttctagtgattttttcaatgacttttccgacaacgatgacttttcgggtaacttttctagtgactttttgagtaccagcgacttttttggcaaaacttattattacaagttttatcaaattttattgttttataatttctacattttttacaaaaatatggcataaaaagcctatataaatataaaaaaattaaaaaaattcataaccctataatattatttatttatgctataaaaaagtaaactcttataattttgtcatatattgtataatttctataaaaataaattactatggtatataaaatataaaataattagataatttaacaaaattgtattttagcataaagtaatatttagtatagttgaagtgtcatttcaagttaagaagattaactcattaaggatttgattctcaaatctcaacactataaattgtgcctataaaaaattgagaactttcaaaaaatttaaaatattactattatactaaagtactagaatacacttgcgtttcatagcctttggctactgaatcgcttattgcaagctcaatcactttggctccttgggcttgggatttatcttaaaaaatattgttgcttattattttttttatgtagtctaccactagaaatatcacttctcatcctacttgtatgtgttaagcatgctaccaacattcattttgagtaagtgtcaaaggactattttcaatctttgtggtagaaaacagaaaactcattactaaatatttattatagttatttagagggataatagcatcaataaagaaat

SEQ ID NO: 35696 - DNA, 1344 bp, Cannabis sativa
gatagttgcctaggaagcatggatacaggtttgaaggtgtgtgttagtggtatttgtgtaatgtttttatttggttgtatatttattatttggccagctagatgtattttttttaatattgttcctttttttcgttaaaactgagaaaatccttttttttaaaaaaaaaaaaatcatttatcttattagatatttaatttaatttcataaaataattcaaataaaacctagatattttaaaattagtttgaaatttaaaattttgaatagatattttaggttgttttaacaaccctaaattttgaaaatttagttggttagtgttaacgcagatttttattaaacaaaattaattagccttttagtaataaatacttcacaaaaattaatgaataataaataatagtattttctctcttaattttttcgtccctttttctatggaatatgtcccaatttatagaagtataggttgacagttattctatttgggattaatttaaatataaatattaatgaaacgtggataatccccacgtttcatttagtcacatgtaggataatatctaataactacctaagtgctctttctctttatcctttagacggttattgctgacctgacttgacttagaagaaggttgtattgtatctatctcgtctcgcttgatatgagttatcctccttgtccatcttaataaggaaaaaatattaagtgttgggaaggatcctgtctcgtaatattcctattgtggcttttgcaatgcgaggtgatcttctcgctatgtgtaacccaaggcttttcatatatcattacattttaaatgctcgagtggatgaatatgctctttttttgtctatgtattctaaggcagttgtatgtctcgtcaatattgtttcactagttattatccttgtctcacttaagactaaaatagtcaacgtgttttgaatattatctattaaacttttatttaataataacgagtgattttaatttgcatttaatgatataactttatgatattatgagttatttgcggtataacctccttaagtggcccagtttttgcaagtacccccaattctaaaattttggtggtaaaacctcctaaacttaagttctgttagcaattacccctttccgtctatttttgggcgtttagtgccaggttggcatgtcgacgtgtacacagtgtacacgtggcacaatttaattagtccacgtaataaatatttaaaagtaaaataaaaaaagtaattattttaaaaataaaaaaaaataaaaaaattatttttctttaaaaattaaaaaaatttaaaatttaaaaatttatttttata

SEQ ID NO: 35697 - DNA, 1979 bp, Cannabis sativa
tcttcctttttccttctcttgaaagcaaagggattgcccaaatgtctttcatcaccacgtacttggtctatgttcagtatactcaggatttgatctcttcttctgccattgaggttcttggaaaataagatgcttgatttaggcttgctacacttttgacccgaccaatcctcataggctgagatacactcgatcaacttctttgcttccaattcgttcgcacgagcaaaaagaatcgtgtcatcagcgaacatgagatgagaaattggaggggctgagtatgcaatctttattccatgaatacctcctccctcctcctctctactaatgagcttggaaagaacctcctggcaaaggaggaaaaggaacggagatatcgggtctccttggcgaagaccccgttgaggcttcaatttcctaagcggacagccatttaatagaaccgaataggagacacttgtcacacaggccatcacgagcttcttacttctatcatcaaacccaacagcggtgagaactttttcaagaaatccccactccattctatcataagctttatgcatatcaagcttcaaagccataagcccccaagaccccttttgttctttattttgtggatgatttcctattgtttgtttttttactcattttcttgtgtaaatgattatattttaatttatgtatcaatgtttttaaaattgattttctcttgttttttttttaactataacctgtttttgagctattgtattttatttattttcagtcattttgttgcagaattaattttattttaatttatgtctcatctgattttttatttaataatttaaaaaaaaatagctcttgaattatttattttagaaacaagttttttatttaatcaattcaaggaattggtttttaatttagatatttcaggaactaattttttgtttagttaattcaagaaattaatttttaatttattaattttatttaatttgtttttgtacataagtttttatcttagttactttacggaactagtctcaaatttttaactaattaataaatataacagatttatttatcttatattttcagttattgtgtattattatttattttattatcaaatcggttaaatttagatttatgctttaatatttttagaattgatccccatattttttctttaattataacccgtttataagatatcatgtgttattcgtctttacttaattttttgtaaaacaagctttatttttaatttatgtttcaatctattaggaactaatttcctttgtactttttaattataacttgtttgaattattgtgtgttatttgtttgtattcattatcttataaaattggttcaattttaattacatatgttttgagttattctgtgttatttgtttttatttattatgtcatagaaccgatactattttaattataaccgatttgagttattatgtgttacttatttttattcattatattataaaatcgattctattttaatttatacattagagatctaactccggtgatttttttggcaacgacacaacttcattgactttctcggcgactgtgactttttcggtaacaataacttttccgttgaattttttcagtgcctatgtcttctacaacgactttctaacgatatttgttattaaaagttttatcaaatttatttatgattttttttttatattttaaattttgattatttttaatctcgtattttttacattatttatttatttcatataaaagtaaattttatttatttttcctatatttatgaaaagaaaattgttaaaaagtagtggtgcataacaccctttttggtatcataatattagtgtaattaagtagtgttgactggatttttagccaaccgacgcggagtcgtaataaatgagatttagaccaaaatcacaataataaatgcagttaataatgccagaattcgtaata

SEQ ID NO: 35698 - DNA, 1599 bp, Cannabis sativa
tcctctcccatgtcacacatcatcggtcgtctcagcgggtcaaaatgcgcgagactgagcttcgccaaatcagggagcatagggatgctctagccaaaaagtggaacgatttggtggtcgaggtttctcgcaccaaggaagaagcagaaaagaagcatctggccgaccaaaagaaggtcagtgaactcgaggactctctcaagtctctccaagatgatcttgataaagaacaggctgatcatgacaaaaagcttaaggaaatggaggctgaaaccaaagacagggtcaatagcatcgacagtcagaccgtctatcaaatctggttagttaaccctgacgtggaccttagcttcttgggtgacaatgtcgaagccatacttgcctattgcgagaataccaggagggaaaaactaggcgacgaagaagaggttgaagtagaacaagaagatccaaccaagtctcctacaatgtagggtcgatttttaagttatgttttttttatatatatttaggaaaatggccatatggtcgagacaatggtttgccccttgtggcacttttgtaaagacaaatttgcaaagttggatgaccaactttgcttttattttatctttcatttattgcctcatatttttgcattcaaacttcatacatttgtttacttgtatttttttctcacgaattaaacaattataccttgatcaaatttaaaacacttgaagcatttgcatcactcttattttcctttgatattgcttaagtagttagttatctactatgtgcacgagcagttattgtctgccatgctttcaatttgcgagcagtttattaattatgcttcacataaacagttataatctatttttagcaaatttaaatatactttacataattcatttcgcgaattaccttgtacattttttattgcttatacgaatagttaggctttctattcatattttaggtttaagtattttctcaaggcatcttggtgtctcgtttaatactttcctaaaaaatccgagtcgtttgacattcaacctcgcatgtagcttaatgttatttttatgagttgaatctcatttacaactactacttttgacttttctttcttgcgagaaaggttctttaatcaattatctgaaaaaagtttaaaaaatttaaagtggagtgggtttgtaatatatcatgtatttctatatggattccgattaatcatacacacacatatatatgcccctcaagtaattttaaagaataaaactttgtgattacttgaaaataattcaactttattaataattgaagttcaaaatattactttcacatataattagttatatttataattttgaaggaatatttgttgtcgaaccagatggacatagtgacggtttagcattattttggaaagaaaaggatcaagcaaagctccttggtttttctaaaaattatattgatgttgaagtttcagtggacaactttggtacttggcgtcttacgggaatttatggtgagcccaacaggaatcaacgtatgaagacttgggagttgttgactactttggctatggattcaaatatgccttggtgtgttatg

SEQ ID NO: 35699 - DNA, 1434 bp, Cannabis sativa
gatgccagtagagtcttgtatataggtttctggttccatgagtttggctttacatgccctttcctccattgcattcaagactgcttctttttttattgctgcaccagatctcttccgaatgccctgttcctcttgatctttgttcatccttgttattgttggtgtagtttcctcaaccatttcattacagatagcatgaaaattgggagttaaattgggttcttcaacacacatgttcaattgattataattattaatgttaggtgttataggtaaagtacctgattgtgtgttgttgttatatgtgaagtcctctctttcatttgtctggtgcaccattttgggaatcgattggtgatttattgcttctaatccctctggttgtgagtttttcattgtgtcttctcttttggtggattctattctgcctatattatccacctttagccatgagccgtaggccatagtagtttgctcatcctccttagtcaccataatcggattaattgcacattggcgcatctcgtggccaatcaatccgcacctgaagcacatatatggtaatcggtcatatttgaattgtagccaccttcttcttccttcgtgcgggaataggaattctgagaatatcttggattgaatggagctctgcaccttgaatttgaagaaaccgttaacagcaatacgattaacttccggttcttggacatctattacttcccctgccatgccagctaatcgagccatgtttgtctttgtgattgccttcacagggatattgtaaattctcccagaaatggtaaaagatcttaattctttatcccattctgttggaatacccttcattcgatccaaaatgagaaatccagcattcaaaacccatggagatctgcccagaattcgctccagtgcagtgttctctttgaaagaaagaatcaagaagatggcgttgtcggtgttcttctttattttcagatcccaatcgttttcccccaaattccaaagtcgacacaatatgctcttcagtagagctcgagtgaaatttttcatggtgcacagccgaccaattaggcaagatttgccgatgtccttctcccctgccttgtttatctcccatccatcttcattcgttacagttaacttgctggtgcgatccagcagttcctccattggagacaagcttgaagagcacatcttaggattaggctcttccgaagagagcatagacgaaatcgtagagagagagagtctagcacttttacaaatttattccattaggattacccaaaatctaacatgattctaggaccaatcaaatatgtctttcatcatcaatatgttgtgttaatctttgttcttttctgccggccggtacgtactataattaaattgagggtgaaatggaatcgatcatttcagtcccaccgatcagaa

SEQ ID NO: 35700 - DNA, 1297 bp, Cannabis sativa
  modified_base (61)..(66): a, c, t, g, unknown or other
agaggtaaaaatgatagactttaaaaaaaagggtacaaataaaagaggacaatataaaaannnnnnagagtgtaatttcctcaaaataatttttaccctatagctcactacatttcagggccggccctgcttgtgatttattgaatagacagataaattggagaggtgatccggctctgataaattaagtttcaatgaaacagtagttgtacacttggtccaataaatttgaactctcatatgagatcaatttcaagtgtacacatggtccaataaacaataaatgtgtgatcttaaaagaagaaagttttagtactgacttgaagtgtcatcagattatgcttttattagatggacccatccaccccagagctccataatgtcaacttgggcatacaaaatgagccaattaattgctttggggaaaaaatggagcaattaatgaaactcaaattcatttgtttgacctcttcctttttctctatgtttttagattcttttacctaatttgatatcaaatgctctcttttgtttattctcctcttttactgtttacttcttttaaaagtttaatatcactggtgtgtgtatcattattggataattataattatgtctacttttacaattctttaaccccaatccaaaatacttaaaaaaaaaaagaagaatatatatgtcaaacttttacacaataagaaggattgaaagcctcttattttttttcataggaggactaatatatgtgtaaatatacattatcttttatgaggaaaaaaatatttatattgatcttcctccatatgatataatcatttgatgttttttataatatataatattgaatctatattggatggattaaattaacattttctcaaagtattttttttaaagaaaaaaattatgaagctgaagcataaaattactccaacaactttaattaattctcttatttttttttatattttattgtataaattataaatatttattcttttttaattctcttatttttttaaattttttattcagtttagaaattataaatataattaattatttgaccaagaggggctaatttccctagttttattctaaacaagagaattcaatccatttatttatttatttattttaacttttcccaaatgtaatgtcgacaaatgataggaggtggaaaagtaacaaaagaaatacaatactcaaatttggactgaaatgatgtttaataaaataaaacaatataaaatttcgtagtaaccatattagtggagaaatgttaaaatgtattacc

SEQ ID NO: 35701 - DNA, 1316 bp, Cannabis sativa
gactccttggctggaaaaaccatatacggccaaaagacaggggttaaatctttgagttggagccccatcttttcataagtggtcttgaataagatgttggaagaggccccattatctatcatggttctggccactatcttgttggctatttggacttccacaaccaacgggtcattgtgtggaaatttgatcttgacaacatcctcatcattaaatgttatggtgggttcccctagctgtgggatttttggcttcctttcttctacgaccaggactacttcttcttgctcatgctgtactgttcaggcatacctctcccgggctttgcctgaatatccagctatgtgcggacctccaataatgacttgtagatgtccatctactggtggtggtgacaagtcttggttgttgtcgcccctttgattctgatcagccttgacatacttctgcacgtgcggattatttttccttataaggaattcaatttcccacttcagattgttgcattcattggtgtcgtggccgtaatccccatgaaaacaacaaaagttggtcatatctctcttactgacatcttttttcatgggtgcgggcttcttgtacggggctaatgattgagtagccatataaacactttccatgtcttccgttagaacggtaaatgcagtatacttgccaggatctcccggggagcttgttcagttttgccagtgaactttcccttttcccattccgttgtctattattgttgctggacttccacttgagcttgaattgcttgggtaatgggggagctggacggatgtcccggtagaaggagcttttgacttgctaggtttttgttcaccttctgctcgctgaatggcctcttcaagtttgataaaaccttctgcacggtcaaggaaatcactcatccagtctactggtccattcttccttatgtccttccaaagttcgccaaggacttcaatgccccccagtatcgcagataacttttcgtcttcggttacccgtgcaaccttagtcgcctctgtcatgaatctgctgatgtaggctccgagaggctcccctggtctttgctttacttcgaccagatctcctaggtgcaacgaaagttagcgagaggaggaaaattgtgcatgaaattcctaggagaaagccttccatgagttgaattttctgggggccaacttgaaataccactgttggacggcttctgcaagagtggtaggaaaaactctgcaacatacatctcctcgtactccttgcaggtccatttgcatctcaaaatacttaaggtgggataagggatcttc

SEQ ID NO: 35702 - DNA, 1567 bp, Cannabis sativa
aaaaagagatccaggatacatggtggacataggagcctccttcaacattcttttcaaatcaacatatgaaaagatggggctccaactcactaatttggcaccctgcaatcaagtgatgtatggcctctttggccaaggcatcgcacccatcgggtatatcggattacctctcactattggagaaaatccaaccaccagaactctgatggcgcagtttgccataattgacgttcccttagcttccaacaccatgatgggctgaccagccccatacaatctgaaggcggtaacatccatctaccacctctgcctgaaatttccaacaaggcaggggtaggatgtttagaggagaccaacaatctgactgtcactgttacaacttggccttgtccaaagccaagaaagagaagatgcaactaccaaataaggagcatacaagcttcatgatagacttaggcctataccactacaaagccatgcccttcagggttgaagagtgtaggggccacatatcaaaggcttgtgaacaaaacgttcaatgatcttatcgaccgcaacatcgaggtgtatgtggacgacatgcttgtcaagtccaaaaaggctaggggcatatggaggacctagacaaatgcttcaaaatcccccaaagctacaacataaagctcaaccccctcaaatgttctttcagagcaaactcagacaagatccaagcccttttggacatgaagtcgcccataaccatcaaggaagtacaaagccaaacaggacgcattgctgtacgaagcaaatttgtgtccaagtctactgaaaaaatgtgtacccttcgtcaacattctcagaggcaacgaaaaattcgagtggacgaaggtatgtgaaaccgcattctagaagttgaagaaacaattggctcaaccacctatgtttcctaaacccctagacaatgaagggctaggtgtgtgcctaacaatcacaaaacatgatgtgagtgatgtcgtcacaagagaagaaggcggtgtacaacaccctgtatactacatcagtaggagactaatcaatgctaaaagtcagtacccactcatggaaatgttgacctacaacttgcttttggcttccagaaactaaggccatacttccaggcacaccctataaaggtgtacactgatcaaccgttgcggtaggctttacaagaactgaagcattaggctcactactcaagtgaaccactgggactcagtcaatataaggccacctgtcaaccaagcatggccaacaaaggccaacctcttgccaacttcatggataatcatataagcatatctcctcaaatctctcaaggtgtaggagaaaagtaggagccaaagaagaagtgagaaagagcaagacaactcaacccaagaggtgcattgaccaccttgggggcagtgaatgcacgaggcaacaaggtcagtttcaaagcttctaacggggctgaacatgaagctccaaatactggcttcaggctagcacacgaagcgcgggctgaccacctagacatacaccatgactctcaactagtcgtaggttatgt

SEQ ID NO: 35703 - DNA, 1283 bp, Cannabis sativa
tctctctctctctctctcggtgtcgcacccacacacgcaaaccacccaccccacggcggaccacccacgcagccgacccgcctacgtgacccacgaccgaccgccgccctcaacccacatcacccacgccgactgccaaaaacccaaaatgtctaagataattatttttttttttcaatttgttcctttaattttttgtgcttaaattcatgaaatagaataatatgttgcaatttcatgtgaaatctgttagttagggttagatttaggaaaattaggaagagatctgctgaaaatggaattttttagatcgggcccgatggggcccgatggtcgggtttgatgggggttggctggaggttgaagatgactacccgatggtccgatataggtccgattttagggtcggatgggcacgattccttaggcccgatgggcccgacaggtccgattctttgggcctgatgggtccgatgccttgggcccgatgggtctgatttacgtttaggggaagatgatgggaagagaggagttgatgtaattggaagaggatattttggtgaaaataataaaattgttatatattagaaatattaataagtataaatttaggaaaaaaaaatttaaaataatgtaatcataaaaattcaaatttcctttatatttttaatggatgcttggcttaatatataacgctgagtcagtgacgacacaggagtgaggatgtttaatttttcttctttctttggaaatgatgagtcagaactcaggatgtctttgtagtttgtattagttaatataactaatctatttattgatctggcccatatataatcaatgaacaacttgtgcctatctgtgtacacctaaactggtattttagtattatttaattaataataatcttaagtgtagagagagaagagtcaaccagattttcaatataaaatccaggacctcaaaagttaattatttactaattacttaaataccgggttgcttaactaattatttaattaccatcgtacataaaaggataaagtagtatagccctctaagaacctaataaagttaaccatatatttttaaatgggtattgttagactattactgatggaagatttaaaatttgtgttatatttgacataaaaaataagtttatgctatatttatttcactatttacaattatgctccaatatacaagatgtaaaatagaaaaaaataattaattatattgataatcatttcatattttattgagaatatacaaaatttattatt

SEQ ID NO: 35704 - DNA, 1231 bp, Cannabis sativa
aagcgatgttggattgcacagcttactcggtatttttccttatggatcacgggactactacctatcacactaactttcaggcgtgactatcggggttgccgacatggtgccaacttgatacatattacgaatcgaataggccaaaatgactctcctctcctcttgagaggctcgttgactctcaacgctagtccattgctcctggaaccaacgttgaaactcctcccaatgcttgtccagtgattcctgcaaatgttgttgcaagttagcaacaacctcctgcagttgctcaacctcggggttgagcttgttagcctctcctaggctcaaatgttgttgcaagttagcaacaatttcctctaatttcttaaccaaggggttgagctcgtcagcctctcctaggcttgactactgttacaagttagctatagcctcttccaatttctcgacctcagggtcaagctccaactccctgccatgctctacgtgttcttctttgaggctcacaggctccttattgaggttcatacgtggctcacgtggtggcacagtaccattagtgtcgttgccagctcatgtcggcataatgcttggggtcttgagccaggggctcctaacctactgcccgaagtcccgccaactgaagcatcacaaccaacatggtggacctagttgtcaccacttttccagaagttcttatgttctcgtacttatgaattcctttcagaatgaagcatatactcgaacactaaaaacctaaaggcaaccaagggactcgagtagtactttcaataaaagagccaaagtattgacactaaaaaacagtcaactctgtattgtctgataagcgataacgacaaatagaaaaaataagaactaaagagaaaacaccataatttatagtagttcactccccatattggaatggttatggaactgcgtctacttatagcttttattatcgcaaaagttaattgtcttacaagagaactcacaaaaaaatgattaggctaacttcccttcacaattactagagagataaagtgtggagatagagaagctctaaccttgtagagagaatggaaagtgtgagtaatgagccaaaggagttgtctttaggtccaattaattacaatagaataatagaaaaatttgcacaaaattagctgagaaatccaacactatctcgtgagtcaattttaatacctgaatcatcagaattgcagcggga

SEQ ID NO: 35705 - DNA, 1406 bp, Cannabis sativa
cgttcagcaagaccattttgctcatgggtagtaggacatgggtgtctatgaatgataccagcctcttttagtgtgtgtgtaaacgacctatactcacccccccaatcagtttgtagggtttttattttgtgaccaagttgcaactcggcttcagctttgaaatgctgaaatgtttttaaagcttcatctttggttttaagcatgtatatccaagtgaatctggaatatgcatcaacaaaatgaatataatacttataaccattgagagatggagtgtgagagggaccccaaagatcagaaacaactaactgaagtggtgaagtgtatgtagtgctagaaatctttggaaaagggaatttgtgtattttgcccaaacaacatgcttgacaaatggaattgttgtctttattagaacattgtatattacatgattggagcacagacttgaccactttttgagaagggtggccaagtcgattgtgccaaacatcaaattgtgaaatacaagcagtgttatttgaaacatgaggtctggtgcattgtgtaggtgagaaaacagtggctgtcaatgtttttggtgactgaacttgaggttgagaagggttgctgtaagcaccagtaggacaaacagaaggcagcaagtgcagctgagaggaattaaaggaatacaagccattctggtatgtcccagtcatcaaaacattgtgagaaacctgatccttaacaaggcaaacatcaggatgaaattcaaaaaagacactgttatctctagcaaacttaaaaacacttattagatttttggtgatctcggggacatgaagcatgttatttaaaataagtggagaagcattatgaatattaggtaaaatagcagaatgacctatatgtttgatagacaaacctgtgccatctcctacaaccagctgctcagatccttcatagggagaattagaagccaagttgtgaacatcgggtgtgcaatggttcgttgctcctgaatcgggataccagttggtatcattttgtccagatgtgtgtgccacattagcttgtggagatgaagcatgagggtttgattggaaaccagtaaagcttttatcgaaccggtagaagcaatccaccacagtatgaccaattttgagacacagttgacactgaggtctgttggaggaattgcttgtcttgcctcctctggtgaaacctcctcgagtaacctgagtgtattgaggaaaggagtattgtggtgtaccataaccactgcccctgggattgtaaaactgagcaccatgatgtgatggagagcctcttgcagcagagaactagggagtaaaagatccaaattgcagagggggccgaggagggtaattggttttattgaatcaattctgataagctaggttcacctc

SEQ ID NO: 35706 - DNA, 1059 bp, Cannabis sativa
gaaggtcaatttcggagaagactatctttccctgaagctgatcaaacaaatcattgatcttagggagagggtacttgtccttaattgccaacttgtttagttcctggtaatcaatacacttgcgaaacaatcaatctttcttctaaacgaacaacacaggatccccctagggtgacacgctgggttagcaaaaccctaagttaagcatccgttttgttgtatctttaattccttgagtttagcgggagggattctatatgttgccttagaaattggctctactccaggtgctaagtcaatcacataatctattttttggtgcggtggtatggatgttattccaaaagcacatataaaaattcttgtaccactttaatatcttaaggttaaattgacttcggtcgtgtggtatctaacaccactgctagaaactctatgcatccctcctgcaataagtctcaagccttcaacaccgagattattggaatttgagaaacctaaagtgatcctacaaatataaatcgttcttcaccctcaggttgaaaggtcaccatcttccaattacaatcaatgctagcaacatacttggatgagaaatccattccaagtataatatcgaagtcttctaagcatacctactagatcaacactcaacttcctgctcttaaccctaattggcatagacctaatccaccttttaaagataagtaattctctgctaggcagtagggttcaaaccctgcttcataactatcacatggcctacccaacttatcaattactctatctgccacataagaatgcgtggcttcaaaatcaagcaatatagagtaaaaaagagttattgactgaaagctaatctatcactactgaaggacttgcttcaacatcagcttgggtaagggcaaacaccctagttggagcggtctttgcctctgtctttcactcttctttcttaaattacaagaaatctcttttgtaatgaccagttacaccacacttaaaacatgtgtgacccttacactcacccaagtcatgcttcttacaactagggcattc

SEQ ID NO: 35707 - DNA, 1707 bp, Cannabis sativa
tggtggtccgacgtatgagacgaagatgagagggacacaggaggtggtggtggtccgacgtacgcgacgaagggtagagggagaccgacgagaggatgggtgtgtggagatcgatggacgagagagacaagaagaaagggagatcgagagagggaggaagatggcgagagaggagggcgatgatgcggaggcgtgggtgggggtttttgagagtttaagattttcgttttagggtgtgggaaatggagaaaaaataggtgagaagatataggtggacatgtgggaaatagaaaaaaaaaagtaggtgggcacgtgggaaatgtggcaagaagtaggtgatgattttttaatggacccttataagagacggtttaaaaccgtcgcctatactataggcgacggttttaaacagtcgcctatagtatatgcgacaattttaaaccgtcgcctataagggtccattaaaaaatcgcattttattaaaaaaaacgtcgcctattttgtttactacaattttaaaccgtcgggaatactaaatttttcccaacagttttaaatagttacttaatttttttagcgacggtccccgaaaaaaatcgtttttagggtcgtcgcgaattctgatatttgtagtagtgtttccaactgtaggaaattaagcattccaataatgcccctacaccaacaccaaaaattcaaaagccaaggtcaaaattgaccttccctctcttgtgcggatcaagagagattccctcaaaaccctagcctttaaatgcagtataaaaactcttttattggctgaaaccctagcagccaaatcaatttctattcctctaaacctagcagccgaacaaacccattcagcctctcttcttcttatcttcttcttcctttgactcaaagaaaagcttcagccgaatgtctccttctcttctccctttctttcttgctgcagcagcagctcttcaatggcagaaaacaactgctgcaatttcttcttctcccttcctccttgctgcaatagcagccgaacttctcttcttctccttgctgcaaaactttgcagtcgaacctttctttctccaagctttaaaacctgcagaaaaaccaaagaataacactagaaaagaaagcaaaaataaaaaaaccagcaaagagaaaaaactatagacaccacaacaattgatttcggagttccctctaaattagaaggtacgtctccgtcaagcgaccctcaaagttgcttgaatctccactatgaatgtcaaaaccgagttacaagattatggagattccacgccacaaactagtaggtaatctctaagctttttctctcttttcttcctttatttttttggtttattacaaatgaaactctctaactctctctttgttttgtctcttatttctgaggtgattctctacaagagaatggctgctgcaatctcctttgcttgagccgaaaacacactgaaaaataagggcaggttgagccctattatgttgttgttgttggctgtgatgtgatgtgttgtgttttttttttttttttgagctgagaaacagttagaaaactgttattgtttttccttgtcttgctgaaagatagtcagagtcttgagatattgttatttgcttctttattgtaaagagattaaagatctaagcctatgaaaacagaatcgactactctaagagttataatgg

SEQ ID NO: 35708 - DNA, 1874 bp, Cannabis sativa
aaactcgaagccaaaaaactcgaagccaaaaacctctcttctcgtacagacttgtctcgtacagacttgggggcaaatgttatcccaattttggcactttggcatggcaacacatgatggtgacacgtggagtcgactctgagtatctgctagctaaatatagtccaaaaaggatgcctcatatgcatgctcaaatcaaagcaatcagtaatctgccctgcgcgaccaacacttagcgaattcaggtttcgcattgtgagtcatcagagaaatccatataacttggaaatcagattgtagagatatggcaagatgtccaaatcccaagatcagtgtactctgtatttattatgcagtgattctgcttatatctactataacgtgaagggaaatacttcctctccaagctcatagccctataaatagtgatgcgtgttcactgggcaaagggtcgaaagatttaacttaggagatattatctaagaatttatattcagagatattgttgtaaaagctataagaaaaagaacctttctccttgttcttgagttaatacaaataacgaggattaggctattaccgaactactcgggcttgaacctctataaaattcctgtgtctttatattgctttattatctttcaatcattataaactacttgtcgcttactaaattagactcactatcgttggctaaaagtgaggtcaacaccaagtatacttcttggaagaaaataattattccacctgaagactagacctgggatcgcttggcccaagcacaataccttcaaagcactgcccctcgggaatctagtgaaggaacatcctaaggtaatcggtgtggctggtcacctactgtacttagtgctgagcgtaatacattagttaccttccaagactcccgtcttaatttttctacttggacttccattttccattctcttctcgtggtcgtggacctggaccgcattgctcataagtttgacagttggtaccctagattctatgtccagatcagctgtcacaagtcattttatggtatagccaagcaatacggtaccatggaagatagggcaggtcacatagatgtgagctgggatttagaaccaatcgagccttttgatatattcaaaattacaagttgtagggattttagcgaatcctattgtccttctaccccttcatctagtgatagctcaccttctagtgattttggtaaatcccttaggtggaaatttatactcttcccctttttaatcgacttttataatgattgtaatgcctcgttttgttttctagacatgggttatgaagacatcctagaccgtaaggggaagaaaagatcattcaacccaggagtctccattgccaccgaggtggttcattccaagaagcaaaggaaagccagcgctcaaaagaagaagttaccggctgaacctaatgatttcaaggtttcggacaacgagatccaagagcatgttcgtcctctagtttttcctaacgccaatgcccctcatcccgaggcgacccccgctaccgcttctcctagtcaggccaccgagaccctgtcggtccctgctggagaagctggctctaagtttggccaggcatacggggtcgcttgttggcacaaacttcaaactctccttcccccagattgggattttcttaatcttaggagtccaaaggagatgctttcaaggaccttgaactgtcacttcatggtacgtcggctttgttaatataattatgctatcttcttatacctcttttgtactcatctatttgcaattctccaggcttcctttgcttcttttgcttccaattgactactctctgagtggcttgagtatttagagggcgagactcac

SEQ ID NO: 35709 - DNA, 1189 bp, Cannabis sativa
tggcaagaggacgatagtgacacataagactacatgaatttcagtccctcacatgagcccattaacaaaaattggtaaaactctgaactactgcaaagatacccacctgtgtttgtgacgtgtttgtcctatgccaataatgaagtggacatgtgactcctgaaaatgtcagtccattgtttcgtgtgccttgaccagtgactactcacaagatcaaaagagatttcctctcgtaacaaaatgacaactagcgacaaggaatcattcagacaatagagattcctctggtcctctgaaaatatcatctgtttgtagttattaaaaaaaaaagaatctggaatgccagagattccctacctaaggaatgatgtaatttaagtctttaacgttttctgtcttaaggtttgtaatgttttctatttgttgagggcctatatatatggcctctcatttctgttaaggggatcaagttttcgaataataaaaatcttatctatctttccaaatatgtctttctaaatatcctctttggactatttctctactaggatagattatatataaggatattatcagtagctctaagactaccacccagaagatatataaaagcaaagtctatatagtaggtgtcaatctcaaaagcataacctacaaagactaagagggaaagccaacattagggaaagcttgagtttaattctgactatatggattagcgttatatctctttctactgcatttcagtcatatctactacacactaaatggtaataccaacttatatatatttattattttggtgtgactaaatttatcagaaaaaaaaaaaaaattatcatacattgttcatgtgtgagtgatttgtaagatttatactacacttagtagctaccaaaccttaacgcatgatagagttttggtaattagataaataatacgttggtacttgtacatatatatttggtaaaatttattgtgacaatatatattttacaacaaattgtaacttttataactaatatttttagttatagactaaacgacaataaaaatgtttatttaatcataatcttttcgattcattcataaattttattgtgacttgtgagtaaagtaattttttttttaagttaaactctaggttgagaggtgctatttgatatatgggttagtggtgttgagatgt

SEQ ID NO: 35710 - DNA, 2341 bp, Cannabis sativa
  modified_base (26)..(29): a, c, t, g, unknown or other
  modified_base (1266)..(1278): a, c, t, g, unknown or other
gatcatagaacatgtagaaggtgatnnnncttacacatggaattaaacacaaataaagataatttcacaaatcaagattaaggaatggcaattattcattgactaggcaaaactttaaagaacattcatcatcctccctaaatgggaaatttagctcataataataatataaacatccatgattaattctgaaataaaactagacataaaagataaataagggtaaaagaaagaaactagatggtgatatcactccgggtcttcaagattgcttcctcacctctttcattcacttttcaggcctaactctgcttccctctttctaaaacacgagctccttaaattgaaattagggttgatatttttgaaaaagaaaaactggccaaaaatcacgtattttgcccctggtcgcgactacataaagcctagtcgcgaccatgcaaaagggtcgcgaccatgaaaagtggtggtcgcgactactgaagcaaatttgacagctttagtatctttcagtaaaatgtacataacttttacatacgaactccaaatgagttgtttcaagatgcgttggaaagaagaaaaagaaatctaaaacttctatgttttgactttttccaaaatcggatcaaaacatagttaaatttaagatttaattttcagctttattttcttgcagaattttctctattctatagattgttgttttccgaaatttgatcaatttatacattccaagtgtgaaacctaaaaccaaagaaaaaaagcataattctattccaaaaagaataacaataaaggaaaacaactataaaaagtgacccgaaacgtagggtaaaaatagcctaacaagcacccgaccaagcataaaaccctttctgtgggttagttgcccggtgattcgaagaggggacgtaaccctcatacgtgcctcacttattttgcacaaagggcacacccatctggctactaaggcacttttgcctcctgtggggaactgcctcagtaagctcctcgatcacatagtcttccccttcaaccaagacgtcaccctccgtggatactggttccccagtctcattataccctccaaaatttggaggttcgaccactccctcctcatcaacttcggaaggactatcaggatggacatcatcctgcccttttatcttttggacctcaatgtcccccccgtgatcctcctccatatcaggcagatcctgctcggtacttggcaacgtggcaagctgggccacgtgaggatcagannnnnnnnnnnnntgcatagtctgctttgtgcgggccatcatccttctcttggacggatactgatgtgtgtgtggtgcaacagtaacgatagggacagctattgggatgccgaagttactagaatttgaacggccaacaggaagggtatcagcaacaccgggccagacaatatacgtctagttggacggaagataacgtctccaacccttctttagctcccaaatgaagcggtcatacccttctcatgcgatctgcttggagtaagagtggtgttgcacttcaggttttggagtaggagaacgatcactactcacttcccaatcttcaaagctcgagttagaaagttcgtcacttgaagaggacgaactggcacgaagatgaggttgatcctcatacagaagttgaagcaaatccttgtcaattcggtgttcgcctccccaaaactcactagggttcatctacaaaagacaacacacgagataagtgtttgggcgggatatcaaacaataacagggaaatatgctaatgaggactactcaacagattaaaaggacaaaaaacgtacaaaaattaagtcataaccaaggagttttaaatttttgggttaagggttaaatttcacgagcttcgaatgagcaaggtgaaaatagaacaatgcaagattaaagtcaagatgacaaagccgtacgaactattgtagagaaaactacaaagtttcgagcttagattttctatatatcctctacaacaagtcaacaaccattgcattttctataatggaaacccagaaattaaagatacaaagtaaaagaggaaaagattgaagacttactcactgttcgaagcctaaacgtagtctagacgaagttgctcggatgcctctgctagaaatccaacgacagacttgaagaacgttccttttttgctctgaggttattttgtggagaaaatggtgaaaataaaattttgaaggagttccagccttatttataggaaatttggtgaataaaggtaatacattcatatagaggatcattgatcacattaggattatcacaatggataactaatgatg

SEQ ID NO: 35711 - DNA, 6358 bp, Cannabis sativa
  modified_base (676)..(694): a, c, t, g, unknown or other
  modified_base (6029)..(6031): a, c, t, g, unknown or other
aatgacctaattattcaaaatagaatttaaaaccaaaactcatctaggtgatgatactctataattcttttccaaataaaaaaaataactagtttttaaccatagtttgaatatccttataacctcatatgtagatgtttcacttttgcccctaaagatgaaactttcatcatcacttggcttttatttaggtacaataaattaaatcatttacaaaacaaaccatagtgagaagctcattttcattagatatgcctaatatgacatacttggaacactttaactttattattattattattttaatccctcttgcaaaagttatagataattccatatctaatatattttgtattttctttaatagtgtttcatatgcaacattctgattgttatctttatttttatcctttattgaaacaagatagctaaaaaaacatgcttgtctctttccttttcttaaaaaatttctcatttagtatgagaattaactttatgttagtagatataacatcgtgatttttatctttatttttatcctttattgaaacaagatagctaaagaagcatgcttgtctctttcctattcttaaaaaatttatctcatttagtatgagaattaactttatgttggtaatacttttgataaaacaagctttctctctctctctctctnnnnnnnnnnnnnnnnnnntctctctctctctctctttcatctttttctttctttttctctgtattaagtcttaaccaaattatgaacgaattacgtctttcctggtagagagtgttatgtctcccttgttagagagtgatctgtgattgtgtgtagtgtgtgcgtctgtaagatttggtagagtgagatattgtcattccttttgtcaagatggcctcatctagtacagaggatcccataatgtcactaaaatgggcatatatatgtctagaagacgaagaagaacatgaggttatactcgctgatgattgtgaagatgaggaagaacttcattttgatgatagatggtgtcttgtaggtcgtctactgccagggaaggtttttaattttcagatcttccaaaatataattcctgacttatggaagcctgggaaaggtattttcatcaaaatacttgagcaaaataggtttttatttcaattctatcatgagatagatattcaaagggtaatcgaaggcagcccgtggacctatgatcgcaaacaactccttattgaaaggctcaaaccagtacagaatccaagactgattgccataaacacattagacatgtgggtacaagttcatgagttacggtcaggtttcaaaaccgattgggctatccgagaagcggctcgttatattggccaatatgttgacactgatccgaataatttccaaggagtatggcaggattatctcagggttcgggtaaggattaatgttgctgaaccactaaaaagaaggatgaagtttcgtagtcgaaaaggtgagtcgttttaaatatgaaagggtcccaactttctgctttatatgcggtataatgggccatgctgagaagttctgtgataaaatatatgatatgccaatagagaaaattgtcaagtcatatagtattgagatgaaagcaccaaccagacgccagaattatatgacagtttccccgtggttgtgctttggtacggcagcttcaggctcgacaaagaaatgccatcaggatcttcccatgtaaatgcagcagctaaaaatcaggggaagacaactgctagttatgaccccaatatcagccattcgaattcaagtgctattgaccaatcccgattttatgggatagataataatgctccaaaagatcatgttatttcagtcaatgagaacacagctggctttgcatctgaggatataattgagatttctgatttgaagaggaaaaggcttgaggcaataaaacaaactaggcctgcaattttgataaatgacactatggaaacagaggagggtaagacagtcggccctacttctgtagcaattccaaaaaaatgtggacaaggtgggtcttggtttccaagcccactaatcattatgagtactataagttggaattgccgtggacatgggaacccacgggcccaacaattccttaatgatatttgtgtccaaaagaagcccaaattcttattcttatgtgaaactttgtgtactaaagatgttgttgaaaggctaaaggttcgtttggggtttgaagggtgttattctgttgatgctgttggtagaaaagggggtcttgcacttttatggagagcttcggctgaggctcattttcttaattactctcaacaccatatcagtgtcgaagtcagaatcccaggcatggtaaagtggcggctgactggtttttatggagatcccaatcggagtcttcttcatcaaacttggacgcttcttcgaactatggctactgaatcaagcctcccatggtgtatcattgaagactttaataacatcatgagcaatgaggataaaaaaggaggcagaccctaccctcaatctcttattactgggtttcaagcagcagtatcggcttatcatctcattgaccttgagatgagaggctatccttatacctgggaacgaagtcgtgggacaagtagaagtgttgagattcgcttggacagagccatggtcactcagagctggctcgatatctttaatgaggtatcttttactaacttagctttttcctcttccgatcattctcctattttgcttgaacctgaaagtgtgatgggaggggctgctatggtgttatttcggtatgaaaatgctaggaatagggagcccttatgccgtgaaattgttgttgatgcttggcacttaaactagcagcaaaatatcatggagaaaatagagctttgtggtaaatatttgtctgattggggccgtaaacttacagggaattttaagtctagaatctctaaaagcaaaaaacttcttgcaagacttaaagtttcagacgatgctactgatgctgagaattttgtgcaagagaagatcaactattttgagatcctagctcaacaagaactgtattggaagcaaagatcaaaacagtactggcttcacgcaggtgacaaaaacaataagtatttccatgctaccgctagtgctcagaaaagatcaaatcaaattcagcaacttaaagatgttaatggtgagtagaagaaatggggaactagtcttgaatctaccataaatgattatttctcccagctctttcaaacatcaaacacatttttacagcttattgttaataatattaaagtctctgtaagtgccaatcataatgaagaattgctgaagccgatccttgatgaagaagtcaaatctgctatgttttctatgcacccggataaagcccctgggcctgatggtatgggtccaggattttttcagcatcactgggatgttgttgggactgatgtcactcatctagtgaagacttttttttgactctgcagctttgcctgatggtctaaatgatactcaccttgtgttaatccccaaaaagcaaaactttgcggcgatgactgaccttagaccgatttctctctgtaatgttctttacaagattatttctaaagtgcttgcaaatcgtatgagggaccttattggccaaattattttggatacttaaagtgctttcatcccggggcgtctaatctcagataatgtgatggtagcttttgaggtcatgcattacttaaaacggaagaggaaaggaaagaaagggttcatggcactgaagcttgacatgagcaaagcttatgatcgggttgaatagggctttctaagagtggtaatgcttcgtatgggatttgctagcaaatgggtggacctagttatggcttgtgtatcgacagttcattacaaggttgttcatggtggtcacatcttggatcctatatgtccgtctcgtggcatccgccaaggtgatccgctttcaacttaccttttcattatttggctgaggggttatctgctttaatttacaagtttgaagagaatagactcctccaaggatgtcgcattgctcatcgtgctccctcacttacgcatatgttctttgcggacaatagcttcttgttttgccaagcaacagtaggtgcggctgctagcatctcaaacttattccagctttttgaagagtcatcgggtcaaaaagtgaacttctccaagtcatccatttttttcagccccaacacagatggctctactcgcactcaagtttgttctactcttaatatgaatgaagctcttgaagctagtctctatcttgggctccccaatatcattggccgaaataaaaaaagctatgcttggttttattaaaaataaagtgattgcccgtatcaatagttgggatggaaagttcttgtctcgcgccgggaaagaaattctcctcaaacctgttattcaatcactacccacttatacaatgagtgtgtttcttttaccacttggcacatgtaaagagatagagaagttaatggctagtttttggtggaaatcgaactctagcaagggtcgtggtattatttggatgtcttgggagcgacttgccatttctaaggatgaaggaggtatggggtttagacacttacatgatttcaaccttgctatgcttgcaaaacaaggttggcggcttttatgcaaccctaactctcttgctgccagagtttataaagctaagtatttcccacataccaattttctttcagctgaacttggtaataatccaagctttgtttggcgtagtatttggggggctcaagatgtggtttgtttaggagcttcttggattattggtgatggcactactacaagtatagtgggtttcccttggccgccgaatccccataacagatacataactttaacccatcctagtttgcagaacaatgcagtcagcaccctcatgcaaatcgatcaccgtgagtgggattctgaggttgttttggacttgtttccatctcatgaggcccaggttattctcggtatcccttttaccaacaccacaagatctgatttctggtcttggacagccgaccgtagaggaattttcaccgtccgaagcgcttataatctgctgcaatctaaaaaaccagcagtcccaacaagcaacaactctggtttttggcgaaagttctagcacttaaagatcccacctaaagtgttaaattttctatggcgtgctataactgattcccttccaacatgtgtaaaccttgtaacaaaatacgtgcccatttctgtccaatgtccggtctgcaaagcacatcccgagactgcaatacatgctctcttgcattgttcttttgcaatttcctgctggaattcattcggccttttcatcaatacaactacttcttctactcttggcaactggttcgaaggtttgcagcaaacgggtgacacagatcatatttgtcgagcttctatgctatgttgggccatatggaaatctcgcaacaatacagtttggaacaaaaggaattctactatacgtgatgttttagcctctccttctattactcttgatcactggcaaaaagcttaggataatcttgctctatcatctctatctctcaataatagtgatggtggagccgagctttggactaaacctgctgaaaaactacatcaagattaacatagatgttgtgctttttcagcatgaaaattcctatggttttggaattgtagcgagaaacgatttaggaaagcttattgaagctaaaacttgttacaaagccagtacctattctgttaagagcaaaaattggcaaaaagttgagatagacaccgatagtcttcttgctgttcaggctatccgaagtgatcataatatgtcctctacctttggtttaatcaccaaagactgtcttgagttattgttgtctctaactgatgttaagttacgtttggttaaacgatcagcaaatcaggttgctcatgctgttgctaggcatgctcnnntttcctctggttgtagcatttttgagtataatgtctggcctgacttgaaggctctcttgtattcagaatgcttttaattcaatgaagttgatatttcattttcaaaacaaaaaaaaacactttatgttggtagatataactaaaacatgagctaaaagtagaacaaaataaacaaggttcacaaaggaatattcatataacacaataataagttcaagtaatagcaatcttatctcaagataccaaacacaccattaatatcaagtctttggacagtaatattaactgtaagcggtactcttattgtagcaatcaaatattgacaat

SEQ ID NO: 35712 - DNA, 3382 bp, Cannabis sativa
gtgcccataaatttttctagcggtcaaaaatgatctcgaactattcacagtgttgtaaagtgatatttttgttaagttttcttgcacgtgtcaaacagaataatgatgtgattgtttagacaattatcatattagcaccacgtgtacattaaaaaattattcaactaaaatttaattaatgattaaaaaattacgtaaaactaaattaaaaaaataaattattttttctaaattaatattacacatgtggcgttaacgtggtactaatgtgacaatggtctaaacaactatgtcatcattctattatttacgtgtgacaaaatttgaaagaatgactaatttacaacactgtgaatagttcaatgatcatttttattaggctaaaaacttaatagggcacataatatataagtcatagttcgagggatgaaatttctaaataatcttactaatttataaaactactattttatctttataactatattttctaataatatttgttgagggtattattataatttacaagaattaaagatagagagtttcaatccttccattaataaaaaaatttaaattagtgacacgagtaataatttattatcctttcacctcttatttctctccttcaattcttcctaccaaacaaaggaatttgtcatttccttccatttctctcttttccatagtgttaaattttatatacacatgattaaggataaaattaaaaaatggtaatcttgtttttcacttaatctaatcaagtaatattagagatgtctctttacaatttttgtttttatttaaaatatcataatatatattttaatcatttagtgacacactaacacctcattaatgatgacagtaaatatgtgatgtggaaaaaatgaaaaaagacagaaagaaaagaaacacatcaatttttatataatttttgagtttggaattttttgattaaattcactatagagtattattttaataaatctctcttatacaatacatacattcatcttcatccattagtattttttcttatataatattcattagagatgttccttgcagaattaaaatacttaaaattgtcttaaaagattatgattttatgtataataataatttcatgtggggacaaaaatgacagagaaagtgacctatagtttgtccgtacatattatgtataataatactagtacttaccaaagtggtagggtatgctactattctaattttagaatgccatttttatataaaaaattagaatagtaccatttctaaagattattatttttatttactttttgaaatcaagagattattactattactatattattgtatgatcatcaaaagcttatattatattgtattcatttcattgtaaaaggtgaaaatgtcctcgctcatattgtaaaaactatacaactttaccattagatatacacagggccgatctttttttgaatggaaatttaacttaattagataaccatatcagttaccaaaacaggtaacaaaacagttggaacagtgtccatactgaaattacaatcagggaaggatatagaggctcgagcgaactcatgagccaccatatttgctgatcgacgaataaaataaatagaaatattttttaaaacattaagcaaagccttacactcattaaccacttgaccaaacgtggaaatcataacaattgaactacttaaggcttgaacaactgataaacagtccgtctcgagcaccacttgctgcagtccgctgtctttaatccagcttaatgcctccctaattcctacagcctctgccagttctggtgtagtttgaacattgaataaccttgtatggtagcccccgatgatctcttgctacccgaccaactccaaactgttgagaaccttcaaagatcgctgcgtcaacgttaacctttacattattttcgattggaggcactcaatgctcggctccttcaccttggtttaaaccagcagccaggagctcaaaaccaaaagagtgagcatgtttccattgtgaaaggtaaccttttgctgacgtaacaatgttttcgggagacttgattttattttgccaaacacggtcatttcgtgcattccaaattgcccaagcaacagccaccagcagctcccgatcctctttctccatccgctgaaaattacttatacaccagtccagaaaacagtgttgctgctgcatagttgatgggataccagctctgtcccaacagtccttagcaatcgggcagcagactaaagcatgagaaatggactcttcttcgatggaacacacggggcattgtgaatggggtactgcatgtttgatcctaagttgaaccattgtgggaaggcaatttgtacaagccttccacactaaatttttcatcttcggaggcactttgagatttcagaattttttccaaaaaaggttcacttgtgattcctcaaaattcaccagccctttcagttcttggaggcgtttataggcactcttaacagtatataaacccgacagctctcctatccaggttaaatggtcttcagtggtagttaaattaagaggaatttgcacaattagctccctatctcgagactcaaacaagtcattcaacacttccatatcccaactaagcccctcaatggtcaagagattggccactttagcattatgaagccccagatgtgaggaaataacccaaggattaactttatccggtaaccaaggatctcctaaaacatcaatgttcttaccatctccgaccacccatcttactccattagcaaccaggtattgtgcctcaagtatgcttctccacacaaaactaggattagagccaatttcagccgtaagaaatgtaccattagaaaaataccgagctttgaagatacgagctaccaaagaattgggtttggttagtaagcgccaaccttgtttccctaacattgccaattatagtcacgaaggttcctgaaccccatacctccatcagttttgtgatgacagagtctctcccaggacatccaatgaataccagagttactactagccgaggttctccaccaatattttgacataaggctttccatatctctaacaacctccataggaagtaagaagacattcatggcgtaactagggagtgattgggcaacagactttataaggatctcctttcccgctcttgaaataaattttgatccccatccttccaaccgtttcctcactttttctttcaaaaaacccaacgctgaaaccttgttgcgactcatagaacttggtagccccaaataaagactaccctccaaggccggagccattcccaacactatacaaaggcggtttctcaaagaatcatgagtat

SEQ ID NO: 35713 - DNA, 1487 bp, Cannabis sativa
  modified_base (1443)..(1444): a, c, t, g, unknown or other
aaattttgttatatatgttagtgcttttcaattcgaactactcaagcaagcaacaactactctcatcaattggaaaatatttgcttctgatcacacattgttttaaaggggaaaaaaaagagtttccaaacgtcaccaaataacacgcttatttacattcatcgaataagtacttttgcatcagttaaattttaagattattttccatttgaattttgaaaaagttcaaaataatacgtgtagaaaatgactacttttgggagcattgtatgactatgtgcttaagaaaatactatagagacttaaaagcaattaatagttagttaataacaattactaatattgtacattggatctgaaaggaattctggaaaaatatgctattgagaaccaaaaaaaaaaaagaaaagtaaatctgttttaaatttggtcttattgttaattaggggataaatctttcaatttatacgtacaaaaattttgttaaattttaagtaatatatataatataactattttagaatacttttgctcgatatactatatatgtatttactattgccaatttctatttttgtccaatacaataggaatatatatacaggaattgagcatttttatacttacctaattggagaagatgagtcattaacgtacagatttgttgtgtgtttgggagaacttaatatgtagtcagaacaagtgaagtaatgtctaattctatacattagtttcacatgaactttatcactaattggcaaggaaaactcaaaattaattgcctaatttgtttgtctaaattgtattagaaaatataattactatctttatactaaacttctaatttagaatgaataaatttttttttctttaaattcaaaattcaaatcaacttcaatatattgatctaaaattttcaattcgatgaatatattaatttaaattttaactatagcacacaaatataacgtgcattgcacgtagattctacctagtaaatataaatatctttatgaggaaaattgtaaagaatagagtataacctagtcatgtagtaatttggactaaatttcatacctgaacatatacatatatatacacaatgatttttaccttaaaataacatgcttaaaataacatcctaaataggagaatggaaatgcatttagttatatgagcagaaatggaatggtaaataacttgtgttaatttaggtaaataatatgcttaagataaggtaacaacattccttaaataagataaacaatgattactaccttaaaataaggtcaacggcatgccttattagataaacaatgtgcctaaagtacggtaaacgacatgcgttatttagacacgttgtttgcctaaattaaggcatgttgtttgccttttctttttaaggaattgtgtttacctaaaaagtcatccaattaggtaagnnacgtgccttaaaataaagtaaaaaaaaacatgtttctttaggt

SEQ ID NO: 35714 - DNA, 1451 bp, Cannabis sativa
aataatccaaaacaaaaaaattatgagattgtttgactttacagtttaaaaactattttttatttttaaaactgtttttaaaaactattaggaatcgtttggcaaaaatttttaaaaactattttttaaaaattgagttttaaaaaactagaaaacagaaaacatcaaaatattgttttcaatttttaaaaacaattttctttgtctaacatattatattttatattttgctcacatactcggatcctagacccgaaaccatacccaaatctagacccgaatgggttaatgtcatggtatggtgctaaaatattgatttttttcgtaagaaaaaatctaaaaaatgttttctattctcacctttaaaaacacaattttaaaaattagaaaactgaaaacacagcaaaacaaactcactctgtatgtctgattctaactataaacatttatttgatttataataacatagtttattctaaataaaaaactttatacaatatttacaaaaacaaattcaaaacgaaacaaagagaaagagacatccgagtcacctctaactggctcaccacaaaaaattcaaagcgtaatacccctttttccttcaaccaccccgagtcatcttccattgcgcacatgagagagcattgaaggtggtggtctcactctcagtctctgtagattgggctttttcgactccggttgagagcaaagcgtggctccaaggaaaatcttgtgatgggaaagagggtctgatccaatggtgagcaacatacaatgcatatctgggtttgattctgcattgaagatcgttggagagaaaggtagttgcagaggaagagagagagtgcggaagacaatttagtctctattggaccagtcactgtcggaaaaggaaggagatctgagcttgaaggagatttgagctgctcagatcagggaaggaagaagaagacttagggagagagagtgagaaagaaagatcaatgagagagtgagagagcgtgagagagagagtcgagagaaaataaatatttaagaaaaaaattatttatttatttatttattaataattttataaatttaaattattctttttaattttaaaatatttctcaaaagattttttttataatttttaaatagttatattagctggactaatataaatgtgttacgtgtacatgatggtacacgtatgtattctatgtcaactaataacttagataaatggatggcgacttaaatttgctaatgatttagccgtttgaagaattttaccattaaaatttgagatttaagagttaagtgcaagtgaaataattgttgggagggttttaactgtaaattactcctaaaaataatatatatatatgggtatgctcttaatgggtattacctatgggtattttattcttgaccattgaatcaaatatctaatggttgatatttat

SEQ ID NO: 35715 - DNA, 1237 bp, Cannabis sativa
ttcccattattgatgctctagagactagagactgaattatccaaaactaaatcacttcaggaggctagctcaaatggtcataaataggtgtgtgtcggaagtttttttttaaggggactcgaacctaggacctccaacacacccacctatctatgtcacttgagctagtctcaagtggttgttccaaataaaatataattgtaatatataaacgcttaaataaaaaacaaataataattgtccaaaactagtacaccaaaccacccacctaataattgtattaccgatgtgatggcatttactacaataaagacaaattttaaaagggtgccttagatataatgattgaaactggaaatggacaataagagcacattcatatattatttaatttaaattaagaataataaaaaaattataaaaatataattttatagatttttaaataattttatgatttttttttattttatttacgaaaaatataatttttttaatattgtactcttattgatttattgttattttttgttatttatatgttatgttttagtgttatttagatattattttaatgtaatttttttattactttcatattaattttattaaaagcggtaaaaatatataaaaaaaaaaatctttaatataaaaatctatattttttttcttataaaaagcagtactttatgtaattattttttaaaattaatcgttgtcaaaaggcttggttaatcacatattgtttacatattttaaggacaataccatattatcctttgagagttgaaaattgagtgtacttttgtttgtttttcagatattgatgagtgcaaattatatccaaatttctgccaaaatgggacatgtataaacacagttgggagttttgagtgctcatgtccaacagggacaacgtacacgaaaattaacggaacgaccatgtccatgtgcactcaattatctatgattacagatgattctgattcaagaaaacgcataattatctactctgttttgggtaagtattattcaaacattctactactcattcagcattcaagaaacttattattttttcaaatcaatccgcacatgtaattttttcaatttcacaaaccgcacccgcactgtgaaactagaaaaccgcaaaaaccgcacggcaaaaaatagtgcagtgcggtgcggtttttgcagtttctgcagtttggactattaccaaataatcaaactatca

SEQ ID NO: 35716 - DNA, 1356 bp, Cannabis sativa
aaataaaattaaagatatttttttttgctacactcaacacatctgtacttcattccacactctgttatgtaattcttctttctctgagaggaagtcactttatccttcattctttgcagttctaaattaatatactgtatatgtatcaattaatcgaagtggaatcataaaaaaaaattacaaaagtttaaaaattattaattgttattggttattaatcttgaatatatattattgaaaggtttgaaagttactaattgttatcggttattgatcttcaatacgtgttattaaaaaaatttgaaagttaaaaattgttattggttattgatcttgaatatgtattattaaaaatttaaaagttattataattgttattggttatggatcttgaacatgtgttcttgataaacttagcaatcaatgttattgattattattaattattgattttaactatgtatcgttaacaaagttagtacatcatttactagttattgatctctaatatgtgttactgataaaaatatacatatatgaagttgttagtttgttttcaagttgtgtctaaaacatacagatgaaattgggatttagatatgatttataaagcatgaattctcatattctagtatttcgcattattctcaaactttatgattaattatttaaaaatatattttaaaatgggtgaaagtttaaattttataaaataatagttttattataaatattataattaaatagcttaactgttaaaaaaattataatagagacttaaatataaaaataaaattattaatattaattgttaaaaagagtcttattaaatatttaaattaaaaattaattattttaaaaaataatcaattatagttaatgtaattcttaaaaaaaaatattacattatcataacctactattattaattaataaaaatataatcaccataattataatataaatataacaattaagtaatcaaccttcaatataaatatttatatctttcatgatacatatatcatatatgtatccttttgtttttaaggccacccaatttgacaggaaaatgagttgctcaataaaattataagctagtaataattagtcatatgcatatcacatcatgtttatcaaatttatagttggtgccatagttgtcaactctattattgctctttatgcatactattagctatactagtaagttgtttagtatataaattatatattatattaattaaatttatttttaaatattttactgattttatgagtatttttcacaaaacttaagacctaattaattaaattaatatttttttttcaaaaatataatgtatatgtatttat

SEQ ID NO: 35717 - DNA, 1808 bp, Cannabis sativa
tttgagaagagggtagtactatactactaatataaaactcgaaaaattcaaattaattgcaactttggtacgggtcccaaggggtacacagttttgtgcgcatgggtgatgactcacacactgaaccactacacgcatgccaccaagctaagtgagtgtggtgtcaccttattacattttcttgttcctattttcagcactgttcccacgatcccattcttcccgttactaccttaattatgtgcatttcatatataatgcatcagaatcaatgggagaaagacatctttttcttataggaaaatataatatatagttatatatgattatattacaatatgtattctaagcagtagtggttaattgagggtagtattttgatggttctttatcgtacaatagagctctgatacatacagtggttcgactggactgttttatcctgagacgacaagcctgatagtctacttgcacaattctgagcagtgcgaagaacgctttaaagagagcgacttagtccgcgactcaacccaaattttattctttaaattcattcctttttattattttattttctgccgcaactatttcaacaaattatggtaatatgatcaaggcttcaattcgttccatcaaatcgaagccttgatgtgatgcccattatggtttctgttggcctgcattctataggtttttaagatcaagtaaggtttctaagaacaatgcaactgttttgagtttttttttttctgtattaattaattattaataatatttcgtgtttgtttgtgattgtaaattattgattattagaggcggcttttgatgtattttattacaagctttgcttgatgcatggcaattgctttgtgtgttaattatctgattattatttatatttgtgattgtaaattattgtttatgagggacgtgtttggaagtgttaattttcttggttcaaatatgaatcaccattaggaatattacatctaaagaattttggtcaaacccaattaaataatgtgtgtaggatttgaatttattataaaaatgtccaaaagcagagtttggatcctgatttctgagaatcaagaacatgtgttactagtttaaatgttaagatatataatatgataatataggtaataacttataagatgataagatggtaacatgatacacatcataattaacgatcatcaaatttagtaatttagacattcaagtcaacaccatgaaaagagttccaacaacttgtttctctcttctttttgttcttatttttgtgcttattccatttaagattacttgctcaccaagaattgtacgcctcgatacttaggcgcgctatcgtgattttccaattaacataccacatttgctaatgaaatgattttctttgaaaatcgtgctaaattaattaaatttttgatttaaactattaaactttataaacatatatatttatataaactaggatctcatgtttaaacttttacaatctatatcaaaatacttttacaaacatgacgcacatcgactacgaaatatagcccaagtcgttctgagaccgaacactttaggtcgcgccgtcttgacatgtacaatgatcccccaatctcgaatcgcactcatgttcagcattcaccttttctttacttacacacagaaataatatctgtgagtcgacagactcagtaagaaaagcacataacatacaatataatactgatttatatctaggcgctcatacacctatccacgagctaggcttattaaataaataagaacgttctttactaaggtac

SEQ ID NO: 35718 - DNA, 2562 bp, Cannabis sativa
  modified_base (2067)..(2068): a, c, t, g, unknown or other
aaatcttcttacctgtggtaaaatacaagacgataagattgatgctgtccttggcaacatatttggagtttgaagttgaacagcttgatgtcaagactgcttttctgaatgggttcctggatgaagagatctatatgaagcaaccacctgggtttcaagtggaagggaaagaagtcaaattagtgtacaaacttaatagatctttacatggtttgaaacagtccccaaggcaatggaataagatattcgatacatacatgcattagatcagtttcaaacgacccgcatacgatcactgcttatatttcaagaatctggagtaatctacagtcgtgttcttattactctgtgtggatgatatgctcatcatgagcaaagataaattagtgatcagaagtatcaaagccaagatcatgagggaatttgagatgaaagagcttgggccagttcaaaagatacttggtatcgaagtctcacaaaaccagaaggaagggactattaacttaaagcaatccgggtacatgaagaaaattgttcaaaaattcaagatggaagatgcaaatagtacatccattccgttagggggtcagtttgttttgtaaaaggaacaatgtcctaacagtacaaaagagaaagaagaaataaaggatgtaacctatgctatggtcttgggatatttaatgtacgtgatcgtgagcatgagaccagacattgttcacgctttaagcatcctaagtaggttcatgtccaattcgggcatggaacattggaaagcccttaaatggttattgagatatttgaagggcacttgagattatggtatgacctatgacaaaggagaaggagatatgaagttaaaagggttcatggacgcagactatgcctcgaatagagatacaagaaaatcaaccacttcttatgtttccttgacaaaccggaactgtatatgctggaaggcttgcttacagcctgtggttgctctttccatcacggaagcaaaatttatggtgactacggaagcattcaaggaagctttatggtttcagggagttctttatgagttgaaacaaatcaaaaagggagtgaatatgtattcggatagctagtcatccatccatctttgtaagaatctagtttatcatgaaaagagcaaacatatatataagactctactggattagtgagaagatagaagaagggctggttaatttaaagaaggtcagtactgaagataatcctgctaatgttgggactaaggtcttaaccttaaacaagtctaagcattgcttgaacttgatcaatctcagaaagtatactgagattcttggaataccaatcaatgatggttgctttctttcttcatcgtcgtcattcttttaatttgaagtaactaggtggaatttgtggtatagttcctccaaatgtaaaagtctccacttttgtcagtttacttgcggtctcgaaatgagtctcgtggaatggaatgatagtcgtgtccagaaaagagttccgttcccttcccaaatgtctatcatgtccactccgagtccaatcttcaggataactagctctttcctggaaaggagttacagctggctagttatccctcctgcattgatagttccgaatagtcgactttagtagacttatatcctatcaagaagtgtcttgaactagggtccgtgatcctcgagctcggaagctcattcatgttcctggaggccctggtgctcatgttgatgtggagacttcgctaaatgaggagttggttaagttagttaatttctaactaacttaacaacctcatttattgcagccactaactttaggatcttgatcctaaggctatatataccaccttggtttgtcttttcagaaagatatagaacacgagaaattagactctgtccagacgagattgagagtttgaaagagagagaaaaaaagattgggaggtagagagagaggtaccgagtaaagagagagatagggtttaggttttgtaagaagattctactgtagatgaagaagattcttaggtgtaaagtgtgagagttgaaacacttnntgaggactcaacaaagaatctcgtctcgtctgttttgtatctattcttgctcaatcaataaagaagtataacagtagtgttccaaaattggagtagaaccataaatcacatcgatctattagacttgaaccaacatatatcttagtgttgatttctttattttatgcagttattgttttctagtttagatactctattttttccatgttttttgtcgattattatttttgacttgataattttgtcattattaattatttgatggtttaaagtttaattaatttgattgtaattcacacaattaacaaatataaatatcaaccattatagtccaactacaatgagcaatgaccaatactatataatttgaagaaagaaaaatgattaattttttttttcaaagaacttatctacagcatcactttttcttgtatattataccagcaacactttagtcttcagagaacattatatggtgtgacaattaattgtct

SEQ ID NO: 35719 - DNA, 3553 bp, Cannabis sativa
tgttctcaattgaattctgaagattttaggagggtttgatgttgagctaagctatgaagttttgctcttttcttcttagggttttcctagcttaaagttgattatatgcataatattggggattgtgtggctgtttgctttcgggttgtttgaatctattttctgatgttagatggagaattttcttgcagaattaagcttagtgaagtgattgttttaaggtttgagttaaggtagagcttatgagcttaagttggagctttaatggtgttttcatttgtagaatggctggctgagttttattgcttgttttgggcttactggggagtgtaaataggtgtactggaagtaattgggaagtttggatttgaattgagttgtgaggagaaatttttgggttcccagcacagaaccggtcgaccggttttggggaaccatttgaactggtcgaccggttggtacccaggaacctggcttctggttgggaaccggtctgccggttggaccattttccagaaccctagttttccccctttttgtgttgtttagggtattagcatcctatttatcgatagggttatccttaatttcaattttaaatccccgataagtgttttagcgtgtctctcatcgaattttgaatattatggtttagggccctgtaaagcgtcgagttgcgtttccactcaggctaaccggtacactcgagcacggaacgaggtaagatagcataaatattacatatatgtgaatggatgctcgttgtggatgtttgcactactaacactaatatgtttgtgattttaagggtgttagtatggtgtacgatatcagtgtggttacggtgttaccaacacgagtaccagggggtacgtcgtgcatgtggtacaacacttagtgactcccaggagtacaataatggctctaccaacacgagtacaaggttggtattttagtgcatttggtacaatggtcgtacttcccttaagaacgtgcttaaccatttggtgagctcagttgttgagctcagggtggcttaagcataaagccgatctagcattgcctatatatgtattgcatatcttactgagtctattgactcatcagtttgataccttgtttcggtaaaggaaaagctaagctagagaaacagtgagctggagctcggcagtgattgtacataccgcggcagtgcaacctggagggtttcggtctttcaatattttgagttgctttttgttaatgcacgtcgtttgtaaaaaagaaaaaggttaatggattttgtaatagtaaatgtaatttttaactatgttttataactcgggatcctgacctatatggttaaataattacagtataatataattagcttttttttagtttagtaaattttcaaatgtgggcgttacagatccgatccggttaactgatctatcgggacggggcggatcattacatgattcgaatcaggtaagatcataggcggattagatccgacccgctccattgacactcctactaattaatttccaaagttggtgttagccaaatttaggaaaaagttgaaatttttgcttaaattcttaaaaaaatatatttttgtaattttaacacacacattttggatcatagcttttcaaaaaagtacttctagctctcttaaaagctatcccaaacacacctagaaactcaagaattgaaccgaaaatcatacacatcacactaaaaacaatcacataaaattgttctatagccttaaaattgtttgtaaataacctaccaaattaaaaactcaaaaaataaaaataagaccttaccttacttgtcgccgactttggaggtgacagtggaggcgagcgggtgacttcacgtggcggtgtaaatgaggaaaaatcttagtatgtgtggactgtcatggaatcgacggtgactggtccgcaaatggggtttggggtttgggtcacgtggtgaaggggttttgttggtcaggaatggggaatggggcttcgagtgcgagagaaggagagaatcagaggggcggcgagtttcgtgaactgcaatggtggtggcgactacaagttttgtggtggtgtctctctggttgggggagcttcaagtgcgagagaatgagagagggtttaagagaaaaagaaagatagagaaatggaggatgtttcaaatgtcaggggtaattttggaacaaattagaatactaacataaattttaatgtttattatgagggaattattttgtagggtcacattttttgtttttttttttatttaagcgtttatatattacaaccatgttttacttgggactagaactcaggacttccaacacacacacacctacctatagccacttgagctagcctcaagtggttgttgggtcacatttaaacataaaaacttaaattttcgttggtatcttttgtaacaatagtataattatattgatatgtgttattatcattgaccctaattattaatttactctagttgtacgtaaataataaaatccctaaaatatattatagtgattgattagtttaaaggagtttctttttcataaatatgagaaaaaataataaaatgtacttttatgtaacataattaaataatgtaaaaaaatatggaaataaaaataaacacagattataatataaggaaccaaataatagaccataaataaagttggtaaaaattttaataggaaatatcgtcagaaaagttactggagcagacactagtgtcggaaaagtcattgtcaccagaaaagttgacggacaaatcatagtcatcgaaaaagtcaccaaaaaatttattagagttgtcactgtcgtcgaaaatgtcatcgaagtttctatcgtcaccagagttagatgtctcatatataaactaaaatagaattggttgcacaataaaatgagtaaaaacaaataatatataataacttaaaaattaattataattaaaaaatagagaggatatgagttcctgaaagactgaaatataaattaaaaacagcacttgtttcacaacaaagtgagtaaaatcaaataacacataataccacataaacaagttatataagataaggtgggaattaattccaaaaaattgagacataaatataagagtaatttgtggcgaaaatacgtaagtgtaactttgagttgcagttaaatacccgtctttgtttttgcggtaaaaataccttctgttagggttttggaacttccgtaaatacctagccgttaaatgtcaagtcagtattcacgtgtcacttagtcattggtccatgtcattaaatttgtatttattatttaaataattatacaaatatttaaaaataatttttaaattataagaaaataataaaaaatatatatatataattattttttttttatttttttaccttgatttcttttcattttttttttctttgaattgaaaaacaaactaaaactcaagaattgaaactagggctgaacattttgagcgggtttgacctgaacccgagcaacccgcccgaacccgaactggt

SEQ ID NO: 35720 - DNA, 1715 bp, Cannabis sativa
  modified_base (827)..(832): a, c, t, g, unknown or other
aaatcagattacattgaaatggattttatttaggggataaaatctcaacaaacacatgatcatatatatgctacatatatatatattactatcatataaaatagtaaatcacataatacaccaccatgctcacttatgaataactttcacacaaaatctcttctccttgtattctcaaaatcttgatttatctcatcttccattgaaaaaagataagcttttgattgttagagattttactacaatggaagataaatcaagatatatacaattcaattgtaaaaataatacaaagacaataaaagggattgattcaatagattttacaaaacacactatatatgtctatatatagaagagatgagtagattacaacacatgtaatataatacatatatatagcaagagaagaatatatatataactcactcacaacattaagtgtagattagtggggatcaccatgacttgaataaagtattacacatttgtctaaaaacttatttatccttatctttaagcactataaggtaactttcatgaaaatacttttgggaattatcaagctttagggttttctaacaaagtgctttgttgagagaaacttggttcatcccaaatgagcaccaaagacttatttttatagtgtttaggtgatcacacttagagttcaaacacgccttctcatttttctcataaaaatgagtattaatatattttgtaataactatatttcataacatttgaatcctatcatcaattttgtataacatctcttttactatacaaaaatatgatcaaccaaacagtgacggacccagaatttnnnnnntgtgggggcttatttatcattaaaaaatatctatacatacattaatcacttttactagatttatttaattttatgggggcttttctattattttggtctataattatcaaattaaaaaaaattacatttaatttttcaaaagacaatatttttgttagtgagggctatatccctgcaaccaaatgaagttacaaaaaaaaaaaaaaaaaagtcttgtaactcccctctatgttacaaagtgtaggttaaataaattatatgttacacaacttatttactaaacacttaatgtatattatttgcatgagaatatatattaccacattttaatctacatattatattattaaataatataacaacagtaaatagtaaaagtagttctatcaattatcaaacaataaagagtattgctattcggtattttatggtacccaatatacaaatgtgatgcattaagtgggtaacaatttcttatataatttattaaatcaaaatatgtgagacccgatattgaattgcaccaataacagtatgccacatcttgtgatgcttagtatcttaaggtgctccttaatatttctcaaaaacaaataaataaattagtgtgaaaaatagataactaagtaaaaatacaattttctttactaatttaaaagattatttttaatggatcatatacaataataaaattatatggtcggttactaattttactaatttttttatggagatatacaaccataggatataaaaataatttccatcaaactaaaggttcaaaaaccattgaggtttgacatctctcaaaaaagacatgagattttacataattagcctttaattaatatgtatgaaataaatttgtttttatttttgtgag

SEQ ID NO: 35721 - DNA, 1763 bp, Cannabis sativa
tttttttactttgatgttacccaagtcccaatatttgtcatattctatattattgactcataatttggtcaattgacagcagagctttattaattgttgataatcaccacgtataaataataacaataaaagtaacacatgaatttatagtggttcgacccccttgattaccacaacttactccccttttagatgtatttatttttgagataataccacacagattacaggcttgaaccttgaaatatattttaacaggacttaaatttactaacaagtatgtttttaacatcttaaatatgaatgtctaaaacaatgaaacttaaatacatataaagtaccagaaaccttacattggtttcaacagaattaaatgactccttcattcttaaatcgtgatcagaaaacaacacaattatgctaatttatgtttcttactatttcacattattttttaaaaattagtcttttacatcttatttttgataatatttcaaaagcttccccaataattatactatttattgtacattttttttttactaattagtgtggaaattattatttttaatgtaataactctaataattaaatacatataaaaaatctcacattttatattgtttatattaataatcaataataattaatttattacataattgtgcttattgtcaataactaatttaagattactttttaaataaataaaaaaaaaagattaaaatgaaaagaaaagttatacactaatttagtgtagatttaaaattcaacattattatagcatcttcggtgtacaccattctactaaaatggtgtgcatcgttgttaatagtgttgaaatttgaatccacactaaagtaatgcataatttgttcttttcatctaactttttatttttttataatttgttctaaaataaggctaattaggatttttattcttgaatttcaatatgacctaaattatgtctctcgaactttttagattattataaatttccccgaactattgagattgttgaattttaaaacttttatctaattttactaatgaaagcttggagtagatgaaagtttaataggcacgatttagtacatatcaaagttcgggagcacgattttgaagatatcaaagttccggaggcatgatttagtacatgaacaatcgacatgttagtaaaagtgaatggaattggataaaaatatttgaatttaacaatctcaatagtttgagagaaatttgtaactatttaaaaagttcaagacataatttaatacatgtgaaaattttaagggtgaaatcgtaatgaactttaaaataatgataaattaattgttgacaatataataattatgtcataaattaattatattggctattaatataaataataaaaaatgtgagatttttttaagcaaaatctttttattaagttcatttaagttattttactaaaagtagtagattagattctatattaaattggtaaaaaataaatactaaaagggtacaattattagagataatttgtaatatttgatgcacactaatttaatatatgtttgccattcaaaaaaaaaaaaaaatttaatatatgtttggattgaagtggagatgatctaacactccaatatttggttgaaattttaagactaactgattgaaattttaataaagattaatttacaaaaatgtatgaaatgaggcaaaaatgtaaaataaagttctaaaaatattaaattacaggaaaattttataat

SEQ ID NO: 35722 - DNA, 1013 bp, Cannabis sativa
aaaagtagtatagtgatgattatgataagaatatgtgtatggtatatgcatattgatattgatatttgtctgacttctaaatgcttggaagatgcggacaaaatgtgtgatacgttatgcagtaagtgtaagggcaatcggtctgattagtgagctgtctaggctcggggcaaacggtaaggaagagaatcctttattgctgcaacggtaggaacatgtaaattctgccatgcaagatatgattagataacaaggggaaacaaattcgagatctgagagaacaacaagctcatcttatgtcttttcctgtaccaccgacacttcctggtgtaccactggatgtggtgaaacttatggaactaacttacgagcagattaggaagcaataactaaataaaccaccaattatggacagagtaaaaagttccagcgtaaccaggatagcggtcaaggtgagaacaagaaatggtgaccttatcttgagtgttcaagatgtaaaagatgccatttaggccgatgtagagccagattttgtttttattgtggagtagtggttcacctaaaaagagcctgcccacaattaacaaagaatgatgttaaaggagaagagtgtatggttcctgtacaagtgtcgttatgactcaagaggactcaagtatcgttccttcgaccgactcgggttagaattttatgggcaatattataattgctgtttcaattgatatcaatattaaacattgtacactcaatgaggggacatcaaaagatctgaatggactgtgcatgtatgttagttagtggtaactcatctgacaaggtagacaaattagggaaatgataatatgagttaaatttgttggtatacctaagtagaatataggacatgagtagccaatggaggcaaccatttaatttattcaaagaaaagaatattttctttagaagtgatctagtattagtaaaggtggtacaatttatgagtatttcctggaatcttaagtgaattaaaggca

SEQ ID NO: 35723 - DNA, 1466 bp, Cannabis sativa
aaaatgataattgaaaaggaggacagggtaagtgttactcttttaatttaatttaatttgatgacaaccaaggctgagaactcaccaaccgattcagctgacctccttttatccctactcataatcatcagtcccatccacacacccaccactcatcatctcagcctctcatcaggtacgtacttggtcggtttgaccatataatatatatatgagaattgagaatcatgtgttgatttctaaattactattctatacaagacaagccagcccaggtttcttaatttaacatagtttaagaattaatttatgtagttaatgataaataagaaacacgaaccatgttgatgataaatcatgctgatctctggtcagtgctagctttttctgtacagtagtactcatctcttgaagcgtcttcattttgtgacaaataggctatgtattattagatattgtggccctatagcttttgatttaacattacattatatatgttcttgttcatacgaatacgatcacacacacatatatccaagtgagtaatagccaatattgattctatccactagttaacgggtcgcattcccttgtccattcatattccaaatccgaccatttcctatgaatatatatcttcttcatcaatgccaaacctttgtttttttgtcttcattattattattaaagcattgttattaggtacatgcgcacctagccatctccttcgcgtttcacgattggttagcaatattttttaaaagttattttttaaaaaaattatataacatctgatgcttaattatactaataacggtataacaccgaagagagtaaaacactagtggtatcttttagcaattctcttattattattattattattattattatgtaggagacaggtgtcaaaaatgaaaaccctccatctcataaaaattcaaaaccctaaaaaactgcaatcttattttgtttctgtggggttttaattctctttccatttccagttgtaatattcatttgatttgtttttggatattatgatacataatctcaatcagtttgaatggtcaaatttttctttgtgaggaatcttggctgtacaagatgtgggaggccaatcagttaattgtgcagtatatatattaattgaatctatttgatgaatacacacatatatattttaaaaaacggatcagttgcagtatgtgttgttgaagcattagctatatcatgcgtttatatgggccatatattatatatgcatatatataatttttcttgtctccactctaatgttttttcttttcatgatctgtatctataagacattgtactcattaattattattgatgggattaggtgtgttcgttggatcgcatccaatgtttttaagcctatccagatccgatccaatcatatattggatgttagattttaccatccgatccgatccaatcaattt

SEQ ID NO: 35724 - DNA, 1496 bp, Cannabis sativa
taggtaggtcttggaactgaccagtcctaccatatacccttttaggcaagatttactcatcatttagttggatgggaggtgactttatttgggaaatagtggggcccactgggcatgaggtttgcccatgatccctagggtgttgagttttcccccgacacataaggagacttcccctcggaagggatcccttatgagaggcagttctttaatggaggatccaatcctttcatttatttgtctaatcaattcattacctccctattacggcaattcaactccactggtgccctgtaggattttggcttgtcgattcatccattcctagaattcccatctctactgggcgaaagcatcactcatagcagcgcatgtttcttcttgttcataatggaggttgtatgtgtgatcatgcacctaccctacgacctttcttagcctagctagctcagaattatcccccaagtcaacatggggtttgttgacacaggggtagccaacccctagtctagtttctctagtgtatacctgggggtagcccttgttgaaggaaccctcatgatactttgggcaggttgtccaacattaactgagacctgcctaatatttgttaggcctttctgacattaatcgagcctatctattgggcgcccattggtgggtttgcccgaggtggccgggcagggttggccggattatcaccaattgctgaaacactgacattgggatccacaaccaccagatcataaggttctgtggacacacttcttcttgtcaagaccattatcgggtgaaaagagatgagatattcgtcagaatattgaaactctcaatgaaagcaccaaaaatattgattgggaaaatagccaactgactcaaagtctaataaccgctgattaatcaccaataaagagttaagaataataaatatttagaaaggacacagaaaattgtagatgttcgtccccttaatatgttggtaatgacctactcctatttttcttgtattgattgtgagataaagtcacacatatcagtaaggtaaatagagtgaattttagctacaactctgaaagtgtttacagaaaatattttctcgcaaagtgctcttagatgcgtgaatatgatttcaggttccttcccttgtgaatttattcactatttataggggaaggttgttaaaattagccccgtaaaagaagtgattagaaagtaaatattcctatattttagatggcagttacgatttgttgaagctcctactatctcgggtagatctattagctctgcatttgtaggatttagtttgagatatttgtagaagtttgttgaagaagaaatcaaggctcatgtagccttgtctgacattcctggcaccgtttcttttggccggcatattggccactcggctagaccctcctcgagacttgtcttttttgatgaagttacttatgaagcaatcgtggaaggtacattgatttgtcattctttggccg

SEQ ID NO: 35725 - DNA, 2153 bp, Cannabis sativa
aaatacgtcatgtacagctgataatgttggtggtaaggctagccgatatgttgccttatagaccttctcgagtatctcgaatggccctataaacctagggcttaacttgccactctttctaaagcgctttacacccatcattggtgagactcacaggaaagcatgttctcttaactgaaattctatgtctctgtgcttaggattagcctaacttttctgcctgctttgcagagcaagcatccgagccttgatcttttctattgcctcactagtccgctgaactagttcaagacccaaatgtttcctttctctagtttcttcccagtggatgtgaatttcaaatctctgtccgaaacaatagatttcagagctccatgaatacaaactatctcatttacctacagctcggcatattgacccactatgtatgttgtctttaccggcaaaagtgtgctgactatgtaaaagagtccactaccgaatcatacattcccgtggttctaggtaactcaaccacaaagtccattataacatctttccatttctacttaggaagtgtcaaaggttatgataaccttgctaatttctgatgttctatttgacttgctgtgattgtcatgtcaagcccttgggcacgtaatcgactacatccttcttcattttggtacatcttagtagtacccgagtgcaatgaataaggtgtagtatgtgcttcatccagtatttcttcctgagctcatcattgctcgaagcacatgctcaagccttataaagtaacatcacattgtttgagattgagatatccttagcccaaccagctaatatctccttcgaatcctgactaacttagaatctttcaattgtacccctctaattctttctaataaatctgactaaagcattagcttatgtagttttccaaccacgagttcaatgccagtcctaaccatacctaaagccaattgaggagagatcattgtggtactaaaacatgtctgggacctttttcgctcaaagcttcagccaccacattagctttctcgggatggcacaaaattgtgcgatcatagtccttgaccagttccaaccaccgcatttgtctcatgttcaaatctttttgagtgaagaagtacttgagacttttgtgattagcataaatttcactcttttttctgtacaagtaatgctgccaaatgtttaaggaatacaacagtagcaagttctaaatcatgtgtcgggtagcgctgctcatactcattcaactaacgggaagcataagcaatgaccctgccagcttgcatcaaaacgcatcccaaaccttggctagatgcatcacaatacaccataaatttctcttaatctgatggtaaagctaacactaaagttgaaatcagtcgctgctttaattcttgaaagcttgttttgcacttatcaaaccatacaaattgttgattcttcttagtcaattctgttaatgacatagaaatctaagaaaacccttccacaaaacatcgataatatcctaccaattcatgaaaaatttgaacctctgtaactgtctttggcctatgccaattctcaactgattcaattttcctcggatcaacaatattccatcttatcctacaatatgtcctaagaaggatactggtgataaccaaaactcgcatttcttaaactttgcatacaccttgtgatctctaagtcgtagaaaaaccattcaaagatgttgttcgtgctccccttctcactgagagtatacaagaatatcatcgataaatactataacacaattattgaggaaatccttgaacatcctattcataaggtccatagaggttggtggagcatttgtcttcctctcgaattctcaactgttgataccctgagcacaaatcaatcttggagaaaactatttttcctcgaagttgaacgaacaactagtcatcaattcttggcaaaggatacttattcttaaccgttccaagtaatcaatacacatctaaagggatccctccttcctttttcacaaataaaataggatccaaattaaaagattatatatacattttaatttatgatgttatatttataaaggctacaacaactctttattttgatttgataaaaatggcgatggtgttatgtaattc

SEQ ID NO: 35726 - DNA, 1923 bp, Cannabis sativa
  modified_base (991)..(991): a, c, t, g, unknown or other
ttctacactggtctagaagtagaaaaaatactagtgctctactgtgacaatagcggagcgatggcaactccaaggaactaataagccacaagagaggcaagcatattgagaggaaatgccatctactaaaagatagagagagttgatgtgacaatcttaaaaattgtattgaaatataacctgtcagatccattgacaaagatgctaccagcgaaatcttctatgggtcatataaataatatgggattaagggagatgtccaattttctttaaggacaagtggaagattattagggtttatgtcatgaaaagcctgtaaaatatttctattaataaataagagaaacattttttatatatatacataaatattaaattattaataattaatattaaataatttatatattaataacaaaaaatttattattcatacatgaggttgtgacttgtattgtatggagaattaacctcacttagccatgaataaaataatcagcaacatattaaagttatggaatctttaatcaatagttgctagtgtgattcactaatgcccattattcagtgcaagtaatcttgattcggattactgatgtaaaatgacatataagtgaaggtgttgtatatgatagagattatatatgacaatgaccgatgtgtgattaaattatttttatcaaatatatcgtttactataaagacctaatccatatcataatgatgatcaatagtagatcggcctaaatcatgagtaatcatgaactcatgttcatgttattagtttctttgatttactcgataaaatttctcaaaaaagatgattcttacaacttctgttttgagaatctaataatatatggatggttggttgggaacatgatctacaattatggaatcctgactttcctaacggatagaattttggttccctttatgtgttaattctagaattgaaaagttgcgcgcaaatttagattggatctaaatnatactttcactagtgaattaacagaacttaaagataaagaagtaagtagaatggtaaaatagtaattggaccaaaactaattacgaaccgacacaaggaggactaatcgctaaaattgattatatcaatgaacattgcagtaaaacttaataaatataattttataattactacaagttcaatttcatatttatggtggagtaatcatgaaattaataaacaagattatttagttgatgagatttagtaaataatctagtttattggaacttagaattataggtccatggtccccgaattgctaccttaaaacactgctaagggaatggataaaagtaagggtgtttgcggtgctggtagtgtgagtttaggctattttttcatgatatcaaatcgcataagtagtttttgtaatttctcaaactgcaactgcactgcaggactttaaaattgcgaaaactacattgcaaaaatacgatgcggtttaggtaatttacattatatatgaaatattaaaataaataaaaaatagtctaataatgtttcaacaattaaaaaaatgacatcttattaaacttttaacatcattatatatatatatatactaatcaagttattatattgaattgtcactaaaaaattatataatatacatatatattacatattatatatatcaataataatatgttaacaagaagaaattagaaaaaaaaataaaaaataagaataatttatatggatgttccttaaatttaattgtatggtttgtactttgtaagcatataagttgttcatatatgaaagagaaatcatattgtaaaaattagtatttttgtaatatataatgtaatgtagtttaaaccgtgattattcaattcaaaattacaaaccgcactgcgctgcgtggtttggcaaaaatgcaaaccgca

SEQ ID NO: 35727 - DNA, 3068 bp, Cannabis sativa
ttctaagagcaaacctagacatttttgcctggtcacatgaagacatggtcagtattgatccttctatgatttcacacgccctaaacattgaactgaacttccatccctttcaacaaaaaagaagattgttggacatagaacgagcacaagcattaaaataagaggtagaaaagctacgcaataaccacttcatcattgagcctttctacctggcctgggtagctaaccccgtactggtacccaagcccaaaaaatggcgagtatatattgacttcactgacctcaacaaggcgtgccccaaagactgttttccacttccaagaatagatcagctcgtggacgcaacagctagacacaagaacctaagctttatcgatgcttattcagggtaaaatcaaatcaaaatgaatccaccagaccaagaacatacaagtttccaaacagatatgggtctatactattataaggtcatgccatttggcctaaagaacgctggagctacctaccaaagattggtaaacaaaatgttcaaagaccaaattagacaaaatatgaaagtatacgtggatgacatgcttgtcaaatctagtaagattgtgggcatatagatgacctggacgaatgcttcaaagtcctcaaaaaatacaacatgaaactcaatcccttaaagtgctccttcagagttagctcgagtaagtttcttagttgtattgttaatgctcgaggtattgaagccaatccagaaaaaattcaagccttcttggatataaaatcgcctataaaagccaaagaggtccaaagcttaactggtcggatagccgcactcagtagatttgtttcgaagtcaaaagataagtgtgttcctttcttcaacatcctacgagggaataagaaatttgaatggacggtggaatgtgagaatgcctttcaagagctaaaaagacaacttgcaaaacctctcgtactctcaaaacctctggacggagaagaactaagaatatacctagctattacagaacatgttgtaagtgccgtgctgatcagggaagagaacaatatccagcatctggtctactacatcagcaaaagacttgttgaagctgaaggatgatatctgctgatagaaaagctcatttaatgcctaatcttagcaacaaggaagctaaggccttactttcaagctcatcctgttcgggtatacactgagcaaccattacgccaaatactacaaaaacctgacacatctagacggtcactcaaatgggcagtggaattgggtcaatacgaaataatctttcaaccccgaataacaatcaaaggataggctttagcgaattttgtagttgagtgtacgggcaaagaagaaagcattttaaaaaacaaaccagagccagtacaagaaccttagtcgagcaacaatgaagacaaacctacctgaaaattacatgtagatgggttggctacagatcaactgtccggtgcagggattgcctttgtcacacctagggggcaacacttacacggggcagtcaaatttgggttctgagcatccaacaatgaagtagagtacaaagccctcattgctggtctaaaacttgctcgggaactataggctgaacacattgagatttgtagtgactcacagctggtagtaaatcatgtgtctagggagtacgaagctcgaggagaaaaaatgatagcctatctaagaaaaatacatggcctgcttgcacaattcaagagctatgttctcaagcgaattccgagagaataaaatacaactgctgatgccttagcccgacttgcaagcagtaatataactgataaggctaatctaatcccaattcaatttcttgaagaacccagcatcacttgtgcggaagaaattgagatgattgacacatatctgaactggatgacaccaatagcagcctacctcaacactagggaactcccaagtaatagaaacgaagctcaaaagatgaggagaaaggttgcacggtacatcatcgtagaaggattcatgtatagaagaggattctccatgccactacttagatttctttctgttcttcctagcaacagcttctacataagtggtaggttcacctttttcaatttctgctgcaagtgcaaaggcaatgcagtcaacatatcctagcctttcaggtggtctcacatctctcctaactctatctctgacaagtttgtaatcctgtagccttgtaggcatttgttattgtccttgttcctcatctgaattatgctcacgtatcaaaaacttttgaggagtttttaatttgagttcttttgatagacatctattgatgagatagcatgcagtttgcaaagcttctccccaaaatttcttatctaaaccaacaccccttagcatgcatctcaccctttcaagtaatgtcctattcattctctctacaatcccattctgttgtggtgtcttgattacattcttatgtcttgcaatcccattgtcttggcaaaacattgtgaactgatatgagcaatactctagtccattatctattcttagcttcttaattttcctacctctctgattttctatcaactttttccagttaacaaaagttttgaatgcttcatccttagtcttgagtaataatacccaaactcttctggtgtagtcatcaataatgctcatgtaataactagcacctccaatggtcttagttcttgatgcaccccagagatgagagtgcacatagtccaacttacccttggttgtgtgtaatcctggagtgaatttcactctgctgcacttaccatacacacactcttcacagaacctcaatttctttccaagtttgcctttgagaattccctgtttctccaattcatagagacctctctcactaacatgacctaacctcatgtgccatagtcttgtgttgtctctgtcactattcttgacaactaagtttgtttttccaagaactgcttcccttgcagatagtaaatcccatttttgatgtctcctttcattactttcctagtacccttcattactttcattgaaccatctatcttta

SEQ ID NO: 35728 - DNA, 2418 bp, Cannabis sativa
ggcataaaacccaacaatatcaaggtgtgaatttgacctttcacaagtcatatctctcatttcctaaaaaaaatagtcatatgctttagacaaaactagatttttataagcacaacccagcacaccatgttatacgtcaacctaagcgatgggtgcttctcgggcgacttctcaaggctcattttgatacttctaaagaatttgagattgcaaataaggtatcctacccaaattttgaccaaaatattaagaattcccagagccaaatttatgtttgaggagcgaaaacatgtgaaccaggttgcatgtctatttgggcgcaaggcccaataccagtgtcaaccttgacactaggtccagctttttgcgaccaaatagttttgtttaattcccaaaaaaagtcttatctcaattatttgtgaaaacataaaatattcctgaaagactttttggaaaaactgattggaaatgacccaaggtgacaaaatgtcaacctgggctctgggtcccagttttggctccgagatgacttcatttatttcccaaaatcaccaaaatattaatcattaatagaaacagtacatattcctagagaacttcttctgaacaacgcttggaaatggtgtagtttgacgaagtgtcaacttgtgtgccaatcccatcatgtaggtcaacctaggcgttgggtcccagttttagcattaaggtagatctatttctttctcgaaagcacttgattcctcattttggatggacacaaaaaaaattctcaggatacttcttcaatattttggttggaagctccccagcgttgggtgcactaggtgcctgttgccttaagtgctcaaaatggaaagcactttgattctaattctggtgcctcaagtatgttcgtgataggtcttattcaagtcaaagtacaacttttgagctattgacactaagattcatcctccctaagatttcatccactgtcagaccataaactccgaactctttttgattcagaaacaataagtatgttcgtgataggtcttattcaagtcaaagtaaaacttttgagctattgacactaagattcatcctccctaagatttcatccactgtcagaccataaactctgaactctttttgattcagaaacaataagtaacatcattaaagataggtgggaaaccaagaggccatcgtaaagataggtgggtgtggatgaaagagcttaatggtttatttactactaagtctacttatctggtccatgctttagagagatcccctgactgtgttgttgcccccgccctgtggaataaactctagaactctaaaattttggagaggcataaggtactctgatgatgtatccattcagataccctgcctacccgtgtccttcttgctcagagaattagtaatgaggaggtttcttgtcctctttgtggggcgggtgaggatcgatggagcatctctttctctattgtaacttcgggtatctttggaggtcttccccttggggagttattccgattaatgaatctagaacccgtgtttgggattgggtaacatttctctagaacttgaactcaaaaggatggatagtgacaagctgttcctatatgcatcgattgtagtggatacgatttaggatacccgaaatgaaaaggtacataacaactcctcgagtaacattaagcactctattaattctatctctgattgttacacaaattatgtggcttgcttgtttgctccggcgttggctgttgtgtcccctgtttggtcccctcctccagaagattggattaaaatcaactgtgatgttaaggcccgtagcagttccatgtgtgtggtgacttttacaagggatcatgcacggacatttttgttggtagcagctaacattctcgactttgcgaatcctatgattggtgaagctgtagcgtgttggttagcgttggaattaacagtgttgaagattcacctttttgttctgattaagagtgattcggagaaggttattaatgctctaaagggaacttattccagttggactattgataattacatttttatttgtaatcaactttctaatcagtttttaagttgtaatttctaatttattttcagatgttgtaatcttgcggctcataatatagttaggtgaacttttgctcaaaatatttcaagtatgattgagatctcttttatatctgattatatcttttataataactacgaggtccaactttttctttatttatatattacgacactcaaaaaaaaatacacggtacacagtgaagttatgttattggcaaaatttgaagagaccatttcattattaagtggtgaaaggtaaaagttgtggtaagttattttgatatcataaaactcgggcatggtagcttatttatttattta

SEQ ID NO: 35729 - DNA, 1134 bp, Cannabis sativa
attttacaaaataattgtaatattattctagggatggagtactttagtataattaagaataaaattggagagaaaaataatttcagctttcatgaaagatgtagagagttgaaacttaatcattttagttttggagatgatatcttattattttgcaaaagagaattcaagagcatttacctttatgttgtagggattaaagcttttctctaatacctctagtttgcaaccaaatgtagcaaaattttttatatattgcagtggaatagaggagaacgagataagaagagtctttaatgcttcaggttttagcaagcatgaatgatacaccttttaaatatattggcatatttatttgtgtcgagagaatatctgaatgcaacttattggttcaaatagcttgtatcaagacttggagcaccaaaattttttcttttgctcgtcgagttgttctcatcaaatctgcactcttaaatatctatttcaatccaattgtaattgaatatctaatttttttttataattagattggattaaattagttcggttcaattgtcttgaattggatcatatccacccctagtcttcactctcccctaaagaatatttacaatataaattatttgttaattatgcattgcaatgtgtaataaaattgtacaaattaaaaacatttcttagcaacaaaaatatcatttgttacagtcaataatttatgatgccgtttagtaatatttttatttttagaaaacaaaaatattttctataattttttttcaagtttttttaaaaatgtgttctctcaatttcattttcatttattgattttatttaagtggggttcaggtccggtgttggggccgaatatgatttgtggtcaagtttgggattcgagtcaaggtttgggtccgggttcgtatttgaggctggggacgtagtcgggattcgggtttgggtctgagttcggggactgggtcaggagttcgagtttggggtccaggactggggtcccatttgggtcggggtctgggtctggtgtttgggttaggagttccaagtctggggttgggaacgagatctagaccgagaccaagaccgaggtcgggttcgaggtcaaggacagggttgggtctg

SEQ ID NO: 35730 - DNA, 1509 bp, Cannabis sativa
cccctaaactatgacatgtaccaaatcacgcctcatgaattttttcagcagttaaaaattttctttgaactattgagattgttgaatttaaagatttttgtctaatttcattcaattttaccaatgcgatgattgtttatgtactaaactataggggtgttcatcaaaccgctcacaccacacaaaccgctcgcaccacactacaccgtataaaaatacagtttgaaatcttttgcggtgcggttacggtttgttttatttctatactgcgtggatctgtgtgatttgtggttttgaatttaatatataattgcggttcaaactgcaccgaatatattataaagttaccaatttttacaacatgatttttatttttattttcatataagaacaaatatttgtaatatatgtatatattatattatttttttagagacaattcaatataatgacttgatgattagtatttatgttatgatgttaaaactttaatttgattttttttttgtattgttaagactttatagattaattttaaatttttattataatgttcgataatgatgatagtataaatcgctcaaaccgcatcacaccacaccatatttctgcagtctggattttacagttttaagatctcgcggtgcagttgcagtactttgagaaattacaaaaactgcatatgcagtttggtttgaaaataaggtcacaacctgctccacgcgcactgcgaacacccttactaaatcatgctctccagactttgacatctatgtaatcatgttcttcaaacttttacatgtaccaaatcatgtgttctgaactttcatctgtattagacctaccttattaaaattggataaaagtctttaaatacaacaatttcaatagtttaagaagatttttaagagcctcaaaatgtatgagttgatacatgtagacaaaaatactaattagcatatataaataactgattgaaatattcaacgttatttttcaattttcaaaaaactagttgaaggagaggctttattgaagggctctcgcccttgcacaaccgaagatgtaaacaattaaagaaaattgagatcagagtgaaaagtgaaaatataggtataatatttgaataatttttttttaaagaacatgcattttaattcgagcaatttttgaatgagaatgatgccctaaaatcttttgcacgaaaataaataaataattatatccatgcatcgatctttagtgcaaaaaattatacaaaataggacagaaaaggaaaaacagtattagtacgaactatagcaattaattatataaaatagagggttgtttgtcacatatgggaaaatcccatcgtacaacttgtacttgaagacaatacatagtgcatttcattaatgttatttggtggattagacaataagtactgtttatgaatggggtaagatgtgagtcatgtatatgtaacccatagtgaagcaaaatacagacaaaagcaattaaataata

SEQ ID NO: 35731 - DNA, 1233 bp, Cannabis sativa
ggccaccaccagagacagcggctgagtctgagtctggccactacggctctgaccctcggagctctccatcctccttgacttttgctgatccgagtcaactcggaaactgtccgatttgactgttccgggcgaagaaactcggatttgagatatgggttttgcacgctttgacttttggagcttgtctgatgagattactctcgtgaattcttggagtctggtcgtagatggaagtgactttcccataaaaacagagcacgcaacagggaaatgagataacgatgaaactagattatattaataaataataaataaaaaagattttaaaaagtatgtaaaaaaatataggttaataataacaataataatttaataatgaagaaggtgggcgaggatgtgatttaggttacttttcttatctggatttcatgttgggggtttaatatgttgttttgagaagaactcaattcaatactaaaagcaaaggaatgtatttgggatttccatggaagagagtatggtactttcttttgtcgggatatctagcccaaatgtaaacgcattcggcccaaaacgaaatgtttcacaagctctacaaagagaattggacaaatcctgaaacagatttgaaaaatacactactaataaataattacaataaataccatattcatgtaagatttgctaaaatgcagatacaatgatttacctcttctaacgcgaatctagaacaactaactaggcaatgtaggccatttgatcatcggtggagcatggttacttgtcattcggcttacatggtgcgacagttcgacccgataatttcaatcaatggtggacacaaagtggtgtaggttcgttgcttggagcggtgcgaggtttggtttcagacaatcctagtttaggctactattggttacatttcgaaaaaacacaccagttccgaaccaagaactgaatattttttgcatcttttgatggttgataccaacttactagcacattctacaaaattagtcctgcattactatcaagtgatacattcagctagtgatatttttcaattttagttacaatacagttagtttatagcattctttggggctgtgcataagcctattatctatagtggtttttacaaaatattgaattttgagcaaaagtttataatgttactcacatggattttttttttttttttttttttttttttttaaaaaacttttttttttt

SEQ ID NO: 35732 - DNA, 2118 bp, Cannabis sativa
gagagagagagagagaggaaagaatagaggtcaacctttgatttctgggttggggatctcaaaccttcagttctaagattttacatgtgatggctgggaaggaaggaaggaagatggtggcgatggctaggaaggaagggaatagtagtgggtggtggctgggaaggaagggaatagtggtgggtggtggctgggaaggattcacaccacgacttctcatggcagaagcctcgacttcatcgtggacaaagaaaaagaaaaagaaagaaaggaaaaaaagaaaaatcattttttatttataattttttttaatttcaaattaatttttttgttttttttttaaataattttttatgtggaccaataaaattgtgccacatgtacactttgttcagtccaacatgacacttaacacctaaaatggacgaaaatattaaattgctaacagaatacgagtattgaaagttttaccgcccaaatttgaatttcggggttaagtgaaactaaaataaaagttttgaggattttgccaccatttactcatttattattatttagtttccaatctaggtgacacgtgtgcaataataactataaaaagaaatatagatgagagccatgagactccttaaaaagattatagatgtgacattgtgtgtggcataagtttgaaatgaatcaaataagatacacaaatgctgtctcattatttaattttctataatttttattaaaataattagaatttttatctaaacaccaaaacatataaccccgcaatcttttaattttattggaaaaataatcataacacttatatcttggtaccaattccaagtttgtactaccctactctatgtgtctaacaaatattccatccatatataacttaaaactaaaattattttgtcttgagagacaagaaggaagaatatgaaagagacaaaagaaccttttgctttaatttagtttgccgaatggacaagatttccatatgcatggaagtcatatacaattaaagtatatctagtttgaagcctttaatcaaccaaaagaaacaaacttagaccaaaacccaaaaggaagctacctacgaattatgagaaaaaataacaaaaaaacaaggaataaccatatccaaaagaaaacatataatttgaaccctcattcattcttgatttccaaattaatactagctatcaaatactataaatccaaggccaccaaagtcttccttttatatactcatcactaaatatttatttggagaaataccaatctctctttcaagttaatttaagaaagttttttacattacaagagtgagattttttaattagatatagtattattattatggaaacaatcaggccaggtactgcatctgttaatcagaataaatcgtatgaagaattcgaaccacccttggaatgggtcaaggaggagacttctgacactcttcttgtcttcttgccaggttcatattactaaatatatactagctcatatatatgtatatgcacatatgtcaatacacatatattgtttcattgtgcattgcatctatcgcatattactatattttggttttgattttggtttttatgcattttttttctgagataatattgttatgtgttcaattatatttatttaattttaataaaattttgttggtaattataataactattgtagtgcacacatgtatcaagggaatgtgattattttacaaattttacattttgatcatgatgctaataaacttgtgtttaaaatgaatatctaatttcataaagaaattcctctaagaaaaaaaaatcaacttgcatcataataatttactaatcttatttgggaaacttacaaaaaaaaaaaaacttgaattattgagttaaaatttttacaaaaatactgttacacagaatttttttaaaaaatactgtatttttataataaaaaaaataaccttagcataacagtgaaaactgaacacaatacacattatttttttgaaaaaaatttcaccccactgtaaaaaaaaataaaaaaagttgaaaatttatatatataattactcatatatataattcattttgtttaaacatttatatatat

SEQ ID NO: 35733 - DNA, 1853 bp, Cannabis sativa
  modified_base (825)..(841): a, c, t, g, unknown or other
ttcaggttcgggtcacttatgagtatatttcggtggtcgggttagaacccataacccgaaaataaaaaaaatattttttttattaaaaaatttatactttaaattactttactgctgcctgacgtgcctagtgcctaacttaaactgcctattcgtattcttctatagtattagtaaatactattttaaaatattaatcatgttaaatgaatcaatgaatgacagaatgagagtctcagcctattcgtattcttcttcaatcgtcactgatagtctaaactaatatcatattatcagtaagtattcagtgagtatatcactatcacacacacacacacatcacagtatatcactcacccacacatcacgggcacacccaccgtcccacacccacacgactcaccatcccacacccaccgtccacaccagtcgactgactcgactcgtccgactcacccacaccaatcgatcaccaccacacaacttcttcttctccaagaccggcgatggcgagtcgacgactgactggttctcttcgccgcgctcagcccaataggacccgaacccgattacacccaacccaaaaataactgatccaaacccgactacacccgtacacccgaacactgggttttgttgtacatttccaagacccgaatacccgaacccgaaacccaaaaacccgacccgtgtgcacccctatctcatattcagtctctcctgtctctctctcaaacacaaaacgccaacaacaaaacccacgaaaccccacaaaaccccacccacgtctcccattcaacaatactctctttctctctctctctnnnnnnnnnnnnnnnnntatatatatatatatctatttatctcttccatttcttcttctctccttcgatctgggtgggttcacaagtggtattttgatattgttaatggttcgttgataactctatatttatcttataaatatgaccaattttatgtgttattatttttaaattgactctttaacccttcgattagtgtgattttaatttgctaggattttgaaaggttaatcatgtgtttgagtattttggaattattttagcatactttagtgaaaaatgtcaattttggagagcttagttttacaaggtagaacttacttgcaaattttgacgactttagaagcagaactagacttggagctaaacatgaaagttgtagatctcgttctcagctttgttcttcaacatcttgaatcgtccaattctgagttgttttgaaggagttatggaaaaaataccaatatgaagacgcggcagaaatttttcagcaacagacactcgtcgcggtgagcatgagctttgccgcgatgaggaggttgtggctgtgacgaccctcaccttcaccacgacgagagtgcaatttcaaatttttaattttatcttttatttaaagcaaaatatttttatggtgtataaataagacttctagggttcgtttctaaaacttttagattttgatagagaaactcaaagagagaaagagaataagaagaagattgcatcattaattgtttatcattatagtttctcttcttcttcttatattttacattttattataatgattagtttggagtagtttctttttagttaagggatattcaaaacataagacatgacttcttaatttctatgatgaatgatattttcttaattttcaatatattgaattgcttctattgttctattttcaatgtcatgattgttattttaatcttatttagatgatcactaaattaggttttgcttcaatttattgtcatcttaggattattattcacataatagtctatgattctaagtgtt

SEQ ID NO: 35734 - DNA, 1586 bp, Cannabis sativa
  modified_base (37)..(44): a, c, t, g, unknown or other
  modified_base (633)..(642): a, c, t, g, unknown or other
  modified_base (1159)..(1165): a, c, t, g, unknown or other
acataaaccacttctaatctcttaaattgataactannnnnnnngtaatgggttttatttaggcacaaaacccaacaataaccccaattcatactttcacttgattagcaatattactgtacatcattgtttccttacctttgtatacgtcctagggtaataaccctagacaacattattattaatttagggtactaatttactgagtctaacttaattatgccttctgtgcataatcctttatttcaacatatttagcatggcataacactcaaaatcatttgattattagggtaataaccctatgctagataaccgctcattttagggtgataaccctaatcccggttcttaattaatcacatccataatataaaacatgagcaccaccgcgcttagctctacgtaaaaactaatgtcttacctgatgttccgcttatatggagattccaaatccccaggtgctcctgaccaagtgccggtaatcctagttacaattatcgggattcataaaatagggttaattcctaaatatactttcaataatcacataattatcattacatttacatattaacatatagatcttgaaacaagctttctaacagtataaagagcatccaaaacggagtnnnnnnnnnnaagttatggccaaaacaaaaattggccttcctcgatgcagtccaatcgaaatttcgattggaacaaccctgaaccaaccggaattttggaagtctcggcagaaacaacacgaaaaaatctcaacttttaagcccccgtaacatactcaaatcttctctaatcacaaccaaattttcaagagcatcataatataacataacaaacatattttacagctcaaacacaataattgcaccaagaaccaaaaagtgtcattgtttgaaaacaccgcgccaactatacatgattgtgactataccgcaccgacttgtccgaaaaaacctacggaaaaacaacacaagtatactatataataatacagtccataagcacgtcataacattaaaattacaattttacccttctcaggtcaaaattacaaaaatgaccctagctcacaaatgaggtcttaacacgttatttctcaatttaattcacgtacaataaattaattaataatataattccatataaatannnnnnnaactagttagggtttgctaatccgtttctcttaatcttaggatattacaattatccccaccttacataaattttggtctcaaaatttacctgaataactccggatatttatgcttcatatccgtctcgagttcacaggtttcctcttccactttattgttcctccataatacctttatcaatgcaattgtcttatttctcaagaatttttctcttctctcaagtttttgcaccgattgttcctcgtatgatatatctggttgaagttctaatgcttcataactcagaatatgggacgggtctgagacatacttccgaagcatcgaaacatgaaatacatcatggacaactaccagcgccgagggcatagccaacgtgtacgctacttgccctatcctctcaaggatttcaaaaggtccaat

SEQ ID NO: 35735 - DNA, 1524 bp, Cannabis sativa
atatatatatatattaatattatccatatttttagatatagtgagagagagggggagaaagatgaagagttttattataactacataagatgaacaatatttgggcctggttgcacgccgaaaaagaggctgcaaaacatacatttctgccaagtttttctcttaatcaaaaatgaaagacactactcaatttattgggttgtgtttgtgtcataagataagatatatagagtgagagacagagtggtttttgtgataagagagttagttaacttatttcttgcttgtcacaccatgtgggctctcattaatatgtccacttgatattattcagtttattatcatactccatctcttttaataatctacaaatatatattaattaccactcatgcaaagtaccactaatcaaaaaaaaaaaaaaaaaacactaaaaagtcttataagctatataatgatcaataatatgtaattgtacatataaattaattaagaatttccacctataaaggcattaacaaatgtttatgagtatctctctcactccctctctctctgtcattattcatcactccatcacatgtatattattaaattttattatccctacaaaattctttcataacattatttttaatgtctggcaataaataaatagaatatagcaattaaacacttatgaatattatggaaaatgtgatcatgcatcttagaaaatgtcgctaataatgatattaattaaatagaattgaataaattagagaaaattcattaagtattaggggaaaagacttctttttatatatctgaaataaaaaaaaaattaatttattttacaatatgcagggtcttacatagataaaggaatttaactctaacaatgaaaaataaaatagagtatatttttaagcttaatattccctcctaggagtgtacaagttttgtaaaccaatattgaagacaatatttgaaaaatgactaggaaaaagagtttttgtgagaacatcagcaagattgtttttggaggagacgtggatcaatttgatgaggccattggtaatctttacctttgtgacaatcaatctcgatgtatttgatgcgttcatagaagacaagatttttagatatgtgaaaggcaataatgttgtcacaaaacatgacagctgtaaggtgatgatcaattcagaggtcttttaagatggcagtgagccaaactattttgcacgtggcattagcaagagcgtgatactcaacttcagctgatgagcgagagacaatttgttgcttcttagacttctaagagatgagagagttgccaaagaaaatacaatatcctggaatagatcttctagtgtcaaggcaagaccccgagacgtcaacatcaacaaaaacttttagctagaaaggatgtggatgagctggttgaaagaataattcttgcccgggagttcctttgcgatattgaatgtaaatacctcttagtttaatttggaaattagcagtttatcatgtttaattatgaaa

SEQ ID NO: 35736 - DNA, 1477 bp, Cannabis sativa
acaataatctgagaagttgagtcagcaatggtggaaactcgcaacaacacacgtcaaccccgtcctcctcaggatgctcaaaatccagaggacgaggaagtggcctcaagagtgaaagtggactccgtggaacgagatgaggccaacgacgacgagtacgagggaaactttgacgagtatgacgcctgcgacgaaggtagttatacagagttgttgctattgaggcaaaaggctgctgatcatgaagcgaaaattgcggccccaaaaagaacaaaataaaaagatgcaagaggtgatggtcgccatgcaaaaagccatggagacagtaggaattcatatacaccctaaggccatcccggaaggacttgaagaaatactgggagaatcctctccaagcacccaaaaacacaagaccagggaaccaagtcctatacggtacccttccgaagaataccaaagaaaaagccctacttctattccaaggagaaagaaaaaggtgcaggatctgcaaaaggtttgctcagatttcccgaaagggaaaggactgcagaggggcaaactccaaaaatggagtcttggccctcagaatcaagaggaccgaaagagcgtgtccgtgcaccaagagcccggggagagaggaaggggaaaccgaagataccctcccattgacttaagacacaaaatcaacgaaaagcacggtgatatgcgggatcacatggacaaaaagaaacatataccagcggtctccgcccggacactgaatgaaaggaattttagcagagttggcgatattgcgtaaagacattgctcgggtctcctggaggcaaaaaggggacaacttggattccgattgcgaggaccaagagctgtgtgcccggcacatattggaagcagagctccccaaaaactttaagatgcccaaaatggcagcatataccggagactcggaccccagcgattatttatctcgcttcaaccgggtaatgacggttatgagggttagcaatgatgccaaatgcatatgcttcccactaacattaagcggctccgcagaggaatggttcaaaaagttggagccaggatccgtggactgctggaacgagttgcaagtcagtttcaggagacaatttgtcgtggcgagaaagattaatctcgaagtcagtgccctgactaacataaagcaactacccacaaaaaccttgaagaactttataaggaggttcaaagaggaggcctccaagaccaagaaagtagacgacggtcaacagcttgcacttcttcaagctgggatccgtacgggaatcccattctggaatgaactacaataggaaggagcagctaatctccaagatttctagaagagcgtccaaaaatacatcaacttggaagaggcccacatagtggcctatggaggatactatccaaccggagtgtcaggatacgtacccgaaaatcatgcgcgcgcggaaatcatgct

SEQ ID NO: 35737 - DNA, 1586 bp, Cannabis sativa
gtcaaacccaaatgacacgattattatttgggtagggttagatttaacgcatgcaacacgaaatcgacaagaattgacccatttatatccaatatattattaaaataattagtttatagttaaaatattattaattttcatacaaaaatagataaattagaaaaaaaaaatgcttacaagaatataagatagataatttatatttgatattaacaattttattcattgtattgatattttgtaataatttttttataaaaattaaatatgctataccaatcatgttgatcaacatgtattgtaacaaaagtatagtcgacaagaaaatacgacggaacgagttagggttgagagttcttgacacaaaatatatatgggtcaggttataattcaccatatgtcaacctgcataacacgaacacgaatatgacacaacaacacgaattgccacccctatttggatatgtaaataaaataaatgatcatagttccctttcagctattttaattaaataacatcataatacaattttttttttgaaaagtgacgaaggtcatatgtataatgcactttatattttattccaattcatgtctccaataaagattatggtatagtaattgtgtcactaatgctttaaattcatggtaaagagaactgcttacttgatagtagtttgccggacgaaattcccattcagtcaaagatttctctatggtgcctgcaatgagagatgagatgctctgaatggctcctgaacttgtctctagcaattcagcaaataccaggaattgtcgactcatccactcccaatgaagaaaaaccgcttctggtggtcctatgacctttctgtatgaagcattgtgctgacgaaaccatgtaatggcttctataatctttccaccatgcaataacaaggttgatattttgaagtgcacttgctctgcaacagttttaatctcaattagccgttgtatagcgggtaacctagtcgatgttccaatcatctgcatacaatatttgacataatcaaaaatgaaaaatggaatcatctttatgagattaagaagtgtgatctctagtttcacaaagaaaatagtagtcacttgaaatacaaagaaaatagtagttgattcacaacaaattcaagtattagcaagaatcgcaatctgtaagtctcccaccaatacttcattgtcttctttaaattacatttgagatagaatcatttgttgatcataattaaagggtttggagtttggagactcttcaattgcccaaataaaatattgagtatagttctccaactgcctatagttcacggttggtggaaaattttagtctaaccaagattttaacacatactatccaaaaaagccacgaagatgaaatcaacaaattactcatatgcaatgaattcaggtccttaaaacatattcaagcaacataaatgcctaaactacgcataagaaaacaccaccagaagagaaaattgaatatgccattaaatgattgatttaatcctccacttataagattccagtttcaatttggcttctgattagtgatgtacacatagaaatag

SEQ ID NO: 35738 - DNA, 875 bp, Cannabis sativa
tgatgagggagtgacctttggtgcctaattttcttctcattatgtagggtattgttccaaaacttaaagctgtggtcagcagtgcaagttcattattggacttttatcattcaattggaagtttggatctcattaaggtaatttacacacattgttggttttctttgattgattcgaaatttgattccatattccagtttatgaatatttgtctgaacccctttgaggtaaattcataatagtaatgagttcctgattttattcttcaatggcatttatttaaacttcaaaggttgtatattgttaatggatagtgataattgttttatttttatatttagtttgaatctatttaatattctttttttttctttgatgcaggatcaaagttctaacgtcgacgttcttcttagtgatgctgatggagtctttcgttctatcaaggttggtgttagacacctctttattgtcctgatattcattaggtttagttccgtttactctctgtccttgttgaattttacatgtgagacaatttaattgtactgtttttccataatgtttgcctgagggtccagtagaggagctgatctttatcccgtgtttgttttttgtcgatttccccatctttcatattaacctttatggtcgcacataatttcaggctttgagccagagtgatggaaggtggcggtacagttctaataatccagaatctagtacctatgctgcgggtaatgactttttataaatcatttagaagtttgcttaaaatttattaggagatcaagtcacttgctttaactgtcaataacaatgtcttgaatttgtcattaacttattgttgttcctgcaggattagcaattaaaacact

SEQ ID NO: 35739 - DNA, 1415 bp, Cannabis sativa
gcagaaattgaagctctcttgcttgcttctgagtctcaaattgaaaagactgactttgatcaagaaaatgatctaagtgtcaatctcacaaccattgatatagatcagtttgctgaagccaatatagcataccagaatggtcaaaattgcaccagcagattctcaaacacaaatcgaattccaccttctggtttaacacgaggaaatggtcgaggttttccaaatcggggcacaactactggaggtaactatcctatttcatctccttatctcaatactaatggccgtggcatgtctggttacagcagagggggaagattcactacttcctcaaatcgagttcaatgccagctatgccacaagcttgggcatactgttcttgattgtttttacaggttcgacaagagtttcacaggagtttttccccctaccaatgcccccaatgctcaagccaacatagcagccaccaccactgttgatgatagtaactggtatccggattctggagcatcgaatcattgcactcttaatgtgcaaaacctgaacataagcactgagtatgaaggagcagatcaactatatgacggagatggcttaggtctgtccattcaacacataggcaaatcctttattcatacacataattctcatcctcttgttttgaacaatcttttacatgtccctgaaattacaaagaatttgcttagtgtttctaaatttgctcatgacaataatgtattctttgagtttcatgctgataaatgttttgttaaggatcaggaaacccgagcaatccttctcactgggatacaccagaatggcctctcactgggatacacatgttgttgagaatggtctcactcttcttacacatgcctctttgcctctcaaatattgggatgaggcttttagaacctctgtctatctgtctaacagattacctacacctactcttcaacacaagtctcccttagaaaaattatacaatatttctcctgattacactaccctaaaaacatttggttgcaaatgttttcccaacattagaccatataacaaacacaaattacaatttcggtcttctccatgtacattcctagggtatagtctcaatcataagggatacaagtgtttagactcatctggcagattatacatttcccgtgatgtcatctttgatgaaacatcatttcccttcacaacaattcccaagttgtccactgattcatattcatatgctgaatttgctacatctgtactcattcctctcacaagcacttttagcaactcttgcatgcataatgttcctgattacactaataattctgtgccacatgtggcaagtactgatgtcccaacacaggaacaagttgcatctgcctcaaacccacctgagccatttcaggacacaagtt

SEQ ID NO: 35740 - DNA, 2929 bp, Cannabis sativa
ggtgccaagtgtaaggtggcatgggtgtatttttagagtgtgaagataaggtgagaggtgaatgcatgatgacaagaatgacattgggagaggaatcaaaagacaaggcatgcaaggaaagagtgtacaaccacaccttctgaacattgagaacaaggaggtacaagtagcggcgacaacagacctgcaaggcctgaatacccgaccaagagtacattgcaaccactctccaacaccccataactggggaccaccctgcgtgcaacctgcaactggggaccgtgcgcatgtacttggagaccatcctcttgcaacctccaactgtggaccatgcgcatgtacccagagaccatcctcatgtaacctaccactgtggagcatgcgcatgtatctggagaccatcctcctacagcttgcaattgtggaccaggtgacactagacaagggtacggggtgccaggcttcctccagtacctgcaggatgcagcagttaagcggcatcttgtccccatgggacccctttgtacgccacgccattagagcctataaataccccccatctcagatgtgaaaggggttggaaaatcatttggtgtaacttagatattgaattcaatataaagaggaatattcaaataacttttcaccttcatctttatcttttctttattacatttctgggtatccttgcatttttcgaccactaacttagttgacgagttctcaccgttaacagtttggcaccgtctgtgggaacgacaagattaagccaagtcatttctttacacacaattgatacaagatgcctagacgctctcgccaccttcaggatgtggagatctgccttgacaacaaccagttggtcatttcaaagcaagaccgccctccacctgccatcggagatggaggcgataataaacacatgcctcaagtaagagaagaaaatgagaatgttgtccagcctcgagtagaaagagacagcgtgagcaggcgggaaccttaagcaagataaggagattgtcgtcgcaaaaagaccctagtgtacgagcagtgcaacagagttaccacctccgtcacgaccaaaggtaaaggtgtgacacgaaggaaggaggacctatcgtcactcaggcaccctccaccaccaacactgcgagatcccaatacctcacgacatcatcttggaaaggagaaatgggctaactctatgagcccaaaatcccaaactcccactatgaagacgaaataaaaaatctacgctggaaaagccaaaggctagaaattacggtggctgacatgtaaaaaatactaagaaccattctcaaaggaaaaacttaaacttcacactttctatataaaggtcaccggcaagagtgtagatctcaactctgcacaatggcgggaagagttccatgccatcaactggtggcaccccaaacggtgagagaggaagcctaccgtaaaatgagaacccaagagtttgcccatagcaataggaatctatttgctggggtaagaccgcaatgggagaaacatcatatagtcttatgaagaggctttagccaaagaatctcatgcaaggggacactgcactggcacccccttctcaagagaaaagcgagcagaaggtatctcccctcaaccatgatagagagccgcacgacgatgggatgagaggagtactacccgcaggctccatgcaaactgctaggaaaatccaagtgtcgttcaccaactctcgagaaagagtgaaaaagagaatgagagagctagaagcagagatgcaggatctacgtcgaaggatggctacaacttcaaaggaagattcgaatgatgatgaattcgaggaggagtcccctttcttgagagaaattcaaatggaactactttcacccaatttcaaggagcctcacatgacaccatatgatggtacgactgacccaaaataccatctaggagcttttagtgagctaatgaagataaagagggtgtcttgcaaggcaaggttgcaatgctttatgattaaacttgaaggagtcgcatacaagtaattcaagaggtatgggcctggaacaattacatcgtgggaaatttttttagaggaattcctttaacaacatcaagcggcgagtgattacattatgcctgtaacaagtatcaccaatgtaaagcaagggagaaagaaggcttaagggggtacatccaacgctttaatgacaaagtctccaaagtaggaagaatgtccaacgaagaacataagttcaccatagctcctggaatacgccctgggagtagattatgggggaatatgtcgaaaagggaattggatgacattgaagacttctacgagagagcaaaaagatatatctgcatcaaggaaggcaacagagtcttggaaataaacacaagtgaatgtacttcgaaaagcttgccggactccctatagggtctagaaggtaataatcccaatgctcgtacatccaagtaaagcctacgctatacaacccataaaaataaatatccaagatatactgtaacgctttgtctcacaggaacgccacgtgtgtgtacttttacaaattgatttataattaatctattaggttaagaaaagtgtagtttaattataacttttggattaaattaaaacataactattaaatcaaagcactgttggatttggggatcccctgtttgcaaacccttacattttgtctcaaaatttatattacaaaatagggttacaatataatacataattaacaggtggatcctgtccataggaagccaaaacaccatgattgatatgtacatcggtgggagacctctgtctcatgattgaccataatttcttcctccttacccgcaccatgaagcacacgtgagtcacattgactcagcaagaaatgctattaaaccaagacaatgacaa

SEQ ID NO: 35741 - DNA, 1549 bp, Cannabis sativa
atctcactctctccttttgcacattggatccacatctctatagtagttttgtaataaaaaaaatttataaatagtatttttaaaatttgtagaaagtataaatgtttatttttgattggaatagtataaatgtttattttaggttattttagcctaaaatagaaaaaattcctttaatttatttccccatagtatgaggacaaaaccataggtcctaccctaagttttccctgtaaatataaattagagattatgaatatagattagagagagttaagaggagagagaagagaagaaaaaggagaaaaaaattaatctttgaagaggtttggtcgtgcagagaggagaaaaggtaggggaagaaaaaaggttggctttttattttatttcggtcagcctttgccgccgcgttacatgttacatggccccagaaaaaccatacaacatagggatggcaattatacccgcgggtacccgccccattagttgactttcgggggcagggtgggtatgagtttaaagattcatacccgagtcggaaaagggatgggggcaggggaatatatacccgccccgatatgatatatgtatatatttaagttttaatatcataactactacaattaaaataacttcatgattttggctttttattgattatactctttttttactgtacacactggtccacttaagtttattgttttattaagtttttatgattatttattttttaattctcttttgaacatcatttttttttcaaaaatatttatgtaatgagtaccggatgggaatccttcccccgtcgggtaatcctcaccccgccccactttaatttaaacggccattggggcgggtatggggtgaatttaaaaagcgggtgcgggggtgggggtgtaattcccgcacccgccccgccccatttacatccctaatacaacatgctagcaaaaataatacaatgtcgtttcaataaaacttaaaaattaatttatcaacctttacctgagaaaaataacttcgacaaaagttttcccgccgttttttttcccattatttcaaaccgcaggaggttttacagagggttttcccgcaaaaagtttttttcgccacaatggagattttacagacgcaagtgacgctaacaaaacgtaaattttcatgccaaaaattcacgcgggatcaattagatttcccaataagctttatcggcgtgttctctgtaatacgccagtaaaaccactttcttctgtgcaaaatacataaatcgtcgataaaaagtaagtttttttggcgttgttccacaccggcaaaaccttcgaggggactaatttttcaacaaggtacttttgcttgtgcttttcaatataacacgtcgataaaacctacttttgtcggtgcattttcttaactacaaaaatgtcatttcttgtagtgatacatacacattcctaaagaaaaatttgatattgcaccccaaaaatcattgttgactctttgacaagttttgatatgtaaattgttataagtctcactactacaaaat

SEQ ID NO: 35742 - DNA, 2596 bp, Cannabis sativa
ttgtgaacagaagaaggatgtagcgcacattggctactacccgattctcaaaacaaatcaacaataaatcaattactcaattggtttattttattttctaccacttaattggttaaattcaaatcagaaatgaccacatatggcattcaaaacaaaaagatatataagagacacaacattctggtataaatccttggcataaacttgcaaaaaaaattcaacagatggtaatcacaaacactcaacgcgttaaataaagaaacaaataatcacagtgaactttaaaatccattaccacaaaagtattagctctaacaacatcaagcatggtaactcccaaaaggcgctttggatcaaaagtaccagctttcttgaaaacttcagccgcaattggtaccgttgagttaacaggattgctgatcaagttaacaatagcatttggacaacattttgcaattccttcacaaagagtcttcacaatgccagcattgatattgaacaaatcatccctagtcattccaggtttccggggaacaccagcaggaatgattacaaggtccattcctgtcaaggcatcttctaactgagactgacctaagaatcccctcacctagcaccagatttccatgatttacataaagcttcaagtttcaacttataattaaattattaaattgctttcttatttcaaaaatttaagaaaacccagataatgaatttatgaaaaaagaacaacaagattaatcatttgtataaagatatcaaagaaagtcggaaaaatagggattgtagttttaccacagcaccagtatccatatggctgatatcagcagtgacgccagggctattaacgacgtcgtacagatgaagcaccgataccaaagggttcatcttcatcaacatggccagaggttgccctatgccaccagcggctcccaaaaccgcaaccttgaatcccggcgcggcgcctttagcacggcaattctcccgacgtaaaccacaaccttccatctttaagcccaatttccaaaataagcaatcagttaacgatttagtatataaacaaaaggggaaattatgatcaacacgcatgtgctcctcgtgaagtaacaaaatatcagtacctggatgttgggagggagaagatgagaagagattctggaaattcgtcgactggcatcagctacggactccattgtcgatcgattcggatttcggttctggcagactaagggaagggtgtttttgtaatggaaaaataggaaagggattgataaagaagaagatcacgatgacgtgaggacttggctgtgaagttggaaagtgtgcaacaattaaaaaaattaaaataatcatcttatcttatccaaacaggaaaaaataggttgctattaggtaccagtggtgcctagcactttctcgatatgttgtgttgtgattggctagcgatactctctaaaaactattatattaaattatatgggactcgatacttagttggaccaatagcgatattgacacataggagggtgttaggcaccactagtgcccttaagcatttctcgtactaattagattatgccaaaaacagttattttccagtttactatcccgtgtttaaaaaacttcaaacgtatttttggtattgtaaattatttgaaatatttcaaaaatttacagggatgatattataagcataacgaacaccactttgaaaaaaataaaccggcattagtttttatgcacgaaaattgactaaaaagttgtaataagaggttgatagttgcactactcctaattagaataggaaaatttgactaaatatgcttacataaccttaaaaaattttctctaaacttataattaccaatatttgtaatctaggccaactttaatgttatccccaaattacccttctcatttacatcacatcggacaaataataaataatacacaagaagcaatcggaccccgtcagaccccacattggaccccccatcgaagctacgtctcctacttcgcaaccttacagattcattgaacccatcggacctacatcggatgtgcatcaaaccttgccccaaaattacagatctgacattctaaacctaaatatatccctaaatctaacaaaatctatctttaacagtaaaatcacaaataaaattaataaaaaaactaaaaaactaaaaaacaaaacacgaactcacctttgacattgtgtttgatttttctgaggaacctctgtgcaccatgggttatgggttgggtctcactttggttgtatgtgcgtcgagtgccgtggatagggtcgattggggtccgccgtgggtcgattggggtgtgtcgtggatagggtcgattggggtccgccgtgggtcgattggggtccgctgtgggtcgattggggtgtgtcgtgggtatgtcatgggtctattggggtgcgtcgtgagtatgagcgagagggaaagagagaaggcagccctaatttattttttgaaatgtgagaggtattatgtgaaaaataggaatgttgacatatatggccaactttaatacatataggtttagagaaataattttaaggtaatatatg

SEQ ID NO: 35743 - DNA, 1314 bp, Cannabis sativa
tcttctttttttttttttcttctggttttttatgtttaataattttaatctaatccatacttattgtgttcccttctcaatatgaatgactcaaactccattttgggtttgattgtgcatacactcttttggttttgtatgaatgtgataataactttgatgtaaatttagaacaagattcttttttttttttggcttggtatgaaattggatttcttttctttccattatgccaaaacaactcttgtacttaattgcagctttctctgaacagaccttctccacctctaccagagttgcatttatcagaagaaatggtaaatgaaatggcttcattcatccgcattcgcgtcaataatttactcagagtttctcaagatattgctcttggtaaagactcaaaattgttcttcaaagtagctggatacctctgtctgatctcctttgttggtggcatgactgattttcttactttggcatacaccagtgagtttcaactttattcaaaagtttgattatcttcaatgtcttatgttaactctttctttcttggttattactactcacagttattatatagtttttaaatatgaacttgtactataacaacaagcaaggtctttagtattaactaagtgagtccttagaatttcagattctgagtatgaaaagaaaaacatctgaaatgatttcttttgtttgcaggtcttgtcattatattaacaattccagccctgtatgagagatatgaagctcatattgacaagtttatcatgatggagtacagaagattgcagcaactatatgccttcttggatgaaaaatgtttcagcaaattgcaaaagtgggttgtggagaagagaaaactcagttaatatcatcatcttacaatatattttttgtacacttttatatttttttgaggggtgggaagtgtgagattggctcttttgttttgttttatctttttttggtaaagagaaattcctttttgggttttgtcttttaaggctgaagttttgtaatagagaagttgtgaggactcattgattcagtgagtaaacaaattctcatattaaatgtaatttcatcatagtaaatcattcgtataagacatagttttggctcagcttcacatgatatagtattgtacatcgacctacttattctattttggtcttacataagaaaaatgtttgccccacaagacaccaaagaaatcaaacttgacatttctcaatgatgcacctgacttttgatgtttgattatggaagaaatacattatagatttctctactcaaaacatacattat

SEQ ID NO: 35744 - DNA, 2026 bp, Cannabis sativa
tcgagtgacatctctaatgcatggccaagtgacatttctattgcatacatgtcgagtgacatgttgagaagcatggacaagtgacttctgtaatgcatggcagagtgacttctccattgcatgcatgccgagtgacatgttgagaagcatggtctagtgcatattgagaagcatggtcgagtgacatctctaatgcatggtcgaatgacttctccattgcatgcatgccgagtgatatttcttcctcacatgttagagtgacgtcaagccatccttggttgagtgacctttgtcttctcatggttgagtgacatttcttcctcacatggttgagtgatttcaatccatacttggtcgagtgaccttgatcttcacatggctgagtgaccatggctcttcaccatgtatggtcgagtgactcttcaccatgcatggtcgagtgccatcaaccctacttggctgagtggctccaaagctagggcttggttgagtggcctctagatacatgtgttgacctgatcattccttaaccgaatttttaagttgctttctttcatttctcgagaataatcgttgtctaatctcgagaatcaacctttttaatttttagagttaaaacttgtccctagtctataagaactcttttatgtcttcttgtagactaaattcagcaagcgccgtcccttctgcttgattctgcagttgtctctttaggggcttgcgccttgagatcttttgtttgagggagtctccttccacttgggctttctcaacctcttttctaatgtaaccttattctgaaaggagtataaactctttgagcagtctcgaccttttaccaaatacttataggatgttaagggagctgtttagcctcttgggctgcactcaaccttttttgggttattggatgttaagaaagttgtttaacctcttaggtcctgcttaaccttttttaagattcaacattttattgagggagattatggcccttaggcggtgctatacctcttacattgcatttgtggcacataaagtgcgttttaaatgctagaagattggtagtccttggatataagggagcttatggtcgttaggtggcgctcaaccttttttaagatttaagattttattgaaggagcttgtggcgcttagggggtgcttgatcccttacattgcattcgaggcacttaaagtgtgtggtgaatgctagaagatcaatactccttttagagaagcgtccctcttagagtcgtatccaatgtctcttttattcaactacttcattcactttgacaatctcgattgacaagtatagcgagcaagtcaagcaaacatgtggagaatgataactgccatatgtgaagtgaaaacttaatattttgactgataaggcagacatgtgattgcccgaatacatatgctatgtccagaggttaaactaggttccatcattatttttatacaatgtgctaaaggtgaacttgccatttctaggaatattttcctgtatagtgaaacttcactttaaggaacaacttggatatctaatttttacgggttgtagagcaaaggctttacttgaatgtatcagcttataattgttgggggcatcatctaatagaccctgtagggatctgacgagcttcccgaagaacacttgttggtatccgtttccaaggctatgtttccttcctccacacagatgtacttctttgctatctcataaaagtctttaataccaagtaattcccttttcagcatattcccccatagtccacttccagggcgtactccagcgactatggtgaacttgagttcatcttcaaacatcttccccacttttgtgactttggcgttgaagtgctggatgtagcttcacaagatttcttattccacttgcttcttattggtgatacttgctacatgttgatgactgcacatttgtacactcattcttagtcaattattagatagattagtatttatttttgtatagatttgatgtgttttctccaagtgtgta

SEQ ID NO: 35745 - DNA, 3736 bp, Cannabis sativa
ttacagtttagtaaacgtgccataaaatacaatcaaacaaaggaatgaaatgaaaattaatttctttcaatttcattctattttattacttccaatcaaatactacctagaaattaaaacacactaattgactatgctccctaaattttgatatttaccaaattatatctttgaacttttctaaccattaattttttttgtctaatttcattcagttttactaattatacgattatccatatattaaattatgctcccaactattaatatctattaccaaattatgtcccttgaatttttaatcatgttagactttttttaccaaaattgaaaaaaaaaaatctttaaattcaacaatctcaatagttcaagaaatttttaacgacattaacagtttagaaagtatgatttagtatatgttaaagttcaagggcaaaaataattttaataatcacccaactactataacttaatatccctatttttaatgtaatttttataaaaatattagattttgagtaaaaattttactgtgacacgatttttttataaaagtagtatattttaataacacaaccgggaagacaatagtaaaaatttaatacaatatagaaaatataccctatttttttttttaaaaaaaaaaacacataaaaaaaagttaaaaatatatatttttttaatgaattaatttgcgactataaaagggacgctaccttttataagtcagtctctctcattagggttttactgaagaagaagaagaagaagaggaagagcgactccatttctcaaatctccaaaatggtatgcattatcgttctattgttctttctttgtgctcataactgttttcaatctcatttcaattttgtttattcagattatctctgagaaaaacagacgtgaaatctcaaagtacctctttcaaggtagctaaatttgagtttttgattgttttcttagggtttcaatttcaatcgtagtaaggttattattgttttaatttgttgtttattttgtttgaataaattcttgaagagggcgtttgcttcgctaagaaagactataatttggcgaagcacccagaaattgatgtaccaaatctacaagttattaagctcatgcagagctttaagtcgaaggagtatgtccgggagacctttgcctggatgcactactactggtacttgaccaatgatggtattgagtttcttaggaactaccttaatcttccttctgagattgtccctgctactctgaagaagcaggccaagcccgctggaaggcctttgggtggtggcgatcgcccacggtaaataacccttgcctcctttggttttcagttttgctttgtttaatattttagctgcatttatatttttgatgtatttagatttttgtttttgaaaaccagaacaaacttcattaatatcaattggaatctggatacgaaagaaacagtaacagagattcatataattagatttaagttttagatttgcatacttctcttataggggatgttagtgttttggttggttcatattgttgagctcaaatttgatttaagttttgtttttgttgttgtcaatcagtggcccaccccggtttgatggagaacgcaaattcggtggtgacagagatggttaccgtggaggtcctcgtggtcctcccggtgagtttggtggtgacaaaagtggagctcctgctgattacagaccttcatttggggtaagtttacttgttgcataattgcattgcattgtcttgttgtttctgtttagtttcttttatagatgttattactgagtagtaattagttcacttcaaatggcaatatatgtacatttcaatcggtggaaatttgattacattagcctttatatttgtataatggcttttacttaatgaaattttcttctacgtttggattgattcaggtttgtttgatgtaaggtttttattagattcaaggatttatttttgttattgtttgtttggttattgggtgtttgaattgaagtaatgagtttgttattactgtttactgtcctagcacaactgttgcttgtttttcttttagctatatgaattgaagtaatgtactattcttctctattgtctttagtatagattctcattcgtgtttcgaaacaaatttgcagggtgctggaagacctggtttcggtcgtggtgctggtggttttggtgcagggccagctacctctgaacaatagaaatttcatctccggtcattgtaagcttcaaaatttaagagttgagagtctgaagaatggattgggaatatatatagagagataaatttgcattcgtccattgtgggatttatgagcagttttgtttttacttattacattgtctgagataaatttttggattctcttagatttattactcactctacttccttttattttgttgaacctttgatctctttcattatttaaatcaagtctctagttatgatgtttgatgatgatttttatttttcatttcaatctgaaaatttaaacttggcaaagcaagataataattttatgccatttttcattagaccatttcatatgttggtcttcattctatgcctttgaacctttcttttttattcaatatataacatgagttattcaaaactaaaatgaatcatataacagaagagaagatcccactaacactttcaaattaaatctacaatcttcgttttcctttttactaaaatacctcaaagttttattagaaagacgattaaattttgctgagcacgtagggactcacttcccagaaattcaaaaagccattattggctctgatctgagccgcgccatttaaagttttgcaatagtcggagtcgcagtagaaactgaaattagatctaaaagttttaaaaaagaaatagacatgttggaaaggggaggttgttgagaattgatagcacaatgtcatgctcatcaagcaaagtaagaagctccattccataaactgcagcttccacctctcaccctgcaaaacactgctgatcgaaactttcttagcactagcacatgaaggcataatacctccattattgtctcaaatcacaactctaactgcaccaactccatcttttgaagtagtctacatttgcccgaattcttccatggcgaggcaaatcccaacgaatctcaaaactccccctaccttgaaataccacactacaatttgtttagagtatttcaatttctaatataatttcactttttataatattttctgcatatgttatttcttgtttaagaggataattcatgaagttaatggagtccttcacgagggaggaagtgcttgaagcatggaaaaatggtaggtttaaaatgggaaaactatatgagaattttttgtcttaaaagtccaattttctcttatggacatgttgtttagtgttaggtctctttatcgaaactcgagtttaattctttggtagattgttcactctcatcttctcactcgatttggagcaaagatgtgtgtcttttcttcattaactatctagtgtgtaatcttgataaggaaaactactttttttttagtgtactttctctttaaggttgctgcaaagagttcgaggttggcttggcagcaaggtcgaccctaggctaaagcgggctagactcacacttagggcccaaataaaaaaatatattttaaaaaatatacatattttttaaataatttt

SEQ ID NO: 35746 - DNA, 1991 bp, Cannabis sativa
ctatcaacttgccagggacagaacaaggagagaaatcagggcacttgagaagttttgctatgctgatttttcagcatatgccctgtcagttacaaatgaggttgacaacacagtgcccaaatcgtataaagaagctataaatggcaaggatggtaagaaatggctgcaggccattgatgaggagaaacaatcactaatcaaaaaacaagacatggagaatagttagaagaccacctggacagaggataagtagatgtaaatggatctttagggtcaaagatggcatccctgggtttgaacaggttaggttcaaagccagattggtagcaaagggattcactcaaaaagaggggattgattatactgacatattctctcctatagtgaaacaagcatccattagaattataatggccaaggttacaaagtttgatcttgaggtggatcaaatggatgtgaaaacatcctttctccatggtaacttggaagaagacatctacatgactatccccgagggctttgaaagcaataaccctgaagaagtatgcttgttacagaaatctctatatgggttgaaacaagctccaaggcaatatggaacttgaggttcaatgaaacaatggagaaactggggtacaccagaagcaactatgactgttgtgtctacacaaatgaacacctgtacctgctactgtatgttgatgacatatcaattgttggccaagacagaacagagattgacaaattaaaggcaaaactcagcgtttgacatgaaggacctagaggaagccaaaaagatactaggcattgatatacaaagacagaggccaaatacaatcactctatctcagaaagaatacctggaaaaagtgattgagaagtatggcatgagtgattctaaacctgtgcaaactcctctggccccacatttcaaactgaccaaagatcagtctcccacaactaatgaagaaagagctttcatggacaccataccctatgctaatggggttggtagtctaatgtatgccatggtgtgtactaggcctgacttggcctactcactaagtgtagttagcagatttattgctgatcctggacaagaacattggtcagccttgaaatggattctaaggtatgtcaagggctcacttgacataggtctcacttttggaaataagtctaattctcaagaggaattgactgggtttgtggactcggattatgttgggagcattgacaccagaaaatcactcacaggttatgctttcacagtattgggaggctgtgtaagctggaaatccaaccttcaaaaggttgtggctctctcatcaactgaagctgaatatatggcagcaactgaggctgtcaaagaagccatttggctcaaggggctcacaaaagaattggggtttaacacagatgatgtcactgtgtattgtgacaaccaaagtgctctccacctaatgaaaaaccccatgtttcatgagagatccaagcacatagacatcaaacttcattttatcagatatgttgttgcaaggaaagaagtaaccatgaagaaaatcaacactgctcacaacccagctgacatgctaaccaagtgtgtcacccaggccaagttcagacattgtctgaacttactaaatgttaatggctactgaattcttgttccttcaagtcattgacctctgctgagtttcatcttctctcacttctcaaagtgatcaaaacaaggtggaattgttggtgttataaccactttgaaaagccaactgtattaattgtttttgacagctcagcctatggttaatgacttgtccaaactgtcataactataaatacctcctctccccaactcgatcgagacacagctagagaacaactaccatcacaagtctaaattagtagtgtcccagattgagagagagagagagagagagcttctgtagtgaagagagaaaccagagaaaaagagaggaaatcaccatgat

SEQ ID NO: 35747 - DNA, 1529 bp, Cannabis sativa
atgagattatttatcccaccttgttggatgagatgtataatacaaaaatgggattagctggattagttattcagacttttagtatgtccgtgtggacaaattaacctatttgatcccgtccaattttacgtaccaaacggacttatacgtattatcaatattgtgagactttctaacttcaacacttataaagtagtgtttggttagaaggaatgaaaatataagaatgagaatgagaataggaaagaatgtaataaaatttaaaatgcataaaaaaagtgataaaaaaaattattatataaattttttctcatcatgcattggaatggtctttttttctatttcaaaatgaaattgtcattcaaccaaaatagtggaggttattccattggaatgatattccaacactttaatatgcaaactaaataaaggaatgaaatggagattgtttcttttcctttctattcaatttcattacttctaactaaacgccacctaatgtttacatttagtctattataaaaataatttttctagggaaattgtgatcgcgaagaaagttgaatgtatacaactcttgaaagaaaaagaattatttaataaattattttcagtagaattataaatatattatttataaatgagtaataaatagaaggtcgtaaaataagttgaaagagcatcataaagcagtaagctggctgctataccaatattattggtctttattaacttgtcaaacaaagatgaggcaatattataatagcaatcttaatttctaagattaggctctgacttattatgaccctactttatcaatataaaaaaccaatctacctacttgtcataaaatatccaattattttatcatggaataattcatggcatgaggtaattcatcatttgatttaaattattagagttccttgattactcattgatcatcaatgtgttggtcatcataaagtaatagaagatcaaagaaaactctatacatacgtacctgaaaaaaaaaactacgcttacagtacgtattattctcaaaatttgaactaaatcttcagctaattaattgcctgacttcgtcgctttagattaaaagttgggaaatatataaaaattaagttaattcattactgcctagaaaataaataaataattgaaatagtcaaaaacaaagagcttgtcaagagagtcatgatttttatttaaaagtatgactaaatttccaccattttcctggactatgcatttatataattgacgttctaaattagtcattacgattattattctttgaatgtaactaactacgatccaaagtactaactgttatatatatatatacggaaataaagaaaaatagccaaaattaataattgagacaataataaccattatatatatatattattttgttctattcccagttttgtcattttattcagttccaataattttctaaaatatgagaacgcaacagctccagccgactttatcctaatgcgtttctatttgaaaatagagaa

SEQ ID NO: 35748 - DNA, 916 bp, Cannabis sativa
  modified_base (60)..(61): a, c, t, g, unknown or other
gctcttccgatattcatatttaggatgttaattcgtacatacttgttagtaaatctagannctggtaaaatattcccaacaggtttcaatctatcccatagcatggcattctcatatcactgctgtctatacctaatgagatacaccaccaagtacatcacctatcaaggtgagcccgtatatcatatttatggaatcatcacattatcattgattagtcaatcaatctttttattatataacattaataaccatattttgatctcaatatcaatcaattctcaataacattaattgtattgcaatataacatgctatgcagtacaatagacatttcttacctttgatctagatccatacatatcggccaacctaagtggagaaatatccccgatgatctcggccctatgtcacaacggtaaactaataagtgtttatcccaaaacattacttattagttgcaaaggataacttagggtttcctacaaaaccccatcgtaaaaatacactaaaataaaattatattttggctctaaaacatacaccatatggtagatctaatcacaagcttcgaaacggtatatagaacttccaaaacaaacaccggagtaaaaagttatggcaaaaatacgattctcgatttcttgagactgcctggaaacagtgaaccggttgggaaacggttaaccgcttccaccagaactggttaactggctcacaactagtagagcggttgggcaggggacaaaaagtggcaatttccaaattttgcactcactgaaacttgtccaaattactccaaacttcatatggtacatatatataacctaaagatataacctagctgacccatttgttagactttgtgccctaaataaaactctatatttcaaatgtaatcatttctattcaatta

SEQ ID NO: 35749 - DNA, 4370 bp, Cannabis sativa
atatacatacatatataatatgtatatagatttatagataaaataaaaataattcttgaaattatttcaatcatatgagtatacatataaatatatatttagtgtatcgtgacatttaaataatattcaagaactttaacaaaatatttaccttggggctttggcagagacttgtgctgataacgtgttataaaataatatagaatagataagaagaaaagaagaagaagatgaagagagaaaaactaaatgagaatttatcagttgtttattccaatgtgcacttatatttatacaaaaatatgactaaaagaatagaaaactaaatcaatgtaataaaaggaaaatacaatcgataattcatttggtaatttggaaatctataaatattattcataacaattttttaaagaattttttttatatatttttaaggtttttcatagaaacaatacgataacaacaagaacactacataaaagtaacatgaaaataacatctaaataacatcaaaacatgaacaaaatataacatataggtaataaaaatcgacaacaaattaacaagagtacatcataaaaagaccgattttctgtaaataaaattaaaaaaatattataaaaatatttaaaattctgtaaaactatagttttataattttttttttttttttgttgtttttgtgtatgtgaaataatctcattaataattaagtgatatttgaggtctatttaaattggattagattataattttttaaatctaataacaaattggatttgatcaaaataaattgaaaataaaaaagttagattggctcgtatgctaggcagcagcaacaatgtgaaagaagcaataaaattgaaaatattaagctaaatttaaagtggtagataaaattaatatttaggtccaggatatgaagctacggctaacgctatatctaaaaaatatgtttgcatatacatataattgtagcattaatgatagaaaaacaccaattgtataagaaaaattgcaacaaatatttgcaaatggtgaaaacaacaacattataaaaccataaggaaaattggatactactcaaaggtaaggtaattagtttgcaccaataaaatctcataaagtatgagaactgtgctcctcccaaatgtatcaaaacacaacatccaattgcttgagtaaaacacatcaattatactataagaaaaccaaaagaagcttgtttaaacatcttcttcataacccccgtcttcctcttcatactcttcttcctcgtctgcagttgcatcctggtattgctggtactccgaaaccaagtcattcatattgctttcagcctcagtgaactccatctcatccattccttctccagtgtaccaatgcaagaaagccttccttctgaacatggcagtaaactgctcgctaactcgacggaacatctcttggattgatgtggagttgccgatgaaagtcgaagccatcttcaacccggtaggaggaatgtcacaaacagtggacttgacattgtttggaatccattccacaaagtaagaagagttcttgttttggacattcatcatttgctcatcaacttcttttgtgctcatcttgccccggaacatagctgatgcagtgaggtaacgaccgtggcgagggtcagcggcacacatcatattcttcgaatcccacatttgctgggtcagctctggaacagtgagtgacctgtactgttgggaacctcgcgaagtgagaggtgcaaatccaaccatgaaaaagtgaagccgcggaaatgggataaggttaactgcaagcttgcggagatcagagttgagctgaccagggaagcggaggcagcatgtgacgccactcatagtggccgatatcaaatggttcaaatccccaactgatcaaacaaactttatagtgagtacccattatagtcaaagtcacccagcaaataattacacgttatatactaacatcagtatgagcgaactgcagataatgctgattaaattaattaaacacatagtaattgaacggttcataaatgcataattaaagaatcacattggaagatacaactctttctgaataaattatcatataacttcttccaacccattgaccataatacacaacaaagtgagacccatgtggaaaacaactggaactttgcatacaacgacagagagaaaagggttctgactatcacgtgattaaagcagtcaagtgacagatttaagaatagttgtgcttcaatatatttagtagaaactggatcccttacagcttgggtcaggaatgtccatatggcccatgctcgcgcgagcagaagtataaaatcaagtattgtgttcatttcttaaaaagtgcgtgatctacttttcagaaacaaagcataaatgcctaaatacttccataattccataaagaaaataaaaattagagcaaccttaacactgacatttctccatctgaatgaagacatttaacatcgggtgttaacgaaatgaagcataattaacaatacacatagttcattcatattcttattagactttaaagctgttttaatagccaaacatcataatcactatcaagcaatcatgcccaagcatcataatcattatcaattaaacatatcagtcccgttatcactttcttattggcatccaaacagggttttcttgaacataaataatatcgctcaaataaaggtatcaaaaatactgtccaacctaacaaaacccaccaaacaaagattgaacatatcaattttaacatttggtttcatggtatccaaaaagtgaaactagaagaaagtgagataaaaaggcaagtagatatataaatacttacagctaggagtagtaagcttgagggtacggaagcaaatatcatagagagcctcgttatcgaggaccatacactcatctgcgttctccacaagctggtgaacagaaagagtagcattatagggctcaacaacagtatcagataccttcggagacgggaacacagagaaggtgagcatcattcgatctggatactcttctcttatcttcgatatgagtaatgtccccattccagacccagttccaccaccgagcgaatgacaaacctgaaaccctaaaaaaaacacaaacacaaaccctaattaaatttacgtttcacataagaaaaaaaaaacagagagatatagagagtagaaattattataccttgcaaacaatcacagttctctgcctcttttctcacaacgtcgagaaccgaatcgataagctcagctccttcggtgtagtgacccttggcccagttgtttccggcaccggactgtccaaagacgaagttatctggtcggaaaatctgaccgtatggaccggatctaagactgtccatggtacctggctcgagatccataagaacagccctagggacgaaacggccgcagcttgcttcattgtagtagacgttgagtcgctcgagctgaagctccgagtctccagtatagcgtcccgtggaatcgatcccgtgctccgcacagatcacctcccaaaacttcgctccgatttggttaccgcactggccaccctggatatgaagaatttcacgcattttctcttctttgaaattttcttttccttttctcggacagaaagcgaaagaaaatttgaaaggagggaattcgagaatgaagtgtaaaatagcgaagggtcgtatttatataacgtggagatgtgacggttttcgtcagccgtttgagcgttttaagaagattttaacgcttgctgtaacggacgtttaattttagtgggaatttcgaatttttgaatatgggttcgaatcctgtacttcatctaggaggttacgtttaatacgtgcaatgctctgaatggctggtggtagcttagaacgaatggtatgtcatcgttaaaccaaagcttacggtatacatggaacactataaaactgcttatttataactggtccccacttctctgtttgattttcccattatgccctttcaggtttaagagaaaagagatattattctcttctgtcatctgtgagctaaattacaaaagataaatataatcagccttttccaattttggtaaattgaaaagaaaaaaaaatcaaatttacaaatctacaataattaaattaattataaaaaaaaaaattaatgtcaatttttttcctttttaactaaactatataaattactacaaatatttttgtgcagtccaattctacttattttttttaagaattctttttaattaaattctcttaattattatttcacttgcatttaattctttaagtttaaattttattgaactgatagtaaatttaaggtg

SEQ ID NO: 35750 - DNA, 2480 bp, Cannabis sativa
accaatcacaaaatcaaaactagaacttaattgaatgagacaagaatatacttagcttaataatgaaagaatcatgaatctttattgattaagaatagtcaatagtacacgattggatatgtccaagattacaactcgacacagcaaatagttacaaataaatgtctcacattgagggaatcagttcaagagtgatactcttattatatccctccacatacactcgctgtaatattggactctctctctctctctctaaacttgactctgaaatctgaagtaggagaattagagattgtcttgagagagtagagacaattctatttatagatgttggtgagactctctttaggttagtgtcaaaactaactcttataactaacatcaactttcttcaattcatataatgagagttaagatggaactacagacattgatatattaagtaagtttataatctcaatatatattatattactttgtcaattgtagcaaatcttacaaattatcccaataataaggatgatgatgatgatgatggtgatggtaatggtaatattcatcaacttcgaataatcccaattgatttcaaacccatttccagattactagagtctaacacatgggtacttaattcacatgatcatattattaatttcttagagtcaatacccataatcaatcttttgaactctaataatactgctatctctctaatatgacatgctggtgagaaatggggtatttttcacctcatcaaccatgacattccatctcaattacttcatgatactgacatccacagtcgtgggttgttttctctatcgtcccatcaaaagctttgagtcgttcgattgcataagagctctactaggtacgggacttcgtgaatgtcgtctttgtatccaaagagagtgtggtctgaggggttcactatctttgagtctgctcgtggaacatgctcgcaagctctggccccacaaatccacgatcataatcaatgccataacttttggtacgtattgttatttgtgtaatttaatattgctagcaaactttaatcctacgatcataatcaacgacataactttcggtaagtattattatttgtctaatttaatattggatgctatattttaatttaaaataaaatatcttagaacaatgctggagatatataagttgagaatgttcattataagttttagtttgtataagaatgtggattaggaaaatcaattctgaaatatttaatttaatatattcatgaaatatttttgtatggtatttattgttaaaattaaatacatgctatattgtgttcaatcaaaccaattttatataaaatttaacaaaccatggaagaatatttaattttaagaaatgttaaggagtactaagtaccataagaggtgtcatactgttattgatgtaatttaatattgggtcctacatatttatttaataaataataagagaaattgataaccacttacaacttatcacaccgatatggtgttggatactttaatgtacctaatagcaatgttttaattttaacttggatatcttatctctcactatgggtttttttttatctattatctctcactatggttattcttttcttttttgtacataatttgcagcaatgtgattgaaaaatgcaaagataagatgaacaaagtaattgaaaatataatgggcctgatgtttgggccattgggcttaaccccagaagatacaaaacatattaagcccaaaactgggtggagtaatggcccacttcagttgaactcatacccaacatatccagacccagccaaagcaatgggcttgtctgctcatacagacacatcattctcactttactataccaaaatgacaatactactggtctccaaatctacaaagaggggattgggtgggtgttcgtgcacccaatcaacaatgcacttgcaaatctcatcccaaggatgtttcaagagtgtgttacatcctgctgttgtctataaaacactcatcgaattttgatagtaaatttttatggcccacttaaagatgtgaagatatcacttaagaaaaatgttaaagggtgcttatggtacttagtacctttgcgagatgtaatattattattagtgtaatttaatgttgggtcttacttgttttactttaataaatactatagaaaatcgctaaccaattatagaacgatacttcatcatagtgctagacaccataaatacctcatagcaatgctctataagtactttagtaaggcacttaattttatcaatgttgttagggctagctaattgaaatagaaaattcttctcattttttttaacattaataaatttttgtattagataacatttgagattttaattttagtgaattttatattttgtatcatcatatttcagctaaataacattttatttttgtagacgataaattacaaaattgtaaattgt

SEQ ID NO: 35751 - DNA, 1618 bp, Cannabis sativa
attttggactccaattctaacttagaccttaagacacagactccaacttcggcctcaatctcggactcgcaccacaatcatggtcccagatacggatctcgacacgacttaaataaaactaaaaaataaaaatgaaaatgaaagttatgaaatatatttttgttttttatttttaaaattaaaaaacaaaagtaatcatagatttatttttattatttgaaaataaaattttagaaatataaattttacttttatttgtatgattcaaaaattaaaaaaaataaaaatattactaaatagctacctataaaaaaaatcaaatttgaaaacgttgggaccaaatctgtaataaaagcaaagttagtgaaacatactataataacttaaaagtttgtgggtaaaaatattaaataccgaatcttgtgtgaattagggttagaattgggcacttactcgttagtcagagaaaaaggaaaagaaaagaagaggcgaaggaagtaacagcgggagagatgtcgaagaagaatagcctttctaagcggaaagtacagcacgaatttgaactcaaaagtaaatttttctctgcaatctctctatctattcatgtatctatatgttgtttctgaatatttactcatattaatcattctatactgaacacaggggagaaggaagaaaaagaaaggaaggcaaagaagcttcatgctaagaagaacaagatgaaagtgagtccccatcgatcgattgcaataggaatgagttctttttttgtttttagaagttacattcttcgtggtcgaattccaacaagagtatctgctaactgaagttttttattttaattttttccattatcaaatgcaattgtcttgggtaattagattgggtgggtggttataaatttataaaatttgatgaatagtaatgtgtttgattttgattcttttgcacaacttcttatgttaaaatttatgtgttgggtgttttggaattcactgaaaggagttttcattgggtaattgtgtaaaacaggttgatggtggtaataagaaaaagaagggctcaggtgggtttcaggtagggaagaggaaagtaaagaccaaattgtcagcattggccaaagctaaagctgaacaggctatggaagttgacaactaaggttcgattccaaaagctttcattatactaattaggaagaggataatagtggttctaaaatttgtaatttagatgggaaatgtttcgtatttttattccattgttttcatttgtcctgaaatgttaacttttcttctaatgataaatattgagtggaagttaagaattctggcaattctccattttaatatatgctgctaaaggcgaagttaatatatatgatcgtagaagcctgttggtgataaattgtaggagataatatggaaataaatgttacaaacttaggacatggattttgatacccagattctgtggagtatatgtatatcagtatatgtatacaaattacaaagcaaaaaggaactatcttttttattcaaaaaggtttactgaagagagaaaaaaaatcatatttccaaataaatactagagactttagtgtttcaaaagcagtcactag

SEQ ID NO: 35752 - DNA, 1312 bp, Cannabis sativa
tggcaagatggcataagccttgagaatgaggtttgatgaggcgaacttgcttgtcattagtactaaagacaagcacaaaatgtataaaagttctagatttaacaagcctgtacaaactagcaataggaagtatcccgggacacatcaactgaagatgaataaaagagtaaattagagtctttttttaattaaagagtttcattttattagttagtattaacctttatttgtaaacagaccaacttttaacccctgaggttttcacttatcatagcaatatagcatgcttgtctggtaaataatgtaaaattttcactaacaatagtaccttctcttccactcattgatgatctttaattacctcagactaaaagatatggctcggtacaataaaaactcaattctaacctcgtgatgtcctttctattacaatgcagcactaggagttgccgacgactttaacttcttcggtggtggatttcctccagagagtagcacatatgaatagaagcacagcattgcagcactgcaatgatcacaaagaaatcagttaattcgatcaatgacttgatcatacaaagatgaatagctaaaaagttctcaaaaacaaagggtagtagcgatttgatgtacctaataaaagcataaacacctgttggaaaaactttcttggtctgcatcaagggaaacatatattaagttagaaacacaagaatcagttcattatttcaatcttttaattcattatcttacttaccaaagagaatgtttggaagtttttccagagaagagctgctgctagtgctgtaaaaccaccaacataaaacagaacaaaaatgtttaattcagacaatgatctataaagggtcctaaaagaaaacattgaacagagaatgaaatttaacctccttggcctagaatgtaaggcaaacttgattttccttccctccatatcatcaagctaaaagtgctgagagctaacaaagctcctccataaagcaaaccagtggttaaagtcgcaagatttcttgaaaagataaaaccaagaacacctccactaagaacaattccacctgccaccaattagacaatacaattagggaccatttggtataccgaattacatcgtattgtattgtataatattaaatttttatatgtgcacataaatatacaatagtataaatcaaaatttaacatactatcaaaatatgatatacaatacaatttgatataaactaattaggatatttgccaacaaaacttttaacaaatactaaatcgtgccttctaaacttttcaggccgttata

SEQ ID NO: 35753 - DNA, 1295 bp, Cannabis sativa
cagcagaagtaacaaagcaatctttatgctatcaacaaaatttaaaatacatgtgatttttttttttttatatatatttatttatttattacagaattatgtacctaaaccaagaagctgtttattcggaaaaaaaaaaaacaagaagctcagcatattttgtctgaacaggtatcaatcaaatagttcctagaactcaaacctattttgggatatttcaacaggttaagtactctctttatcatttttaagttaccacaagaaaatttcttattcaagtgtttaagagaataaaaatggcaaattcaaaaaggactttaaggaatgaaagaaaatatgaacagtagctctcaaaaaaagaaaactgatttcaagtaactgtgaagaaaaataaatatccacttcagtagttacatgtttggttggctctttcataacaagaagattagaaaatatctaccaccagcacttacaaatcagaagcaagagcatcacctccagggctgtcaattcggataatagcagctttatatcttttagattctgcataggataaaacacccaaatgactggggaaacacacacacacacacatacatacatacatacatatgtatatgttacaacaaaatgtaccaaatacagtgcaagaaatagtacattcatatgtttttaacattgaaaaacaagagataaatatataaaagcttctacgtagtacatccctatgttttaaaataaaaagcatacatgcatattatcaataaggaaattttaacatcaaccaaatgacttgtcataagatccatgtacctctcacactacgaatcttctcaatcaactgctctccaacaattcctgagccaggagaacttaaaggaccccttacgcgactaatacttcctgaggctctaattaaagcaatttgatctttaccgcctaataaacccagagtccacttcctaaccttacaatattttctgtacattcaaaagacaaataaaacaataattaaaaacatatgcttgactctgatgtatcttcttaaaacaagggttaaagtaccttggatatgcttaataggcaaagataacggttttcatacacactacagttaaagaagatgacagactaatatgtcgtcatccaaaatataataactaattaatatataagaaaatatccacgagtttaataatataaagaccaaaaataacatttacaagcgcagctgggatcttacaagtgagagtatgacagaaagcgcgtgcagcaagctatcacctaagggctaa

SEQ ID NO: 35754 - DNA, 1352 bp, Cannabis sativa
aatgcaattaccttgagaagtggtaagacctatgttgtgccaaacaaagacaagccaaaggaggaagatgatgtagagacagcacctacaccatcaaaggagaagattattgatggtcttcctcaaaaagaaactccacctcccatcaccattgaccatcacatcaaaattccttatcctcaaagacttcacaagaataagatggataagcagttctcgaaattccttaaaatattcaagaaactacacatcaacattccattcatagaggctttaggaacagatgccaacttacctaaagttcatgacagacattttatccaagaagaggaagttggaaaaatttgagatggtagcacttactgaagagtgcagtgcattcctgtaaaagaaactaccacccaagctaaaagatccgggtagtttcaacattccatgctcgatagggggttcgatacaaacgaaagatttatgtgatttgggagccagtatcaacttaatgcccctatcaatgttcaaaagatcaaaattaggagaagccaagccacaacagtcactttacagatggcagatcgttctttgactcatcctcggggtataattgaagatgtttttgtaaaggttggtaagttcatcttccctgctgattttttaataagatgagaatattcctatcatctaggggagactatttctagcaacgggaagagcattaattgatctacagaaggggaattaaagttgcatgttcaaaaagaagaataaactttcaaggtacttgccgaaactgaaattactacttgttgttgactgcaagttgtaaaggatggtcgagaagtcactaccaacaatatgaaagggaagtctaaagaacgatttcgaactgttcgacgacgtatgaaaacactgttatgtgggaatgataaaggtgactctcaatctaaggacaactctaataattgcaacgttggaggataattttcttcatttggcacaagggctctcatggatgcaagatgtggattctacccgccaccaccaccaccgccatactgacatggagctcaggtaagttcccttctctttagttttaaatgtcacattgaggagaatgtgtcactttagtttgggggtgaacttaaattttaaatttttagttctaaagctaattttttagtgtgagttaaattgaaagtaggtagatagcatgatttgaaaagtttatttattttgaaaaatctgtgtgcttggtgatattacactcttgactaatttcaattttgtgtcgtaaaataacatggaatcatattaagtaattttttagtaagtgaattgatttatgtatgctaatt

SEQ ID NO: 35755 - DNA, 3196 bp, Cannabis sativa
ctctctctctctctctcaaaactcaatttgaccgttatgtttgaaatgataagtgttagcgatatttgaaggattaggatcaagatcctaaagttgatggctggaagaatttaggttgttaagttagttaggcaataactaacttaaccaactcttcttagagcaagatctcgacgtcaacataagtgagagtgctttcgagagcgtatattagggctcacatctatcatgtcaatctcttgctccttttccttgcatatacttgctcgtctagtacctctactgggaccaagtttaatttatcgagattaaagtgaaatgccaattccgctaaggcatctgctttcgggagcgtatattattcatgtctcgctattgcctatatggcggcgagtttgaatatttctattaactgtatttttcgaggcgagttatttaatgtgtatttattataatgcgcagtttgagttggttcatattccaactttaatacacgtgtcagtttcttattactggtcgaaatttaggtataagaaactgaaagaaaatatagaagagaaaatggagaagaagaagaagacattgaaagaaaatagggaagaaaaaatagtgttaatcttactatttcagctttttattttttttttttaaaaaaaattcaaaactacaaaaccaatcaaatcaatatttattattgttttaaaaaaaaaatgaaaaagcccaaacttttgtcacaaacgtgacaaatggaaattttttacaaaatataccatatataatataaaatttgcacaatatttttataaaaaaataatgaaccaatataaatataataaatttgaaaaagaaatattatacactgtaaattcccggggtaaattaaaaaatacctattttatttatcaattaaccaaatctatctctaatttatatttaattgaaacatatctctttttatatgtactttaccaaaaataccctaagagagtcacatagtgagtatattaaagtgacatgggcaaaattggtaaagtgtttaaaaaaagaaataaaaatgatagactttaaaaaagatggtaaaaatcaaagaggacaatagaaaaaaggtacagagtctaatttcctctaaattccctaacaaatgtccaactcagggctggtcctaggcataggcgggctaggcctgtgcctagggcccactcttttcgaaggcccaaaataaaaaaataaaaaaaaattatttgatttttattaaagtaaaattaagtgtattgtaaattataaatagtcatagcttagttagttgagggagaaaattacattttgtacccactttactttatctgttttaatttttacttctatttttatatcctgttttatagatgatgtccccattaaactctttaggttaatgtaaattatatgctagacttaagtagagagtgagggtatattgggcaaaccactcaaaaaataggtatattttaataaaatataatatgagggtatttttgattaatggataaaaaatgaggtatttttcaacttatccctagttgaggtgtatgacatattatacaatgtcatgggttcgaatcccataacattcttttttaattttttttatatatatttctgagggccccaaaatttaattcgccttaggtccatatattctcagggtcggccctggtccaactgaatctatttttttttttacatggtacaatttgggaaggcatttttctatgcacacaccccatttttgcaagaaaaaaaatgagagtttggtctcacttgggtaggcccagcaaactaagccactaaaaatttaagatttttataaaacattaaattttgagtaaaaatttataataattgtcacacgaaaattttcacaaaatactgtattttaataaaataatcataaaacaacaaaacagaataattaaaacaactaaaaaacaaccgtgaaataatagtaaaaatttaatatagtacacaatataaaacttacacaatattttaaaaaaaatacagtatttttgaaaaaattctgtcccacagtaaaaaagttaaaaattttagtgtattttgtaaaagcccttaaaaaatatgtggatcctaaaaggtaaaaaataaaagacatcttaaaagtactaatagcattattcctaaatatcgtattgttattaatataattaagtatcgaatctcatatattttaattaaataattattataaaaaattattactattccatcttaaatattattggtgtctaataataatgtgaataataatataaaaaataaactatagtttatatatatattttgaaaatactatagtctatctattaagcatgcataaacttgaagcttcctcttagtatagtagtttgttgttatatgggtaaccatatcttgatcaatctcatggctatgacctacaactaatctttttgattaattattaatagtgaaatcagtgagccaataatatcaaactttagtgcattataatgacccaccacaaaagctacatgaaatttactagaaaataagggttattatatgattaaacttggcaaacctaacaagtaagtaacgggccaaaactttccaagcttcaaaatcattctaaaagacaacaaaatatatttgaaaagaaattatagtctaaaaagcttcctccattgcatgctatttgggtaacttgtcttttcaagtcaagcttagtcatattcccctttaacattccttagttaaaaaaattaaaaaaataaaaaataaataaaaggtccatacatttacattaaagccgttaactcaggtgcatttgtcccccaaactaagtttcttagcatatttttgtgagagttggtatggaagaatatgtatattaatatctctatagtttttcaaatatacaatttttcaaagaacattctttaaataacttataatacccatataagaaaaagtatacaaataaaaagatttgtatatatcttgatagaaaacacaacatattctactcaacttggatatgtctctttttcattctctaactttggccaacagcttttaccaccatcaaatcaaagattctcccaataaaatacagagtgatgaacaaaacaaagtgggggcacatgttgtgataggctgattatagtagacttataca

SEQ ID NO: 35756 - DNA, 1878 bp, Cannabis sativa
taagaactaaaaaagataataagggacagattgaaaggtataaagaacgttttgtggcaaaagctttacccaaggagatggtattgattataccataaatttctcgcttgtttccactaaaggtttatttagaattattatggctttagttgtacattttgatttagagctgcataaaatggatgttaaaatcgtttttctaaatagagtattgggagagaaagtctatatgtcacaacctgaagacgtcaaggaaaatggaaatgaaaatttagtttacaaattgaaattatccattgatggtctcaaacaggcatctcactaatggtacttgaagtttgatgagattgtgatatcgtttggtttttatagagaacaagtttaacaagtatatttatatgaagatttgtgggagtcgttatatttttcttgtcctttatgtagatgacattttacttgccagtagtgatttatcattactaaatgagacaaaaaaaattctatctaccaattttgatataaaagatcttcgagaggtatattttgttttggggattgagattcatcatgacaagaatcaaaaaatattcttggcttatttcaagaagcttacattaatcgtgtgctcaaaaagttcaatatgaattcgtgtaaggctatttctgttcctattttgaaagaggatgaatttactaaacaaaaatgtcctaagaacgacttgaaaagaaaagcaattgagaacatctcatatgcaagtgtagtagggagcttgatgtatgctcaggtttgcactcgacctgacattgctttcatagtcaatgttcttgggagatatttatctaatcctggacatgattattgggttgaagccaagaaactcatgagatatttgcaaagaacaaaaagcatgtcgaaaatctttgagttgttggttattcatattttggtagttgtgtagatgatttaaagtcaacttctgactatttttttactttggctagtgcaactatttcctgtgttaagcagattttaatcgcatcatctactatttatgcagagtttgttacatgatatggggcatctttgcaagctttgtggttaaagaacttgattttaaagatacaactagttgattctatttcctctcctatactaatctattgtgataatagtactgattttttgaattagtataatactattgttttcttttcaaagaataatgagattagtagtgcttcagaacatatgaaaatatagcatcttgttgttagagacttggtcaaaaaatgagacattatgacagaatattacaagaccaagtcgatgttagaagatactttaagcaaaggattaagtgttgtgttgtttaacaaacatgttattgatatttgcattttataatcttttgttcatttgggttaatgggagttacgtattctattgatttagattacatttatatataattttcttattgatgttatgaactacttagtttgttttgtgggccaataattttttgttattggatgtttatgattttaattatattttgttatatccttgagaatgatattgaattaaaaacatgcatgtagtttatatcttgtagtgattattgtcttttaagtttaattgcttgatgacaataatattttattggcttatttttttaaattaaacatgtttagtgacactaacttattaataagtagtgtaaggttaatttcactagcttaattattaagcattgcggtatcagtgaagttgaggacttatgttatttaattaatcacatgatgaacatagtttcttaccacactactagacttgttgaccatgtcgatttaatactttagtatttgtgattatgaa

SEQ ID NO: 35757 - DNA, 1073 bp, Cannabis sativa
ttatttaaataattaaataatgatttaattaaagagatttaactactataaataggagcctgatttgggaaatcaaaaaatgcttttatacaacatatttcaaattctatagagagaaaatgcaaactatttttcctctctattgttcttgcacatgtgttgagaactcaacaagaacaaggttatacactttatcataatagcccacactattccttgtatgtggtgaatcgatttagaagatgctggtgtgagtccaaattgcatactcctcttcaactagattaagggatacaactaacaagaagtttcgatgataccctaatagacttcaagaggtataatctaaatttaatttttttttattgtcttgatttaatgtacacacatatggagatcatgtggccatggtacgatgataatcagataatacaaaactcttctgctgcatacctgatttagtaccataaaaccaacactttttttgtcaggccgtcttatttcagataatatcagggtctcctttgagatcatgcattatttgaagaggaaaaggagaggaaaatgtggttacatggttctaaaattggatattagcaaggtgtatgatcgtatggaatgaggttatttgtatgcaatttcagaaaggatggggttcgatggtcattaggtcaattcggtcatgcaatgcttgatcgtagtttcttacacatttgttaatggtggtcgagaaatgggtctaatagtttcaacacggggaatacgtcaaggtgatcctattttgccttatttattcattttatgtgtggaagggttctcaggatttttgaaaaagtatgagatgcaaggttgaataaatgggtgtcgggtggctcggggagcaccgatagttttgcatgttctatttatggatgatagttatgttttttgcaaggctaatgagactgaagttggtaatgtgcttgagctgttgaacaaagatgaaagagccttgggacaaaatataaattttgacaaaagctctattttcaacagcatcaataagcgatgagagatacactttgtgatgtaat

SEQ ID NO: 35758 - DNA, 1459 bp, Cannabis sativa
agcagccgatgtacggatgttgtaatacttgtctttaggaggaaaaagactcttacttacaatcttcaattacaactttttaatcaatctttatgtttgaaattacatattaaaatatttttttatagcgatattcgttataaatataatattatttctgtcaataccgccatgaaaaaaatatttcgatatatattttcaaacatggagaataactaaaagattgtaataggagattaacgataacactactctaataataataagaagttcttaattgagtttgttcatgtaatagttcttgtaaaaaaaactcaattttatatcatgaatttttttaaattgtcttccattagatgtgtttcaatatagtatcatttaccaattttatgaaaaggaatgttaccgtcaatctcttattataatctcttaatcaactttcatgcacgaacatatataccgaaatattattttcaaaaaaaatcgcacggtaatttttattatagttactgttgggattttgtgctttaataaaattcattataataatcttatttactaattaataaaagatcataaatcaacagtttatgttgcatggttcacgtgattacttttataattatatgtttaatatataaatttctcaaacatatagttattcatgattatagtattgtcaacatagtaaaaaataattatgattatgtactccatactttttaatcccacaatttataagtgtgctggatttacactaatgtgataaccaacgatgtggtttacttatacttgtataagtagaatgtcttttctagtgcatcaacaaagtaaacttttatcgaatgtgtcggctatacattggactagaccgatattgacagtggaaaagatatcataaatatactgctatgccttttttaagtcgatgttacttagtagatcttaagtcaagtgatctcaatcttgagatggttactgttaacggtctgaactcattaacgatataaatagacattttcaactaccacttgatgataaacttaagtgtaaatattagtttggatcctgtgttctgtaaaatttaccaattggaccctgtgttttgccaaaaattaccaactggaccctgtgttttgcaaatgttaccaactggaccctctaaactgattttttgtcaaaataaaatttaataataatttgatctaaatgtgttatgacaaaactgtttataatattttctatatctgttcgtgttagcaattgtctttaagttagttatattaaaaaaaaaaaaaaagttatctaaaatcaagctcagtgtcttatttttatcattttaaaaaatacaggatttattttgttatttaacaaaacagaaaatccaatcaataatttttgcaaaacacgatccaaaatagtatttaccaataatatatttataaatgaatgaaacatt

SEQ ID NO: 35759 - DNA, 2444 bp, Cannabis sativa
cagctctctaactttataatattttattagttgccgaaaacctcggtcaacagaggtgtaaataaaatttctctaatttaactatataaatattaatatattatttgtaatattaatatttttctattgttattttaatattgtgagtatgttcatttacaatgttaatatatttattttaataaatttataagtggtttcctttaatttataaaatattaaaaatatacatgtaacaatcacctagtatatccttatatataaagtgtggctatgtaacggaattttcaatttaacggtattttttagttttctttattaactttaacaaatataccattatttaatagaatattcttaattattttgtaattttattataaataaaaataaaaattatgtagatatttttatataagaatattttaatctaatttttcttgtaaggatatttaatgtaaatttaaatacataaaatatcatatatatttataaccacacaatacgaggattttttggtgtactattcaataatattctaaatttgttgcagttagtttttatagaatgaatttaataatgatgcaataatcaataacgaagaccatatttttaagtgagatttattttattaacttattatgttagaatctaagttcacattacacaaaagtcaaaacttcttacgtctttagaacaatatttgaaaataataaacaaaacgtgataatagagttattgattatggagttcatctaattttagtcaacaaacaagtggaatggaaaagctttgttgctattatatgttttctttatttaaaaatttataacaaacatttaattttttaatctaataatattatttatttaaataaattacatctttattgttaaaaattaaaattcattatctaattaaaagaaaataaactaagcatatgtgcaagtcgtgtattgcacgtcacatcaatctagtatatatatatacatctatgtggctataaaaccgaaagtgttattattttttaaaatatgtcaatttaaaattaaactccaaatatctttcttatcttttatctcttatattaattgtgtctttttttaaactgtggcctatattatcgactatagccaacggttttaaactgtcggaaattctttttaccctaatatttttccaccatcacctattctactcaatatttacgacgctcgtacaggcgataattttatagatcgttagaaattctttacccgacagtgtaaaccgtcgagaattctaggtttttcagtagtacataactaaaataaaaactaagaatataactaagtatacgtgcaatacatgtaatattaattaagtatatatgtgtattatatgtaagtctacagtacaccttaaaagggtatttcggtagatccttatctgttttggtatataaaaataattagtcatttttttatgattgcgcatgttactgttgtggtattttcaacacgcaagtatatgtatcgttaacaagtaatagactcacaaagagtgaggtcgataccacaaggattatagttaagtactttaaaattaaacttttacatttatttgactatttgaatttaagaagaaattaaaactacaatttaacgtaataaaaataataaaaacaagcaagtaaattgatatgtaaattatcaatgattgaagattagggttattgatttcaaagaaatcaagttaaggctcaaaaaaggtaactaagataaaaattacaatgatggcttaaaaggcacaatcgatccaaagaatgtctaaaccactttcctagtcatgcatcatttattatcttacctcaaatagcaagcaagcaaattctagaattttttaagcaacttttcacatatcaaatttagcttacataaaccaattcaattgctagaaatttacctattatgattctttcttctttttaaatcacaaaattaaaattagtcaagaatgtaatctcaccaagcacacggattttttgaaaaataaataaaatttttaaaccatgatatctacctactttcaacttgactcacattaagcaaattgactcataacaataaaagaaacaaccaaaaactaaagactaatatgaaaactaaaaaaaaactaaagactaaaaattttaagttcatcccccaaacttagttgacacattgtccctaatgtgacgtcaaagaataggaaaaatagaactaacctggggtgcctcccaagagcactgtcgttaacgtcatttagccggactcagatttcctcgtgcaaaattcaacttgggtactacagtctccacctcttgctgcatctccatataagggcccttgtaccaaatgaagaaaattgtcctctaatgttgcaaatttcgaagccttccctaaaatgagagtcatcttcacaat

SEQ ID NO: 35760 - DNA, 1065 bp, Cannabis sativa
tactttgctaatgtcttggaaaagccattccacttataaaagtataagtaaccacatcgttgattattacgtcagtgtaaattcagtgcactgataaatcaagggactaaagtagtttatatcatatattcataatcaatttttaatgtgtagacaacactataattataaataacaatatgataagaattcatatatcaaacatatgatcatgaaaaaaacatgtgagccaagaaatatacaaaatgagtaatgacataacttatgttctttttattgataatgaaattaaattacattaaaattgaattttatttaaggcataaaatatggatatgtaacgaaattcctagttaaacggtattttcttattttctacgttaattttaacagaatatactattacttaacaaaatattttttattaactttataatattattatatatatttaaaaataaaatttatctagatactttataaaaaaaaataaaaaaatttaaatttaaatttaaaatacttaaaaatattgtagatattcttaactatatttttaattttattagtttaactttaaattaaaataaaaagaaaaataatgcagatactttatataaaaaaatttaatttaaatttataatatttaaatattgtagatatttttaaccatattttaatttattgatttaactttgaattaaagtaagagacaattccgctcaatcaagcacacaatgattcaccgcgatatcttatttgagttttattgtacatataaaatatgtatatatataatcacatctaaaggcaaactaatgtaggcgtaaaactaaaaaaaatcctcaaagatcagaatctcaaatcccttttcaattttttttttttaaaaaatacattacctaattaaaaaaaattaaacatacatgtattacatttaacatcatctaattgaatctaattaaaaaaaaactaattatacgtaacatcaacctaatatattttaatatatatatactaggttattgttatgtacattgcacgcatatttaattatatttttagttt

SEQ ID NO: 35761 - DNA, 1693 bp, Cannabis sativa
gtgtattgggtatattggggagtacacccccttctttgacgcttgtcctccgtccagttgctgccttttgaggacctcttgctccgagagctctgaggaggtccggttaggcttgcggtaggagcggagtgagacggggcttgtctgctcatccctgaggggttacttaggggattcccgtaatgcgatgatgcgggagccaaggctgggctctaattgtatctggggtagcggagaattgtattccgctcatttgtggagtaaccggaggaagggtccctgagagctgtgctccgggtacataccttgataccccaattagatagtaccctccataggccactatttgggcctcttccaagttgatgtactttggaccctcttctggaagtcttagagattggcagctccctcttgttgtaattcattccagtttggggtccctgtacagatcccagtttgaagaagtgcaagttgttgttcgtcatcaaccttcttagtttttgaggcttcttctttgaacctcttcataaaattcttcaaggtttctgtgggtagttgcttgatgttagtcaaggcgctgacttcgagattaatctttcttgccgcaacaaactgtctctgaaagctaacttgcaacttgttccagcaatccacggatctcggttccaatttttcaaaccattcctccgcagaggcgctcaatgttagtggaaagcaaaaacatttggcgtcattgctgaccctcatgaccatcattactcgattgaaacgagacaagtggtcgctggggtccgagtctccggtgtatgctgccatttcagtcatcttaaagtttttgggaagctctgcctccaatatgtgccgggcacatggctctcgatcctcgcattcggagtcttcatcccctttttgcctcagggagacccgagggacgtctttgcgcagtgtcgccaactctgctaaaattccttcatttagtgtccccgcggagaccgctggtatatgtttcattttgtccaggtgaccccacaaatccccgtgcttttcgttgatttggtgtcttaagttaacgggatggtatcttcgatttccccttcctctctccccgggctcttggtgcacggacacgctctttcggtcctctcgatcctgagggccaagactccctttttagagtctacccctctgtggacctttcccttttgggaaatttgagcggacctttcgcggatcctgcgcctttttctttttccgtgggatagaggtagggttttttctttggttttctttggaagggtaccgtatataacttggttccctactcttatgtttctgggtgtttggagaggattcttccggcgtatcttcgggtcctgcctggatggccttagggtgtatatgaatccctactgtctccatggctttttgcatggcgaccatcacctcttgcatctttctattttgttctttttgggtcgcgatttcagcttcaagatcagcggccttttgtctcaatagaaacaactctatataacttccttcgttgtaggcgtcatactcatcaaagtttccctcgtactcgtcgtcgttggcctcatctcgttcttccgagtccacgtttactctcgaggccacttcctcgtcctctggatttttagcatcctgaggaggacggggttgacgtgtgttg

SEQ ID NO: 35762 - DNA, 1501 bp, Cannabis sativa
tattataaatttataatgaaacaaaggcttgatttagaggaggtttggtgtcataactttaaaataaattttaaaaactaatagggccgtttggcaaatttttttaacaacaattttttaaaattgagttttaaaaaattagaaaattaaaaacatcaaaatgttattttcaatttttaaaattaattttttttgtctaacatattatattttatatttttgcttgcatactcggattctagactcgaaaccatacctgaactcgaacccagatagtctcatgtcaaggtatggtgttaaattattaattttttttagtaagaaaaaatttaaaaataattttaaaaaatttgtgtcaaacatcattaaatttttaaaatgacaaaaacttattttctattctcacttttaaaatacaattttaaaaattaaaaacacaacaaaacaggttcaaaagtttcgacaatttttaaatgccaattgcaccaaataaagtttaataattaaaacaaatctgcatggacattaataatcaatatcctatcacatcccattctcaatcacaattaattaaaaaataaataatgttagaacataattaaattacattctactttatattttttgacaatttttctgtcttaattttggagcacaagccaaaaccaaaacaaattcagcaacacaccaagaatatagactgaaagaaaactaacaccaacaaaaccagcaactaaaataacaaacagcagctaaacaaacaattaactagatcaaagcagtcccaatgaaaaaaaaaacaagataaatataatgttctctgctttataaaccagcgataagctttattaaagtctgaaactttgtacacaaattaacttgtctactccttagaagcatggttatgaaaagaaaaaaaactcaaaatcaaacaaactaaactataaaactcattacatagaaaactcattaatattttcccaaatcaaacaacccaaatataaaataaggccttaagccaatatgtactccaatacttccctccagtgtacactctaaagtaccatctatatgtttactagatttatttttctttctctttctttatttctcaatcatcttagctctttgtcataaactactcaagaaaagcctacacctaatttaaaaacaaaatcattgataacgaaacttcaatcaaatgttgttgcgtaacatatctccctagtagttgggaaacatgtcaatgagtaccaataataatccataattgaaatgagttcgtatctcaaacaaagccaacatttttaaaagctttttagttgcatttccaaacacaaataaaatccaaacacgagtttcaatgggcacgtcactaactaaaatagattaacaatatcaaaattagaataaggtccactttcgagaaagcgaaaaatgtgcgacttattaagaagaaattgaatgagaacaagaacaagaacttattgaaacaaaaatt

SEQ ID NO: 35763 - DNA, 1246 bp, Cannabis sativa
tcatatcaccgccttagtcttagctttatataaatatatagatttatatagatatataaattattactcatccaatctaattatatattatacctttttattggtaagtaaataatatagttttcgaaattatgaaattataaatagcctaatatatataaaatattaattataaaaatctaataaaaaataataaatgaagagtgaaacagtttttataaaattgataagaaaaaaaaatgaaaatatcccattataaaacaataagtaattttttttaaaaaaaaataacaaacaattattttatgcaattactatttaaaaatatatttttatactgatagaaacatgatttattatgggtgaaatgggttaatttcatatacttgaagggcactgaaatctggaactatactctaaaataggatacaattattagtactgaacgaaattgtgttggctgagtcaaacattcaggggaaatagcatagttgttgcgggaactcttgggaattttaattattctggcagacagaagttaagaaaattaattaggcaaataataatacgtgatttgttatagatatataaattttcgtaattatttaataaattaatatttataaacttaataaaaaattaaaaaaatgagagaattgaggagataataaaaaaatagctttaaaataattttagagcggtatgtgtctatgtgactactacctcatatctctcctttatatatacaagtatattaaaataagaagattgagataattaatgtttaaaaaaataaaataaaacatatcttaccatataatgagggtcggccggccctatgctattgagatttgaactctcaacctcttagttgttaaactaatcaaattacaattaagctacaacacatatttagtattaaaagtattattatttattttattactagctatattttaattatttttcaaaatgggggctgagcggtgagggccttaggcggccgcctccttcgtcttagctcagggtggccctgaatataattataattattaataatttgatcaattggcttcagaaatcctcaatgtttgtgttgacaattggttcaaaaatcctcaatgtttgtattaaatcaagtgtagtagatgatgaatattattctgtattgaaaaaagaacaaatattatgtcatatatatatactagaagaaagttacgtgcaaggcacgtatatttagttttat

SEQ ID NO: 35764 - DNA, 3277 bp, Cannabis sativa
  modified_base (1439)..(1439): a, c, t, g, unknown or other
atgttatgaaagccgagcagtggctaatggttattaccaaaattctgaactttattggtgtcaccgtcagcaatatagtggcctgtgccatattcaagttctaagaagacgctctagtatggtgggacctggtaaccctaacccaagatgttattacgatggcctggaaaatgttccaggagttgttcaatgcaaagcactacaatgaggcagtcagaagcgcaaaaagaaaagaatttactaagttgactcagaaggaaaatatgagtgtgactgaatacacaacccagtttgaccgcttggcaagatttgtatcgagaatcgtgccaacagattttagcaagaaagagaagtacatggacaagttgaatgcaaagataagacatgatttaatgatcactaccgatgacaataccacctatgctgatatggtgggtaaggcactgtgagctgagggtgcagtggagtgcaccctagaatgtcgagggactcaggttgttggtggggctcctacccctcctacatcaggctatcgtaggagaggtagtggctcgaccactgaccagaaaagaaagacacctactgcatccagtggctcaggtcagaataagaggttccgagggaaccagggatggggtaatcattagggtaggtctgaaacccaatacacatacccagagtgccccagttgtaagaagcatcatctgggagagtgtagggggtaggagtgctttcagtgtggtatgtcagggcattataagatggattgtcccctactcaagactaaagcacagaagactgcagtgaaacccgcgctaacaagggtgctcgcaataactcaggctgatgttgaagctagcccttcagtggtaacaggtcagctctcgatcaacaactcttacttctctatgttgtttgactctagggccactcattcctatgtggcagccagaatcttcagtaaattgggttgaccgcacgatagttatgaatctgggtttggaaccctactacctggtggaaaattagttatctccaaaaggtggattaggcctatgccaatcagaatggaggatagggagttgagtgttgacttaatagaaatgagttagttgatttccatattatactgggaatggattttctatccaagtactcagccaatattgattgtaaacaaaagatggtaatcttccaaccagaggaggaggaatcgtttgtctttgtcggattggttcagggatctcatatccaagtgattttagtatcaacaactagagaattgttacaagattgatgtttacggtttttggccgtggtattggataccacacggcctcaggtagttcggccaaaagacatcagggtggtttaggaatttttagatgtttttcctgatgaactttcgggtttaccaccgcagagagaaattgatcttnttattgatttggcacctagagcagaaccggtttctaagcccccttatagaatggctacagtagaagttaaagaactaaaaattcaattccaggggtttttgacatagggttttcacggcctagtgtgtcaccctagggagctccggtactgtttgtcaaaaagaaataagatgggtctttgcgaatgttcattgactaccgggaattgaataaactgacaatcaagaataaatattctttacctagcatcgaggatcttttcaatcaactttaggggaagacaatcttctcaaagattgatcttcgatcgggctatcatcagttgagaatctgagaggacattccaaagatggccatccgtactatgtatgggcattataaatttctggttatgtcttttggactaaccaatgctcccgcaacttttatggatctaatgaatagggtattcaaggattttcaaaatatttttgttattgtgtttatcgacgacatccttgtgttctctcaatcagaagaggagcatgagcaacatctctcgatggttttacagcggcttcgagaacataagttgtacgccaaattcaagaagtgcaaattttagctatctcaggtgtccttccttgggcatatttttagaaaatataggatcaaggtggatcaagaaaagatagaatccgtcagggattggccgagatcgaaaacgattacagcagctggaagtttcttgggtttgacttgttattactgtcggttcgtagaaaggttctctaaaatttcaacacccttatccgagcttactaaaaagaatcagcgttttttgtggacggataagtgtgaagcaagtttttaggagctgaaacagagattaatcacagctctagtgttagccctaccttctcataaagagaagttcatggtttgttgtgatgcatctagacagaatatggggtatgtattgatgcaggctgatcgggttattgcctttgcctctcgtcagttgaaagaatatgagcagcgatacccaactcatgacctagaacttgccgcagtagtttttgcattgaagatttggcggcattatctctacggagagagatgtgaaatttttactgaccataagagcctcacatatttctttactcagaaagacttgaatataagacggaggcgttggttagagttggttaaggattatgactgtgagctcctctaccatcctgggaaggccaatgttgtggttgatgccctgagcaggatgggtcccgggcaggtaactagtatgattcagatttcaccttggttagtagagaacatggtcaggtcaagcatcaagtttgttgtaggcaaacttcataacttgatgctacaatctgatttgttagaacgaattaatgctactcagttaactaatcaagaattagtgaagatcagggaagatgtttcagctagtcaagctagagattttacagtgtcggatagtgtgggatgctgttgtttaagaccaaagtttgtgttccaagtagtgtggaacttagaaatgaaattctttaagaggctcataccactccataatccttgcatcccagcaccaccaagatttatcaagatcttaaaccctacttctggtggagcagaatgaagaagaatgtggtagaattcgtatcgcgatgcctaacctgtcaacagatcaaggttgaacatcagagaccgacaagtttgttacagccattggcacttccttagtggatgtgggaggatatcaccatggactttgtggttggcttacctaggaccacaggtttatttgatttaatttgggttgtggtagatcgatt

SEQ ID NO: 35765 - DNA, 825 bp, Cannabis sativa
gccttggtatccaaggtcgacaaggccgactctgtttaccattcgtcttaaatcaaaagcatacctagaagagttgccagcattggcgtaattcaggcattccgaatcctttagagtaccatttagatcaccaataaccacaattgggacatccatagtgagggccgcatctcccagagctagccaaaaggcttctttatcttggtatctcgggggcccatagacgccaaagagtagccaaggtatgccaggggggtctgaggatatctccccaacaataacaaacttggtagaggagataatattgcaagcaactccttttacccaacagagaccaagcccgcccgattgaccaatgggaggaacgtagtgagccccttcgaaatgtaatctgttggtgattcttttaaatttttccatagttaatctgacttcagagagcaggaccatttcgggttgatggaagcggatcaagtccgccaattgacgaactgtcgtggtattcccgagaccacgacagttccaagcgaggactttcatggcgactttggagacttttccgggcaagtctccatagccccaaattgaaaatccacattctgagagcaagctggcatagtaggattcgattgtgtagtgtcatctatctcagtaatgcaacagttcggatttgattttgtgatcttttctacaacgacgaaatggttatctaaattcaccttcagatcaaacgaattaccttcccactggtgtttaatcgtggtgaaattatcactaccataccttgtagatttctgccatttgaaagctttaggagtggcccct

SEQ ID NO: 35766 - DNA, 1381 bp, Cannabis sativa
attattggactagaaaagcggttcacgtccaactatgttggcctaattgggactcaacctaaatatttgtatcacgtccaactttgttggacttgaaatgtggtaaactaattttttttgtatttaataaataataaataatgaataattttaatcattttaatcaataatattaataatattataatattaaaaaattaaaaaataaaaaaatatatatttttattagatatatatataattataaatctgcccaaaaattaatatattaataaataaatgtaaaaaaaatataaattttgctaatccattaatttagattacatataatattatatgtatatacaaattgcatataatatgataaaaaattaaatcaatcagattttattaaaaataaataaaataattaaataacataaagtaggtggagaagaagaatgtcgaatagattccaacgcaggggatgctggtgtagactacgacttagaagaatgctgagtacactccagcagaaaggatggcttcttctccatagatcgggatagatcaaggtgtcatggttcaagagactatcgagagtgggagagatagattgagtgagagtgtgagggagaacgaagcaaccaaacacagtggtgagagcgctcgccaagagagagaaagatgagcatcgaggatgtcgatgatagaagagagcccttgacgagagagagaacaaagatagggaggacgacggagttgctccatccagtctgagcagaaccaccactatgtgtgcaaaagagaataggctgaccatggtgccattcaagagactggcattggcttcttctttgtattagttgagaaattatatttggttatgaaataaggcgcggcaaagagaagaggctgtaatggaatatttaagaatgagatgattgagggttttgttttaggtttaaaagagagagaaatataaatgtgtaataataataataataataataataataataatgaaaaaagagaaaaatgtgggagtgcaaatggaattgagagagatatatcacgggagagaaaatgcaataattaataattagttttttcttctttttttattatggccatatataaaatactttcattataatttttagttttttttttttttaagaatgtcacgtctagtatgaatagattaaaaaattctaaaatatttttctagtccaattatgttagactagaaaattttaaaatatttttcaagtccatctatattagactacaaaatttctaatatatttttctagtccaatagagttggccatgaaaatagagcaattttttttttaaataatatatatatatactagtatattgttacgtgcgatgcacg

SEQ ID NO: 35767 - DNA, 1743 bp, Cannabis sativa
  modified_base (175)..(187): a, c, t, g, unknown or other
tgtgaaattcctctctctatatgtctacttctctagggatactagattctttactatttggcaactacttatgtgttagtcaggaagtaacactagtagttaataaattgttggaactatgccaaaatatgtatagaattttccatagagtgaataagtatctttcctgcaactnnnnnnnnnnnnntcactggtagagttagagactctgaatcggtttttacacttttccaaaatcactgctccaccctcagagtaatcaccatctcatcagtagactttctagcatcagtgcaagtctagaaaactaatttggtgtagtctaagagtattaaaataccacccttatcgactaacatataactcatcttttatgatcttaagattcacttgattgtcttctaatgttcctctttatcaaactttacaatgaaactgattttgtatttaagcttgaatggatggtttgtgtgacttaaattagctatgtactagttagaaataaagaatggtggatgctagatattattttagtatttgattgacttattaaatttatctattcggtgactacataactgtgaagatatttttttttttaaattgatgattgatcctaattttgtcactaatattttcttctcgatataggagttaatctatttatttttaaataagtattttgtgatataaattaaaggatcatttataagcattatcttcctacaagggtcaaagtgtgacctttgaccacccaaattatggatattatatatctgccacggcctaaggctcgagtcgtgacaagatcaatcacacacaatatcgaacagtccatattaattgtagaacgattcatccagtgagaaaacatccttcccttatacatataaaatttatcataagttcttaatgcgaggtatttcaagcaaaacaattattattatggcatatattgatttatatttttataattaatttttattgttggtttaaattaattatatttattataatattggttgtatattaattaaaatttactatatagatgaattataaagtaaataaagaaactataaaccataaatgtggataaataaaaaaaatatctcatatttattattgcaaaacttatttttttagaaaaaaatataatttctataattaactaatttttacaatataatgctatattttatattataattctcagtttttataaatattataacactcatttattataaagcaataacaatataaaaaaattataaaaattagatattctggaaagtgcaacttagttttctaatttattgaatatttatatttattcattaaatgaatttgggtattgttttgttttaaagattagaatagatcgagtgattaggttatgatttggaaattatattctctgtgaatttatttataagaatctgttgttatctctatgtaattgtgcaatgcacgtataattattattttttaattagattcaattacgtgatgttaagtgaaatacatgtatatttaattttttttaattaggtaatgtatttctttttaaatttttaattagagtttgagattttaatctttaagaaatttttttaagctattgttacattaattagtgtgtcatttggatataattatagatacgtatttttaaaattttaatttttttttaattaggtaacgtatctgataatgcatattgttgaccgaggttttcgg

SEQ ID NO: 35768 - DNA, 1849 bp, Cannabis sativa
aaacgacaaaattttgtcatatctttcttgctgacatcttttttcatgggtgaaggcttcttgtaaggggctaatgactgagtagccatgtaaatactttctatatcttccatcaggacagtaaatgcggtatacttggcagtattcttccgaggagcttgttcggtcttgccagtgaactttcccttttttccattcccttgcctattattgttgttggaccatttaccacttgagcttgaattgcttgggtaatgggggagttggacggatgtcccagtagaaggaacttttggccggctaggtttctgctcaccttctgctcgttggatggcttcttcaagcttaataaatccttctgcgcggtcaagaaagttagtcatcgagtctactggttcgttcttccttatgtccttccaaagttcgccaaggacttcaatgccccccaatatcgtggacaactttccttcttcggttacccgtgcaactttagtcgcctccgtcatgaatctgctaatgtaggctcggagaggctcccctggtctttgctttactttgaccagatctcctaggtgcaacgaaagttagcgagaggaggagaattgtgcatggaactccgtggagaaagccttccacgagttgaacaatctgggcgccaacttgaaataccattgttgagcggcttttaagagggtggcagggaaaactctgcaacatacatctcctcgtactccttgcagatccatttgcatcttgaaatacttgaggtgggataagggatcttcctttccagtatacatcttccattttgtcatcttaaacttgtggggcaattccaggatattaattttgggggagaaagggattccacgtgctcggtccaactcgagatcgttgttcctctaaccggccaggccttggaacatattttttagttcgtccaactgtgcctgcacggctggactaacctgttcggcctcttggtcgacctgagtcgcgtcagcatctctttaagcaggattttgagcgtaggttctgggctgcacgattggtgcatcaagctggtcgtccaatcctctactcctgttcagatcatttctgagatcatgagacccaatatttcaaatacagaaacacctggctgccttagtgactgattggtttggtcaatttgctattcgaaaccattaactgggttgggattattgggtatgacttattgggtatgacttctactgatgaatttctactgatgaattactagacaaggtctgcccgcctaccacttggcccacaagaggaatctgtgaccggggattgggtggctgaccatttatagtctgagaggtgctcatcactggatcttcctttgtttcgcccaaggggatgacggttacaggttgttgttcggcggcctgataggcttttcgtataaacacagtgacctgtcgagttcggtcgtcaatggctgcttgttgagcccttaacgtttccatctccttgtccctccattcagcgaacatacgcctctgctcttcaaatatgagatttactgcggcgcggagttcctcctgatcatgatgcaaggtgttggtatgaccctgcatgactccaagagcagcgcggaggttccagattttagtgtcttctctaatggtcgtttgaacattggtagtgggcggaacgactgtgttatgaatgccctagttggctgcagaactggtattcccagtctcttgcacaccaggtgcgatttcactcacaagagtcgccacaccgtgacccgcagttgatggctgtctgaaatttatggttggcggaatcctcgtgttccctggattctgtcgtg

SEQ ID NO: 35769 - DNA, 1226 bp, Cannabis sativa
tataaaaaacttaaaactttaggtactattattaagaagattttcagaaaactaattataaataattaaaagagaaaaagtaatagagacacaaacagtttttatgtggttggggcattgactaaccttagtccacgagtcgatgttattatgtaactctttagcttgaaaagcctttgggaatacaatgaatgtaagttctcaagtttgcctgggcaagtattgcaagagaattcaacccttaatcaataggattcatcaagtatttatagtattttaagaattatacttagttttctttttccctccattggggagtttacaatgaattacacacttgggctacctcatgaagtctagcccacaaaggagaagatatgttgactaggcagataagatacgattggattagtcaaaaatgtgtcctttgatcgtgagcaattaattatgaattaattatttggtttctattttaggaagtctccccttttagcttgatatgatcctttgtcgagatccggcaaacaattatttcctcatctgtgcataggaatataaagggaaatcgaactagtcttccaggaacatgctatctcatcgttcgggcatcaaagtaatggacctccttctggatatgagttgtcactggcaaaaggttattcgttcgcagagttgaagtacattcttggaaggtcctatataatttggggacccacaggtgggcctttgatgatgaccttgactccacgtggcccttgctagaaatacgaataatatttacccccaagctttcaaaatgctacgtatggtagaagcttgcatcattcccttagtgttgacatgtggaggatttaaaagaggtaacatgattatccaggtgttaattgatcatggaaggcgacttttgtctttggttgtggtatatccatgtgttagtatggtggtggaaggacacgagcttcaaggagttgctttccataaacgaccttattttgactgttgttcacttttttagcacaaaaattgaaaagtggcatcttcatcattgatttgtgcctcgatcctagggagcatttattgtgatgacatgcttggattgttgaactccctaaccgttggatgaagcttgtgctctgagggtttgatcgtggatcgtccattttctttcaagtggattgcttctttgggtataaataccctttacaacttccaattaccactttttc

SEQ ID NO: 35770 - DNA, 2328 bp, Cannabis sativa
gtttttgcatatataattttatttctttaaagtctacaattaaaatacgactgtaacgatttcgagtaacagattaaaaatttgttactgcagaacacagacttgctgtaaaagaacagaaacaaaaataaattatgcataatttaaaacttgacacaagaaattatacgtggtattacggggccatgcccacagagtataatcaattagtaaagtatcaaacattacaaaagcaattgacttgaataaaattaaattttgtctaattatttgttgcaaccttttgtagttcaccttgctaatatttatctctgaaacacacgaagtagtgaacttccttgagctattaatgcatgctcacttcctcccgaagtaagtctttgacagatcttctcatgaagatatatgctcacttccacccgaaatgagactatataagaaaagtcttctcctaagacccacacttattcaaagcttctcttcaacctattctatgaaagctaaaacctagttgaatgctctaagttaagataaactggacctttcaggatggaaaaagttcagctcaatcagctcacatgaaaattatatttttgatttttgaagggcttgccaatggagttaaagatttccaactagatccaaaattattaaaataagcttcacaaaggagaagaaaaaaaacatttcgaaaaaaaataaaaaattttgggaagaaattacctaaaaaattggtgaacacctaaataacactagaaagattgatgaagaaagattctcaagctctcaatctctattttgggcgtgtgaagccgtgtgaaaagagaataaaagagtattgtaatgccctgatacttaggcgcgctagagtaatttttaaataattgtgcccatctttgctaatcaaagggttttcttaaaaatcgtgccaaattaagatttttatttatacttttcaactttataaacatatatatatattaaccgggatcccgtgtttaaactttacaatcatattcaaaataacttattacaaacatgtcgcacaatgactacaaaatacagcccaagtcgtcccgagactgaactctctaggtcgcaccgtctcgatatgtacaatcatctcttgagctcagaattcactattgttcatctttgacctttccttaacctacacatgaaagtaatatttgtgtgtcaacagactcagtaagaaaagtatataatataaaatatattatcgacttgtatctaggtgcccatacacctatccacaaggcttaatagatgagtaataatattctttactaaggtacgaccactgtaccacatgcactacgtaccgctactatatgagtgttggtaggtttaaacagtacctcgagtaccactaagtgttgtaccacatacactacgtactcaaccgtactagtgttggtaacaacgtattgtactcgttgaacatcatacactataccaatgcactcagtatcgctacggtactagtgttggtagtatacgaatcacaaatagcatgcatataatacacatacacttattcatatataattacattctatgctagttttaccttgtttccaaattcaagcgtgctggccgaactgaacaaaaaatcacgtgctggatggatgccatatgtcacattcacgtaaatgggtgaataacttgttaaaactcgatctggggacctaaacttacaactaacaatttctttatcaataactaacaagacaataccataattattgaggaaacatcaaaactaaggctctaagaatggcccaagtcgataaatttgattttttgggatcctgcctgtgaaacgattaaccggttctagagtacctgtagaaccggttaacttgttcatactagaaatcccaaatcagttcaaaattcaaccaattcttccccaaactctgtcaaactttccagaacacctttactaacatccaataatagtttccaagcagtaatagcaagaagaacacacaaactaaaagtgccattaatgaatcaagtttgaattttcaaactcaaacttggtcattctcctctcaaatcaaccttaccagcaacaagcaacctaattctattcaaagcaacctgagaaataacactagaataatgttaaacctaaacagccactaattctcagaaattacatgataaaaccaaacttaaagcttaaacaacattaaggctagagttctagggtttaccttgataaaatccttccaaaactactaagtaacactctgaattccagtaagaattaatcgaagcaaaagagaagaaccctaggtt

SEQ ID NO: 35771 - DNA, 1389 bp, Cannabis sativa
tgttaaactttggcagttataaattataattacagacagactcaattaaagtaaccctatgtttgatttagtagtaaaatggaagaaaataaaatttattaaagtggagagaagataataatgagtgtgtttggtaagataaaaaataagaataggacccaccaaaatgtatccatttagagaaaataaaaagagacaaaaatatttaagtaaaatttactaaattattcaaactaataattattaaaattaaaattatataaacaaaatagtaattttcaaatggaaaattttctttcttttttgtaaaaaaaaaaaataataataataacctctatttttgtttaccaaacaatataaaagaattttttttttctttccttccaaaatttttcatccctctacctctcatatcttcttaccaaacataatgcttccatatttgagtctatgtaataatattaggtgcggtttggtaacaattttattttataagttttttaatcataaaatgaaagtaaaattttgaaaaataaaaatgtcttttgtattcacttttatttttcaattttaaaaacagaaaacaaaaatatgttttgtaaagttcattttttttattttatttaagtcgagtctaggtctagggtcgaatttgggttcaagtcaaaggttgagtttagcgccaaggccgtagggggagggatttgggtccgggtctggtgaaagtccaaaatattaattaaaaaaattatatttaaaaaatattaaaattaattttttttgttttcaaaattttgattctcaattaaaaaaattgaaaaatgaaaacagttttataaaacatgtttttgaaaaatatttttacttttctaattttaaaaatagaaaattaattaaaaaaatattacaaaacgtcaccttaacttttttaaatattaatttgtaaatagttacttatatgtaatcactaattattattactataaagattaattataaggaaaatttattttatcaaaaaatgaaaagtattgttaataattagtaattttttatattatttattaaattatacaaacagtaatatatcaaaacctttacatttttcaattattttatattattctcttaaaccctttgggaagcggattgtctatgtgctgtctacaaacaaaaataggataagtgtcaattgaaataaggctttgtttgcctaaatacttttaaataagagcattgctattggacactaatggtgcctaacattcttaaaacgtgtggtcttaccattggttagcgatacttcctaaaaagctattatattaaattataaggcacccaatactaaattataccatatggtaatttatatattataaaaaaaaaaaa

SEQ ID NO: 35772 - DNA, 1524 bp, Cannabis sativa
  modified_base (1039)..(1040): a, c, t, g, unknown or other
ttaatttacatttttaaaaataaaattataatttaaattaaataaaataacatataaattaataaatatataattaaaataaattatataaaattaaaaaaactgaaaactgttcatgttttgcgtcagttcctacgctatttatggcgtcggttattagataggaaccgacaccataggggtatatatggcgtcagtttttaaaaatcctttatcgtcgccctgatcagcgtcagtagagaatttcgccagaaccgccgctgaaagagcttaaaaaccgcctctaaaggaggtttttgtagtagtgtctatttttttattaaaatttatattataataaactcttccatatttctaaatgattgattatgttgaaaataatcttgatacaaagagtttggtgaacgatgtttgtttcattttagacatgtgtaaaacaactattatttaaatcttattttgatgacagtaaattatctaattttagaggattatatataaataattacaatactatatcatgcgcatattatgcacttagaattaataacaaagagtgagcatggaaaataatattactcatgaattcatgatgtataaaattggtataagtatctcatgttataacgaatcgtaccatcaaccatgttaggtgtcgtacctacacatagatacaagtaatatgtcccgaccgccttaactagctaggccaggcatatatactgctcatgttttcagtactaataaaaagactgctctccactctcttctcttcatatcttaccaaatttccaacaaaaggtttctaccattactaaattatacacacacaactcatgaatgcatattagtaaatattaatcaaagatatctgaaatcccaaaatctgtgaactgtttgttataaccatgtaatgagaaccgatttaacatcgaacaccagcatgctcagatgtgcatgtacgtacatgaacggtttctttctttacaaaacacaccaagttagaatggaagaattttaaaaataatatatatatatnnatatatatatatacatattattaattacagagacaaggtaaattctccatgtatataaggttataaaacaaaatgtacgtataacttgaaataattgctataggttaacttaaaatgaaatcaaccgcttaatacaaagattgatcagcgcagttaaggttttgaaattaattataccagtttatttgaaaaatgtacaatattttggtccgatatagaatcatttatctatctctctattagtttatatgatacatattctttaatttaccggaaaaattaacatatatataaacatatatttatagagttcgcgatctgtaagttacccaaaacgaaaattaaataataaagacatgtatatagtataggaaaattctaccatgcatccccttaaaatgtatatattgatgcacaccctcatctgtttcaacactcgaaataattttttagtcaaatgttttctcatggtcatgtacgttat

SEQ ID NO: 35773 - DNA, 1393 bp, Cannabis sativa
  modified_base (492)..(492): a, c, t, g, unknown or other
agcaatacaataatatttagaaaaatgtgattaaaaaatgaaagaaaataacagtaaaacaacattaaaacaataacaaaataagtcaagagagtcatcaaacgatacaacattaccactcacaaaatcagagcttaactacaatcccaaaaaagaaaaaagaaaaaaaaccgaattagtaaaaacaacaaaaacccagtaaagtttatgttgttcttaaattttttgaagaaaaaaatcaaacttatttatatttataaatcacatcttaacaaataaaaaaaaataattacaaattcaataaaaatatattttttttaaaaaaaaaaagttagacattaaattaaaaaaatgttatgtttacttgaacaaatctatattttttgagaaaaataaaatagactcaagtttgttcccgtaaaattaaattttgataaaaatttattttttaatatattttatttttcatatttaaatgaattttttaataanaaataaataattttttaaatcgctaaattaattttaaaattttaatttcttttttaattttctttatcattcaaaatgattattttttcaaggtataaattatttttttaagattactaaaaaaatattgaatatttctcatttttattttcagggaatatgatttgatagttgtcaaagtttaggggtaaaattgctaatttataaagacacgtattagtatttaaacggaataatgtaatagaacttaacataagaattaaatttctgtgaatgtaaaagttcaagaaattcttaacaagtattgtaagaagtttaggaaataaaagtactaattaatcttatataatatatataacataaaatgaccatggaagacaaaaccccttggtattccctgtgctcattctggctatttatctctaattaatcaattaattattactaaaacataatgtatgcattaatcaaacaagaataccaaaagttggtactacgtcgattactcttaccaaaatacctagctaggctacatactattattaataataattactctcagtaaataaaccaactttattttcatgcataattatatatacatacataatagatacatttatatatttatatgttctatattcttttcctacgttttccttcctggaaatcaagtctatacatatatgtactatagctagtattttccaggagaggaagtaagctgactaactagacaactaaattattaaagtagtacagcaaaaggaaaaagaaaaaaagaaaatgaaaaggcgtccttcctagctttgattcttttcttttcttttctttctttttattactttcatttcaagtaacttgttatgttttagagactttttagtgtttagtgtttgat

SEQ ID NO: 35774 - DNA, 1259 bp, Cannabis sativa
ataaagtgttatataattgtaggggtggtaaaatgtatcttgtgtcatatttttttgtgactcctttttatattgtgtcagacgtgttgactcattttttaactcgtgtctaattttcttaactctaatctggcccgtaaaaaatcgtgtcgtgttagtgtcaactcactgtaacccgttttgatattattgaagctaaaattatagagaaaaattacagatttagattccattaaaaaacttatacacagtatatataatttgttatatatataattaaaattaaaaaatttaaaatattttcaattttatgttaaaaaaaataatttaaaattttttaacttaacatcgaatcactaaatatatatttttataaaattatattattattattattattttatattatatttaaggaaaccgtgtcaaattcgtgttaagcgagtcgtatcgtgtttgacatgtttttatttcgtgttaaattgtgtcgacccgttttcgacccgcgtctaattttttcaatcgtaacctataaaattcgtgtttatgtgtcatgttgaaacccgttttgctacccttatataattagctagtactttttataatatttattaaagtaaaattgaaataccatattcagatataccctttaacatttcttagtgtacgagcaatgggtaccctgccttttaacattttgcaataaaaaaaggttgttagttagaaaaactgttataaattaataattttccaacaagaaaatatttgaagcaaaacttgcatggtttaaaattaatcccccaactgcaccatatcttatatcttcaactacctcttagttggggaccttaaccgttttaatgtttttacttacaacttttcaacaaacaatcacgaacaaaaataataataacaataatagtttttaagaaaaatcatgttgatagttagttacataacgttctcaacttttccaattataacaagaaattctccattttcaattattatttggtatatttcaatgcttatcctaccagaatcaaaaattaaattttgaccatttaatcaaagtgggtcatgtcattttatagttttttttgtttgtatatataacttatttaactttttaccaaaaatcagatgccagttgtattaaagccaaaacaaaactagaaaaaagcatttgagactttagtttgtttatcatcaaaacaaaaatcatttaacatttttatcatcaaattagagaattgagc

SEQ ID NO: 35775 - DNA, 1391 bp, Cannabis sativa
agtgtgaaccataataagttttttatatagttatgtatgctatagttatttaagacatccagtagaatatattttgagaaatttaaataaatttaacacgcaaaaaacaagattcaaacagtcagttgcacacgtgactcttttattttatatgtgtggaatagattgtttgaatactactttcaatattgtaaattattctgaatttctcaaaatttcgtaagatgtcttaaataattataacgtacgtgatcatgaaaaaaaaattatgtcatgaatatttttttttcgatgtcaaaagagtaagggatacatcgatactttttttttggagtgcattgtagaagtattcaaaaattatatgtaataaatattattagaaaattctacggtgcaccgcctaaaaaggatacaccgatgaacccctatttgtttcagcatctaggaatttttcttttgtcaaactttttttcaaagtcgtgtacattggagttatttaaaacatcctgcaaaagtttaagaaattcaaaaaaaaaaaaaaaaaaaaaattaacacacaaaaaataacattcaaacagtctattgtacggatgacttaatttgtacgtgtatgaaatagattatttgaacactattttttaacattgtaaattgtttcaaattatttaaaattttacaaaatatcttaaataattatagcatacacaattatgattaccaaaattttactttttttggggtgtgtgcataaatcgatccactctaatgacaaccgaccccacattggatatccaattgtgatcggatcggattggatgttatttttaaatatccaattggatcggatcggatcggatgttggatggggtgtcgaaaaatctaatatattcaatatccaatcgaactaattagtattttcatttagtttggataagtaattagattttatattattataagtaaaaatatttatgtatataaaattaaccttaaaattttactatttttttcttgaattggatggatccaatccaatctaatcccataaaatacggaacctaaaatattagatggatctgatccatccaaaaaatactagttctaaaatatgggataaacctaaattaaactaataaatatatttgaagaaccaattcaacatcaaatgaatagaactaatccaatccaacatctaatggatgtgatcgattggatgactaaaattaattggatcggatcagatggtaaaatttaacatttaatttataattggatcgaatctaaatagacctaaaaatattgaatgtgattcaataaacactcctaactatcaatattattttgtgaaaattctgaattcaatgggtttcttttgaaaaaacaaaattaaa

SEQ ID NO: 35776 - DNA, 1112 bp, Cannabis sativa
atataatattatagatatctaaagtacataaaatagagaataatcaaacaaaaatagaaattaaaaaataaataatttagagatatgattgtataagaaaaaaaaattataaagatagttttttaatataaattcaaaattagctatacatgtaattttattattaatatatttattatattttgttttgtgatattttattgaaaaataaaaaggttggtctacacaataaaactaaattataaaagaaataaaatataatgtgatacccaaaatttggctttcaaaaactgacacgtgttttacaaactgaatatgagtcaactttaataatataataaagttatatcggcagattaaaataactcattattattaaataaagttatgatagataatattcaaaactcgttgactgtatagtcttaagagagataagggtaataactattgaacagatattgacgagacatacatctgtctcggaatacatagacaaaaaagaggatattcatccactcgagcagatgaatgtacacatacaacggcctcggcttacacatgacgagacaatcacctcgcaacattaaacaaaatgaaggaatatgacgaggtgaacgatttaccaacacttagtatttttttttccctattttagatggataaggaggataactcatattaagcgagatacaaccttacaagtcagcaataacagtctaagggataaaaataaagagcggttgggtagttattagatattaccccacttatgattaaatgaaatgtggaaattatccacgtttcatgaacaattacatttgaattgatccccaaagaataactgctaacctatactcctataaataggggcagattctacagaaaaagggacaacaaatttgagagagaatttattattattcaaatattgtaatttgtactcataaaaattcctaataagaaagactcgcggagtatgcagattttaactgcaaaatcacataaaaatatctagagttattgatatttcattatttattagtttctgtaaaaaaaaaaatatatgttactaaaaggctttctaattttggttaacgaaaatctgcgtt

SEQ ID NO: 35777 - DNA, 838 bp, Cannabis sativa
ggacacactaacttagaaaaactggtaaccagaattagggaatcagagaaaatatgaacattgttccaagagttctccagggcccaggagagtgccaaatgcactgccacaacttctgcctccaaagcagaataagttgtagtattagaagaaagatgaccccaagagccatcttcaaaattagtcttgacagcagccaaaccagcaactccatttaactaggaagcatcagtgcagatgacaatcgccatgccatccctactaagcaaagtaccaacttcatttgacttggttaaagttcgcttgctcaaatcctgcaactcataaaactcagaaaagagagcattcattttcctgcaaacatcaacagcatttgcaatacctcctttcaaccacaaaaggtttctctgttgccaaatcgccaaaaccacacactcaaaataagtgatgcaccagctacgcttgaagcttggtaaagcaagaataaaggcttcaaagaactgcaccactgaatcgccaggaattgaatcaattctacaagggatcagacccgaaaaccaaatggccttagcaaaaatggagtcacggaagaggtgcaggcaactttccaccatgtttccacaaagaagctactggcataaagattgtatactgttaaatatttagtttggatatagtgttagaatatttagctctctataatttaatttaataattctcaattgatgaataagagtatgtttggttggatagaatgaagattgtaatggaattattattaccattaccttatttgttttaacttttaaaattttgtaataacctgtaatagttatta

SEQ ID NO: 35778 - DNA, 1511 bp, Cannabis sativa
ataaggatactctcaaaggtagatgaggacatccacataacactatgactactaacaacgtacaatgggtctcgaggggttaccccaagataacaattttcaccctcctcaagttgggtctcgggtgtgttgccccaaggtgttggctttcatccccaaaggtcgtcaacgatcgtgtcacgcccttaggagaccctcatcgttagtgactatttcaaatgttcaaatctcatgaaaggctcaaagatagttatcaacccacgaaaataacgagatattatcataaaaattagacttcaaccacctccgaaaattaaggaaggcgattgagatagctccgcattggtcgcgcctcctgaagcaagaagctctgaccctttcccctatataaggggtcatccatcacctgggaagaggatcgacgattttgagcaattagaaaaaaaacaaacactttttcattctttgccatcaagagcatgttcttgacttttgcaaccttgatcaataaaacacaaggggagtaggctattactgatatttggggtcgaacctctttaaattttggtgtatttctttacatttattgcaatttacggtgtcattaattacatttattgttacaattttggtctaaatctcatttattacgactccgcatcggttggctaaaaatctagttaacagctaccaacacaaacacgaagggaaaccaaactacatgaagtgacaaactcagaacccaaaataaaaatttgccaaagttgcattccaatcgacaaaccccaaaaatctatatacatgcataaacttatgaaactcaaatactcagaaaaactatccaaacagttctaacctccatttcatggtgaagcgtttcttagacaggtccatcccaaagtttaagaaaaaattcacatagcctacttcactaagcaacatgaaaacagtcataaccctagcttgaatgagaaatttttatcctaaacaagaaatgataaaaatttggtgaagaagagacggggtgctgtcgcagaaatttgcctaaagccttcgagtccaatccattagacagttgcaactggtctggaagtcaaaactttcatctggcagggggtatattaggtcaatttgaaggggttcaatgtctgaaaatatactcgcaaaagatttaacaaatgttgggttaaacgctcaccatcttctgatatccactagtgaaggatagtgggagaggaaaagcttgcaaaagaaatttggagtctagtatggaaaatgaaggatatgacaatacgaagtgtggaaaaagtgaaaaaaatcgtcgaaaccaatttatactgcaagaggaaattaagcattttccaactcaatggtccaaatctccttctcaaagtatcattatatccaacagctggggagttgaaaggattgaaagcatttatttgccatgatttgcctcaagcccagcgatcaataaaggaggatcttttcaaatcaccctgtcgtcggtt

SEQ ID NO: 35779 - DNA, 1041 bp, Cannabis sativa
ctaaatataagtaaaatacacacacaaattaagcttagaaaaaagacaaataactctttattcaagagttatcagcgaccaaagcttggacgatggggtcagggatgaggacatcaaacgggcgacaatgtcatacaatcaactgtccagcagcaaaaaagaagggtgaagattttgtgggatgaaagagaaagggagagaataagacgcggtcggggtcaccagggggaacgctaaaaatttcaaaagtggagagcaatatttttcttttttctaaaaatttttagggtaaaatgaaggagaatgggtcgagcttggaatttcatggcgataagtattagaggcgacatttttgcccctaaatgctgcctctaatgctttgacttgtgatattttcagtcgcccctaatattacaggcggaaaaaattccacccaaaatcaacgatataatattttatttttggagcgacaaaagccgcccctaatacttaatttattgcccctaaaagttttaggggcgaaatttgtcaccactaaagatgtacgaaatataaaatatatatatatcatattttcaaagggaaagcacatcaaagtttcccctaatacctatattatttagaggcgacaatgtgccgcccctaaattagtcacctctaatatctaaattattgtagtgataccacaccatgcttagatctaaactcgagacctcactgacattgttcttaggtgagaaatcggccctcaccagcagcacccccatctattgaaacctctccaattctctatctctctcgattttttttcaacagcgttaatggatatcattgaagcccataatttatctctttctcctgcggtcaaagctcttgaacagagacctggtcgaccaagaagaagacgaatattttagtttgcgtttggtttgattctgattccaataagtgggttaagatctagatttgaattttattttttctagtggtcttcgaagccaacggtaaacagcagccgtggtcgggaaaggaggtggggga

SEQ ID NO: 35780 - DNA, 1339 bp, Cannabis sativa
aatgatattaaatttttacccattttcaatgtcgaatacttttttattttaatttttttagaaaacactaaatataacattattcatttttattattgaatggttaaatattattttgaaatttatattttgtaaaattattgattatactttttattttgtatttataaaaaaatacaaaataatatcttgaattgattttttgtcaaaataaagttaataataaccttatttagagttgttatgataaaatttagtgcattttttacatttatttgtgatcaaaattatcttcaagttagttatattaaaaaaaaaattatcaaaaattgagttcaagatttgtactattttaaaaaatgcagagtccaatttactattttacaaaatatatagtccaattagtaacttttatacaatacaaagttcaaaacggtattaacccttcgacacaaaatttaaattttatctcattatcaatttttttttttttttttgaaacatctcattatcaattcacaataagcaaaataactcctaatagctagctaacacaatctctcctaagaaagagatatgcaccatgtgatctttcatttttttttttaaatctccttaaagtaggttaatgatatatattattaaatttatttgatatgagataccaaactaccaataatatataatattatttaattgttatattatttttaatgtaatttcatattctggtatattttaatgaaagttaagataaaatattttttcttttaaaaaataaaatattataggtgtgtttacaattagtccatgttatatatataatattggttttgcatttgtggttctattatattaatataaatttttacattcacattaatctaattttttttcttttgcccataatttacagattatttgggtcatatattgacattgaaattgtgatacaaagaactaaacgttaaattataatattggtcacataacaaaatgcaagcatgcactaaatcaatatcttggatttttgtgtatatattcgaaattagagtagaatagcatgagacgaagacaaaaaaaaaaaaaaagtagcaaagctagcaaagctattgtacatgccagtgagcgcaatagtgacattttgactgcacaattatatgagtataacaattgtatcattaagtgaagaagacactacacatgtcatctatcctcataacgaacctcaaactgcaaacatcataagctcgcaggggcggagccaaaatcaaatggtagggggccaatgtcgaaaaacacatacgaaaaatttttgtggcaagagattttatgatta

SEQ ID NO: 35781 - DNA, 1053 bp, Cannabis sativa
ttccatcatcacttcatcatagaagcttgaactcttcaacaatggagaaaccaacaagaaacaaagaagaagaagaaaaagattttttccctagcagagaaaaatctctatcaaagaatcaaatgagtgggagttggttagaatattcaagaatcaactatgtataacaccaactcacacaaaactgactttgacagctcactaataactcattgatgctgcctaagatattttaacattaaaatactgatctgtcaaagctgacccataaaccagtaatagacatactcagatggaactactgactgtctagatggcagaaaactcataatttaacaaacacaaacacaatctctcccttggcaaattatgatcaatgcaatcaacaacataaaagagagactaacaaaaaccaagatgctaaattgtcacataatagtcaccaatatactaactaatatacaatatctccccctcattgagcataatgaaacaccccccatcatggaaactccctttaggaagagggctctgcaggagggataaaaatagaacaacatcaagatgctccccctagacctgatcatacctgttaacactcaaataggaagactctccctggataccaatagggaactggagaagaagcagatggaaataccaaaatggtgaaactccccttgatttgaaaaaaaacaaaataacacttggcccatttaaaaataacccaagcccattaacacaaacgaaaaccaagtgcaacaacactctttcagatcataataaagacatgataaaaaaataacacaaataacagaatctaaccatgtaaaaacacacataattcttaagatgaccgatttgacaagaaaaatttacaaacaatataagacagcaaacactaaagctcaactagatctaaacctcccaggttattacactgtcatcccgggtctgacccacaatatcccaccaaacgcgggcatgatcttgtagcacgaaggctgcatagtttactctctcagttctcgtcacccccatattatcgaggat

SEQ ID NO: 35782 - DNA, 994 bp, Cannabis sativa
acaaaagtagagaaggctcccgagtcttcgctagtatgtatgttgataacaggtgtcctaccaagaaccgatttctggaaggaactgcaagctctaagacctgaaacgttggttgagttcttcgctatggcggagccgcataagaggattgaaaattctctagctaagttagagaagggcaaagacaaacgtaagtcaccagtgctgcggtcacgatctccaagtcctagagggaagaattccagaggaaggagtccgagaagacgaagtccacagagacagcaaagttcgaaattagccaagtcccctccaaagaaggaatcctccccgaagaggaaaggtagtcctcgctttgtaaattatacagaattggcagtccatcgggaccatatctacgccattgaagaaaagaacggggtcttcaaaaagcctcccccaatcaggggaaaccgtgataaaagagaccctaaaaaattttgtgagtatcacaaagatattggtcacactactctagaatattggtttttgcaggacgagatcgaagaactaatcaggaaaggaaaattcaacaaatacaagaaaaatgaagaaagtcatccctgagcggatgacaaagaagtagaccaaaatgcgagtggttcgaggactcctcgcaatatcctgactattattggcggaccccatatcgcaggagattccatgaagttgcaggagcgatatgcgagagaagccaaagataagccgctcaccaatgtgaacaacttgagcgaacggccgaagaagctgttcaaaagggtgacgatatcacattcatggaaagtgatgcgagatgggtccaccacccacattctgacgcgctggtcatcgtcgcaaacattgggggagataatgtccaccgcatactcgtagacaatggaagttctgtgaatttattgaatttttaggccttcaaacaaatggggttgcatgagaaggatctgcgacctgtgacatc

SEQ ID NO: 35783 - DNA, 1147 bp, Cannabis sativa
gatttttggttattttatattttatttttagctgatttatagttgtcataaggttgatttctcattgttttttagttgttttttttttatttttttattttttgttgagaaaaatgtatttttgtaatgtgaaagactttacaagcgtattttttaaaataaaaattataaactataaaattgtaaataaaatataaaaaagagtatttttaaaaatttctaatttttagtattattcatttcttcaatgtacaattgcagaacttgaacttgatgcaatttaatatttttattacaagtataaaataaattttattattttttaatgtaaaataataaaaatatttcataattattgctatatataaatatatcaataaaattataaaaatagtataaaaaataaataataaaattatacatttataattatataaattttacattatattaaatttgtcatatataaattgatttgacaatttgtcattttgtctggttgtttttttgttatgattttatttttttatttttgctttttcatgaataatcttttttataaattttttgcttattcatttattaataatattaatagaatattattattttgtattttaagatatcacaatacacatatatgatattttataattagttaatatttttttttttcatattatttattaaattaaaatttgtgagacttgataataaaatacaccaataaaggtatgccattattatggtatttagcacatcccttaatatttccttattaatatgtacatatctttattcattttaattagaatttaactttttattcaattatacataattttgtaagctttttattttcacttgttgtgtaccgcgtagttaaagtttttttatagttcttattgttttttgtattttctcaaactaaataagactatattaataattagtgtgtgtattttgtcatgtttgtaccgagtattaatacttttatctttttttttttaatctcactttcttttatttctttttttttttttttcaaaaaatctctctcatttttttactaaattttctcttttaattttttaacgtcttttttttttacatttttttaccattcttttctccttttttttttttt

SEQ ID NO: 35784 - DNA, 3075 bp, Cannabis sativa
  modified_base (208)..(209): a, c, t, g, unknown or other
ctaattatttctttatcctttagttctattaattcactggtggaagtataattcaagatcccatccaaatttgcacgtaactttctagtaccaaaataaacacgaaccaacattcgacctgttaagaaagtcaagattataaaattgtagatcatgttccaagccatctatattattagattcctaaaacagaagttgtaagaatcannttctctgagaaactttaacgagtaaatcaaaaaactaataacatgaataggagttcatgattactcgggatttaagttgatctactattaatcatcattataatatgaattaggtctttatgataaacgacgtgttaataatgatagctttattcatattaattcttgtcatatataatctctattatatacagcacattcacttagatatctcactgtacatcagttatccgaactaagattacttgcaccgtagaacagacatcaatgaaccttactagcaacccttgattaaagttccataactttaatatgttgctgattgtcttattcatagttaactggtcttagttttttgtacaactacaaaccacaacatcatatatgaataattgatatttaatataaatcattcaataataattgttatacattgatattattaattatttcgatttaattctattgagttaattaagaatctcttgtaaaagaaattagccaatttatttttgttttttatttttttaatttactagttagctaatgataatttcaaccaacctgtaatgctagtctacaagtacttttttttgaaacatgtctacaagtacttaaacactaccttagacattcatgatttttaagtactataagtattaaaaaatcataaaagtttaaggtggtgttgctgacatttattagtagtagtctgtgcagttcaataaaatggtattaaggttgagggagagctctgtcttggttattgtcttaatttaattttttgatagataccttattacatttattatgttgattaattatagaaaatatgaatattagtaaatacatatacataatagagtttatatattactcaaaccccaaacaagagtgtaattagcaatgtgggagtctagagaaaacccacatcaaaatattttattcaagaaaataacccacatcagaatcagatgtgttgaatagaattgaataataatcaaagactcactcactcacacaggacaaaggttgagttgtagtgctgcaatatagagcaatttaatcataaaaaaaattgaaaacaaaaagtttgatgttggaaaaaaacaaaatattagcttagtaatgtgcaatgtgttgtgctgtttccatactaaaacagttgattaatatttgaaagagtgaaaactaactgagaatgaaaatgaatgtttgaaactaaatatttgaaagaatatacaaattctttactactcagtaattacaaaatactttaaagaaacatgttcatataaacctttctcaccctgttgagatgtataagcttgtgtggttgagaaatatgatgatgacatgtcaagttttggttagactgtgatttagtgtctcaactcaacccccttaatgtcctattatatataagaaactcactaacttaaataggaaaacaggacaacagagcttcagcttcttttagttttagccaacatcattattcatcacccaaatcaaagaagaaaatcttggaagaaaacatgtaatataataataaaagattgaatggaatgagttaccttccttggactctgatttagtctctcaactctaacccccttaatgtcaagttgcagagattattcaaaattgtagatataaaacgaaacagaaatgtcctattgttgatatatataaatgcagctttgctttatattataaaagctaattaaataaatacattatgagtactattgagtaagagtagtctttccaaaacaaatacaatattaatttgtcctcatacaaacaccaactttaaagaatgaggaaaacaagagccaaaatacccaaacacaacacactgacactgcactagcctttcaaaaatacccaaaactttgcatttaaatgcttaacatatcatgccaccaatgaatgagcacacattatttgctgatccccttatagaagccaatgaatgagtacgacattgtcagctaccacatttctctgctgccaacatatcatcccaccttcaacaaccaatcaacatgattattgtcaagtacatacatataaagatgtaaaatcacataccttaaattagttgcaacggaagtagacaaattgaaacattctttcattttctagatcttcatcttccttctccctcatctccaaatatccacatgtggaatatgagatatcttgtgccaatcctccccgacttccttctcgcatctctgccccagttttgggcagctccaaatagacaatttcttcaggttggtcagcctttgcatgctcataggaatacattccaaatcccaacaacgcttaatccctaactctttaagagttgtaagatttccaagccaatcaggcaacgacgcaagctctgagatatatgatatttccaaatattcaagtgaggagaggtgctgcaagccctcgggcagcacaggcaacctttgagaagttatagataggtgttggagagatatgagttgattaggactacttggaaagccttcttcaagtgctggacaacttccgatgtcaactctccgcaatgaacaatgttcgaacattccctctggtaggcacttgagctcaggacaactactgatttgtaaggactgtagcgcaataaggccattgaggaagtcagacggcaactcctgaatctttttaaaatcagtaatcctaagatgttgtagagtagtgaggttatgtagcatattttggggaagggaagtcaaatcacaatcaatcatacaaagctcagtaagaccacagagattagagatggattctagtaactgttggctaacactacccatgttaggggtactagttagttagt

SEQ ID NO: 35785 - DNA, 2295 bp, Cannabis sativa
taacagaatttgggtgtaggagtttttaccaccaaaattttagattagggggttagttgcaaaaacctgcctactttagggggttttgccgcaaataacccttttattaatagtaatcagataaaataatagtttgcaatttaattgggacatctttcccattgaagacaccactaagattagaataagaaaaaaccgcttaattctcaaatcgtttgacaaaaaaactaaaaacaaaatcaaactaaaaagattgcagcatcaccattaattttaagaatatttatattcaatttcatctaccactcaaaaaatacaacagtaaaaactattacaataggttcattaactcaacctcgtagcttgagcactcactattatgcaaggtaagtaattgcactaccaaaaattcattcagtcacatagaacttgttattcccaaccactaacaacgatttaataacaaaccatcaaagaacaaaaaagaaccaacaataaaataaaattatgtcaccagacaagacttaaatactcaaaacaatgttacagagacaagactaaaatacttaaaaccatgttacagagacaagattactcacagtatcaaaaatcgaatcgcaatagcaagtacacaactccaatcaaatcgcacctatgcctaggaaatttcggtgggcttgaccggagaaaagaagacaacctcaatttaagaacaagaaaccttaatttttttaaattagtaattagtctttattttaaaaataatataaagattactgctttttagggtattatcttatattatattaaaaatacaaggtatcatctaatacatttacttttattctgggtactattagttctataatatatacaactaattatgtttggtttatacgaatgagaattgtcatggtaatcaatatatttattacgtggtttacttttcttttctaaattttgtaatccattacattgtaatggttattacattgtatatggtaatcctctttacaataaaaaaccattgtaatggtcattacaattacaatccattacaaaattaatataatattataataaaaatataataaaaaattcaaaagtttattttaccttttatttaaatattttataattataaaaaataaaagtaataaggatatttcagtcaatatacatttatttcattacattcccacaccaaaccaaacacaataatttgtaattaattaccattacgattcctattctattacattactattactattgtcattacatttctattacaccaaatcaaacatcacctaatttgtaagattttttttaaaatttttatataataaattacaatggttgaaagtcctaatggctagtgtacaaaatttatgcttgagtgagacggtgtccctaattaattttgaagtattgttattgggtactagtggtgcctaacactatctagagggggcgtcctataattggttactatttattaaaattttcgaaaactaaataagtgagagcttcaagaatttaaataaagattaagtaaaagagatgaataatttttacgtggttcggacgttagttattcctagttcacgagttagtgtattggccttttaggcttgaaaatgctacaaataaattttacaataaggaaccctacccctttctataagatggtttctctaagtctctcttagggaagaagaaaacttagaataaaaactagtagagcttcggctaaagttctgtcccctttgcatgaatgggtagtatgatttatataggctagagcttgggtctggacatacccgtgacccattcaagttttattgttaaagggagtccactaatggggtaaaatacacaaatacatgactataagtctcactaaggatatccagctcgtgggacaacagttttgtattgatgaggagaccgtttagtgcattacacgtgttgcacggaggtcacgcctaaaagacaaaggtgttaagggagctgtcaaacaaaaggggtgtatgcagtggtggtgcgcacactatcatgttctaacatagggaaaaatatttgatcttgcgtaaaagaggtggacacgtcattttaggggagacatccatctctcatttagcggtagacatctggtactcaacctgcgatagacatttggctctaggttcatggtaggcttctaagcgttatcctgtggtaggcatctaggagcatcacatgtagcctgcctcaagatgtgaccttatcgtcattaggaggtcttcattccat

SEQ ID NO: 35786 - DNA, 1346 bp, Cannabis sativa
  modified_base (1246)..(1266): a, c, t, g, unknown or other
acaggagcagaggttccagcattggcagggtttttcccgttgtttcctccgacacattccaccgaggggtcattgtcagaatccccctcgtccagatctccaaacttggcttgaaggcgagccatcattttctccattctttgagaaaacttttcttgatgggctagctttcgtttggtctcgagcaactcgttagacactcgaactacctcgggatcttgctcataatggtagtcgtcattgacatactctccatcgtcttcctcctcttcatcctcagcatctctctcatcattgatgctgccatgcagattgtttaagtcgtcctctctattgctcacgttagatgtatccccgcctctcgcatcacctcgacagggcgtgctctgttgagggggtttacttcctccatgacggtcttgaggcagccttgaagagtcttcttaagaaccgtcttttgtgtgaaaaccatggtagtaataacactattagttttacgtcttttttcagctctcaatgaaaggaccaaaatgtttaccgagattttcgaaaactaaatatttcagaactaaaaatataataaaatgcaaagataaagagatggagattttttacgtggttcaggtgttaattaaccttagtccacgagccaatctatcagcctctaagagcgtatttgatgtaagaaacactaactctatactctcaatttctcttgaaagaagaagaagacgaaaagtaatattgacagatttttttcactaatggggtaaattacatgcaaaatgagagataactattgggtcccttggaaacaattgtgcccgtgtgtgctggagctagacaattggggaccatttgtactacgtggacacgtgtcgcttaaagatttaacctttaaaagtagaggccacgtgtcaccccaaagctttcacctttaaaagcagaggtctgtaatatccgtctagcaaaaaagtggtcgaggtgtgcgcactaccatgcctggacacaagggacaagatctaatcctgtgtcaaaaaaggcataatcgtcactgggccaatcgggttattccaaaggtagacgtctgcgacactcctggacggtcgacttccgcgttaggccctttgagtacccgtccagatatcaactgggcaggattccatattcggacccttgcaggtccgggagagacaatatgtcttccacgtccaagaagccaagtacatgtttggcatcataactnnnnnnnnnnnnnnnnnnnnnaaaaacagaaaattattttttgaaaacaattaagcatgtttggccttgtttttttaaaacagttttcagaaaacaaagtt

SEQ ID NO: 35787 - DNA, 2974 bp, Cannabis sativa
  modified_base (2367)..(2367): a, c, t, g, unknown or other
  modified_base (2931)..(2949): a, c, t, g, unknown or other
catttttcgcatttctgagagtgatccgccgaatcttcttggaccgtcggccaatagtacccctgccgttgtaccctcttggcagtcactcgtcccccggaatggcttctgcagtctccttcgtggacctctgttaagaccaactttccttcctgctttgttatgcactttaagtacggcccgtggtaggatcttctatatagctgattttggaatatagcataccttgaggccctcattacgacttttcttgcctgtttgggatccggcggtaatttatcgttccttaagtattcaaggattggctgcctccagtcttcggatgttcccgtcggaatttcggtgcacttaacttcttcttctgttggaatgctaggttcggggataaagttaaatggtattgttcttgtgacatggagggggaagaggatcccaggccagctagggcgtcggcgtgcatatttgcttctcggggaatctgacaaatctagaaatagtcgagagtcgaaatcaactttttacctcggccagataactagccatctttagttctttggcctcgaaatcccctttaacctgctgaactattagctgagagtctgactggactaacaccctttcggcccccatttctttgaccagttttatcccatggatcaaggcctcgtattcggcgtcgttgttggtggctcagaaacccaattttatggattgttccatcacttctccatccagtgatagcaacactattcccaccccgcttcccctgacattcgaggacccgtctacctttagcagccagtccctcccggcgggttcctccttgcaccggacaggttctggagttatctcgactaggaaatctgacagcgcttgtcccttaatagcagtccggggcaggtattgtatgtcaaatttgctcaactccaccgcccatttcattagtctcccagatatctcgggcttatgcaagactcgttttagtgggaacgatgtcataaccgagatcgtatgacactggaagtacggccggagttttcttgctgatatgactaaggcccacgctaatttctcgattattaggtatctaccctctgctccggaaaaggttttactggtgtagtagattggtagctgcgcctttccttgctcccttactagtaccgaacttgcggcgtatttagacaatgaaaggtagaggagtagggtttccccgggctggttttgacaggacggggggcgttgtcaagtatctttttaacgtttccaaggctagctggcatttctcatcccaactgaatttacggtttcctctcaataggtcgtagaacggtaggctcttgtttgaaagctttgagatgaagcgacttagagcggctatcttcccagttaatttttgtatgtctcttatggtgcggggtcagcccatcgcctgaaaagcctctatttgatccggattaacctttacccctcgtcgcgtcactaggtggcctaggaactttccacacccgacagcaaaggcacacttggctgggttgagtttcatcgagtgggcaagtaggatttgaaaacattctcgtaggtggtcaacatggtcggcgccatctttagatttcaccaacatgtcgtcgatgtaggcctccatggtcagacccagctgttgggcaaacattttgtttaccatacgttggtacgtggccccgacatttttgagtccgaaaggcatcacttcgtaacaatacgttcccctctcagtgatgaatgacttttatctcggtcaggagggtgcatcatgatttggttatagcctgagaaagcgtccatgaagctcattaactcgtgtcctgcggtagcgtcgattatcatgtcgatgtgtggtagcggaaagctgtcctttgggcaagccttgtttaagtcggtgaaatctatacataccctccacttcccgatctttttaggcactaccacggggttggcgagccaagtaggatactgtacttcctcaatggtgtcgttttccagcatttttgtgacttcgtcattcaccgccttgttccggtccgcccccattttcctcctcttttgcttaaccgggatataatttgggtttacatacaatttgtgagtaattatggtcggatctatcccaggcatgtctgagtgttcccacgcaaacacttgaaaatactcttttaaagtcctataatttgattctctcggtctcccgtaagtcccatgccgatgtaggttgtttttgtcgggtccgtcgggtgtatgggtacttctcgtaactcctcaaccgcgggtgactattcttttgccggggcggagttaattaattgctataacttgtttttactcctcaangatgaggtgtaacactcgcgggcccccaattgatcccctcgaatctcccttacctcacccttacaggggaatttgaccacttgatggtaggatgatgcaaccgccttcattgcatggatccacggtctgccaaggatggcgttgtaggctgatgggcagtccacaactaagaattttactgacttgttgacttcgttagcatagaagggcagttggatgaaacttcaagcaacagcgctttcccccgaaaatcctactagtgtgacctgggtgtcctgggcttttaggtcctcgatctccatttctttaagaactccagcaaataaaatgttggctgaactcccagtatcgactagcatgtgtttcattcgtacgtgggccacatccaaggtgatgacaagagcgttgtcgtgggggtgctccagctcggaggcttccccttggttgaacgataggagtatgtcggggccgtcgctgtcgattaccgccattgcctttactgactgaatccggcaggcgtgggccactgaagctcgtattgagttcctgttggaaattattttnnnnnnnnnnnnnnnnnnnaccaagtatgttttattaacatcct

SEQ ID NO: 35788 - DNA, 1138 bp, Cannabis sativa
  modified_base (799)..(804): a, c, t, g, unknown or other
ctttctaaaggcgaaccaggatcaattcgcctagagccatggagatatgatagggatcgaccctaatattatctgccatcatttacatattgatccaagctactcagcgaagaggcataaaaggagaccttttgattctgagagacaaggggcactaaaataggaagtggataagttgttggttaacgacttcatacgcgaggtattttatccctcgtggatagcgaatcatgttctcttcccgaagcctaacagaacttggagagcttgtattgatttcactgatctgaataaggtgtgcccaaaagattattttccactacccaggatcgaccagttagtggatgcaattgctgggcatgagcttatgtcatttatggatgcatattgtggatataaccagataaaaatgtatgtcccagatcaggaacatacaagcttcgtaacaaacatgagactctattgttacaaagtcacgccatttggattgaagaaagttggggcaacatatcagcgattagtaaacgaaatgtttgtaaaccaaatcgggcagaacatggaggtttacgtcgatgatatgttagtaaaatcaataaaaagtagggatcataccacagacctcgttaaatgcttcaagatatcaaagaagtataacatgaaggtaaactcgaaaaaatgttcctttggagtttgctcaggaaaatttttgggattcatagttaacgcgaggggtattgaagtaaatcccaaaaaaatcaaggcattaatagacatgccatcaccgacaaagcctaaggannnnnnagccctgacaggaagaatggatgcacttaacagattcatttcaaagtcaactaataagtgtgtgcagtagcgacgcctccaatattgcgaggaaacaaaaaaatcgagtggacaaaagaggacaaagaggcctttcagaacataaaaaggcatctagcgacgcctccaattttggcgaaaccaataactggagagatgttgtttctctatttggccatctatgaagatgcgattagtgcagccatagtgcgagaagagggtaagcaccagcaaactatttactatgtaagtaaaaggttactgggggcataatccaaatatccccctctagaaa

SEQ ID NO: 35789 - DNA, 954 bp, Cannabis sativa
tagtagtgggaagggtataagttggatgagttaggataggttgtgtcgtcataagcatgcagggggattgggttttagatgtttgagatgtgaagactcggtttgatcgagtcaaacctattatatatataataaataaatgaataaaataacatgtatgtttatatatatatatatatatataaaaatcaatatcagattttgaaaaaaacccacctctatcgtgtctctctctccctctttctttctctttctctctcttcgagcttcaaagaaaacccacaaaccaccatcaccaccattctccggcgacccacctttagccaccgaccaaccccacgtgtcggacaaaatgaaccccctagtgccagcgacctcacccctaaagtggcgccactcctttcgccaccgttagtttgtgatcgcaagtcaaagttcggtgattcaaactttgaaaagattttccggtcacctccggtgtctgtttgacgagtcttcttcaccactagactcagctcatcgaggagaacaacctacactaaaccattttgcccagctcgctactttttccagtgatatttttatagctccgccccttttcagcgattttctggcgacatcgtgtacagttttcacaaacggtcgacatgggtgtgatctactcgtcgaggtggttgttttgatatacactacccctattttcagtgacatttccggtacaccaatttttactgtcaccgaatgttaatgtgcaccacttaggtgaggcttcagaactacaaattttaaatatagtcatattatatgttgttggactcggtttggaatgtagaatgcaatgatgatgattatttaaccatttgatggtattagtgagagtaatatgtaagattggactaaacaattggagctcgggacttgagagcttaagattgtcttttggacaaagtttaa

SEQ ID NO: 35790 - DNA, 2693 bp, Cannabis sativa
tttacaacaattatcccctaaaaataggggattcaattacatcccacgtaaaatgaatgcggttaatatttgaaaattacaaagttgtgattggcccgcttttactgggtcaaggtaaacgtgcatttaatatgttgcaaatcgtatcgtctgggacgtctctctaggaacatggcaacaacaaccctggtagcgagctggagcttttcccacatctttctgaggttgatgctgtaattctcgtcttctaatgcgtagcgaggttgatgccttaccttgtacacttgaagttgcatggtttctcgttaatgcacaaattaacagtttgtatatttttatctcgcctaggaccattcattcaaccgagttataaatatactctgtcaatttcatctttaacgagttttccatttcaaatatgattactattacgtgtgttgattcgtattctccctagtctgacacgtgtcctcttctgatgtgctagccgaattttgagtataacaattgccccttaaaaagttttttttattaaaaaaatgctttttaatgattacagacagtatttttgtcacaatttcttttgagaaaatgcacatcctttaatattggcagttttgcggtttcgaggcacatcaatagcattaatggtctgtcttttccatttttcttctattctcattcattagatcttccatactatgatctgatggttgaaaagtacaaggtattaacggtaagaatcaaaatttctaccattttcctcttctctaaaaatttatgctttctgaaactttcactcaaactctctaaactagtgcatgccatctttatatttgacattctttctacgaatttactcagatctgctcttcgaatcccggtgttcaaaaaatttaccgcgccaatcaccacgtcttctctcgcagaaatcttcagcattcaacttttcagcttcgcacagtaagtatctcactctccttttatgtttatttgagttatggcttgtgttacatcccactacttcatttgttttagcatttaagctcgtacttcctaggtgattttttagggtttatccatagtttaggtttatcatattcctcaagcttctagtttgacaaacttcgtccaagaattgggattttctttcttttggcaaagatgtcccaatttggttcagaggtttattctccagaatctgcaatgccagaatgtcccaaacatatagcttgcccatataaactcagaaaccttggacctcaacccaaattggaagtaaacgatgccaggattagagatcatttgattaagtcgaaacaagaagagactgtcagtcgttagaggcagtttttacaagaaatttttgagggtaagcgtcgctttttgcgagacgctttttgctagtcgttatggtcgacaacagtagagactcaaagaatttgataaaaatgtcacagtagtataatataaaattttagaggtaccgtgaattaagtacgaaaggtataaattatgtgtttatttggtctaatatggagatgaccttaatgcccttgattttttttatttgttgtagtgtagtttaaggtacaaagtggtagtttgatatgtatatacgttggatagctattacttaactttatatttagtttataatactttaaaattaagaaatagaaattagaattttgagataaatcactctttccttcatctctcttggctgaccataccccaagataaaattcaccgcaatttcttcaatttattttcaaactttgaagttttgaaatttgttgaagtgagtttgatttggcatatagaatagttaattgaagcttcctaagctgaatctatcttattttctttatatttttcattgaattgaaaatagatttattttggagggaagttaagaaaatatattttactcaaatacaaattttgctccaagaattctctctaagatagttaaaaataggataggagacctcgtcctcaagttcaagagccttagaagcatcaaaacgacgtcctgaaagctccgaaaagagcacacggcgcccaggttgacatatgacttggtgcgttaggttttgcttatccgattctgattctgtctcggtcgttcatttaattttttataataagtgagacccatgaatttagaagagtcaacaaaacttcatattttcacttttctagaaaagctactcactcaaaaattgagtagttttgagtctcctgttttcgccaaacagtaagatctttgagaactggtgaccagcttcaccagaacacaaaaactggcttagtgatttccaaatatcacttaggcatcaaaaaatacatcaccgacacgttttcttactcacccagcgtccaggttgacgtcacatgttaacctgggcgttgggcccaaaatatcgtttagtaaaatgaccataactcactcaatattgatttgattgatgtcattaaacttgagtttcaaagctatttcaatgctttatcaagtcatgtctcacactccaatcacaattctgaagttattaactccaaatttactctcaagtgagttacaaatttaagctacaattaactcggagtgggccccgcatgcgcaactgtgacagacagtagtcccgtgttccgcagggggaactaccgggtaagctgtgcaatcccac

SEQ ID NO: 35791 - DNA, 1826 bp, Cannabis sativa
  modified_base (1172)..(1175): a, c, t, g, unknown or other
gcgcttgatgactcttccttacggtcttcgatcatgcaaattccttttgaacgaagtaaacttgcgatcgacgggccttctcgctaacaaagaatacacttgcgattacaatattcccaactatacttcttggcagcaaataattgttccacccgaagaccaggtctgggatcgcttggtctaagcacaatatcttcaaagcactgcccctcgggaatctagtgaaggaacatcccaaggtaatcaatgtggctggtcacctactgtacttagggttgagcataatacattagttactttccaagactcccgtcttaatttttatacttggaattccattctcgtggaccgcattactcataagtttgatagttggtaccctagattccatcttcagatcaactgtcatgagtcattttatggtatagctgagcaatatggtaccattgaagatagggcaggtcacatagatgcgagctgggatttaaaaccaatcgagccttttgatatattcaaaattacatgctgtagggattttagctgatattatggtccttctaccccctcatctagtgatagctcgccttctagaaattttggtaaatcccttaagtggaaatttatactcctcccctttgtaatcgtctcttataatgattgtaacgcctcatctcgttttgcagacatgggttacgaagacatcctggatcgtaaggggaagaaaaggtcatccaaccctggggttcccattgctgccgaggtggttcctcccaagaagcaaaggaaaaccaccgctcaaaagaagaagttatcggctgagcctatcgatctcgaggtttcggacagagagattcaagagcaagttcctcctccaattgttcctcatgccaatgcccctcatctcgaggcgactcccgctaccgcttctccgagctaggccatcaagaccctgtcggtcatagctggagaagctggctctgagtttgcccaggcatgcggggtcgcttgtttgcacaaacttcaaactctccttcccccagattgggattttctcaatcttaggagtccaaaggagatgctttcaaggaccttggactctcacttcatggtatgtcgactttgttaatataattatattatctttttatacctcttttatactcatctgtttnnnnattctccaggcttcctttgcttcttttgcttccaatcgactactttctaagtggcttgagtatttgaagggcaagactcacaaattaatatcccaatgcaaggatgtgtgtgagcaatgagacaacgcccaacaggagattactcgcctcaagcaggaatctgagaaagcgaaggaggaagcagagacaacaaagaaggaagccgagaaggcaaaagaggaggctgaaaaggccctaaaagtccacgctgatgagtttgaggagaagcttgctgagaaacttgccgagaaagaaatcgagaccgtagaacggtgcgataaagttggttttcgcgctgtataccgagcctggctttggaaccctaacatggataccaacttcttggaggagaaggaagaggaaactttagctctctacgaaaagaccaagatggaagaagatgacgaggttgaggaagaagaagaaactctgtccaagtctcccaacatgtagacttggtttatttatctccttcttttttttttttaggaaatggcccttttgccgagacaatggttttgcccctagtggcaccttttttttttgtaaagacatatttgcaaggttggatggccaactttgctttttttttttaatgcctcgcacttttaa

SEQ ID NO: 35792 - DNA, 1444 bp, Cannabis sativa
aatttatatggtattttttttaggactttttatggtatttgatatgccatatatatgtaaattaggttttcaaattccatatttaatatttttatttgtttaggtagttatatttgtcactaatgctgaaaaagtcaccagagtttgctaccggtgctggaaaaatcaccaaagtagcggtcgttgccggaaaagttgtcggagttactacagatgccaaaaaattcgtcggaattggcattgtcgccgaaaaatcactgaaaaaatcaccaagaaataggtttcttgaagaagaaaccggtttcttgatgaagaaaccaatttcttgatatgaagaaaccactttcttggtgatttttctggtgacaatgccaattctgacgacttttctgacactggcagctactccggtgacttttctagcaccgacagcaaactttggaaaagtcatcgaaattggcatagtcgccagaaaaattaccaagaaactagtttcttgatgaagaaatcagttacttgattttttgtgattttaccagcgataatgccaattctaatgactttttcggcaccgacagcaactccggtgagtttcccggtgtcggcagcaactccggcgactatgccaatttcgatgacttatttcagttaactttattgtttaacattaatatttcggtatgatttttcatagtgtcgaatctggtttcacaaggtttataagttcaaaactggttttacaggttttcaggaatctataatgaggttgctctattttatgatgttattgtatttttttattttgagtttctttttattattttgtttctaggtttgaaattggttttcacacatattttgtttcagattattgttgtgcattgtgtgttgttttgtttatatttatgagtatttttttgtgttttttttccatttggttgattgatgaaactggtttcaattattttcattgtatatgatttttattttattttcataatctttgtaattgttgtgtgacgaaactagttctttgatgaagaaatcactttcttggtgaagaaaacggtttcttgataaaaaccgtcttggattttttcggtgattttgctggcgacaatgccaattctgacgaatttttcgacgccggcaataactctggcgaattttttgacaccgatagcaaactccaagatagtcgtcagaattggcattgtcgccggtaaaatcaccaagagaactggtttcttgatcggtttcttcatcagtaaaccaattttatgggtgatttttcctgtgatttttttggcgacaattctaattctgatgactttttgggcgccagtggcaacttcgacgactttttcggcaccagaagctactccgacaacttttcatgtgctggcagcaaactccagtgactttttcggcacgagtgacaatt

SEQ ID NO: 35793 - DNA, 1230 bp, Cannabis sativa
tgtcaggaaagactccccctcgtaaactccttcaggactcctcccatcaacagctccagggaaggctcgttgtcagctccggccagctgctcattcacctcatgaaccaaccaattcatgtagtgggtgagcatctccttgcctcttttagtgtctgggtgcagtgatggaggtggagtaggagcctggatttccttcgactgttcggtcctgtccaaacttcctccttgagagactttagacttagcaactttttgggcagaagggtccacaacggttagctcctcggaaagatcgataatagcttcggccggtgccttctctctggatggggtcgtctcaccgcgcctagacttcttggcaggaggagatgagattgagcttcctcccactctcttcttcaaagcttcaagcatcttttgagacatgtctgcgcgaaataaaagcaacatggttagagaaaagcacttgaagtacgaagtataataatcaagaaggttaaaaacaagacaaagaatcttgcgaagcgcttgcctgagcaaaactcgaaggctcatcatcacttgacaagtctcttatctctgccagcatggctttcccctttcctattacaggagtggatggccgagcaggtagactgggctccttgattcgaattgcatgttcaacaggcctgtgctcggcaggaagcttcttcctccttttgagtggagtcacctgctcttcctcagcctcatcttcaggatccaaaggctcatgagcatactgttttgctctcgcaccttccttcaacttagcttcacgcttaagttgaataagctcatcctcctgatgagctccctcaatccggccagcactggatttcctctttttctccttcacaggctgaggaatgaaatccttctggtagagcccgtactccacaaagttgtcctcagaggtcaacaaagtgatattctgggcagcacacggcagctgagcaagcttttgagctctatcccggagggcaagtgtgaagggagggcggtaatccactgtaggtggagcccataccatccaccattaaatactcgtcaacaaaatgcccaattttgttaacggccttatcgccgatgcccgtcaaccactggtagtctggctgagagaggtagaagtaccccgacctgcgttgcttgggggtggacttcaaatcaaaaaaccagctaacctcatggggagaaggcatatccc

SEQ ID NO: 35794 - DNA, 1069 bp, Cannabis sativa
aaaagtttccttatcgataaataacatggaaataccctaaatatctcaaaaatgggaaaaactagggttttaaaaactaccccaaccggcagaccggttccaggacaccaaccggacgaccggttgctacaggtcccccagaactggaattccggttctgtgctgagaacccgaaaaattctcccatgatctcaaaatcaagccaaactttgcaaaactctcgagtatacctaaacaattgataaacaacattttccaaccagtatttcacagaacaaaccaaaaaaactcaacttgccattaatgatcaaagctttgaactcaaagcttaaacttgcacaaaacctaaaccaactatcaaaatcagctgctaggacccttaatcaactcaaattaaacttagaattcaaaccctaagcatacctaaacctagcagcccttaaactcaaaaatcacatattgaaactaaaatacaacttcaagaacttaatggaagaagaagctagggcttaccttgtcttgacttctcttgaatcccttggtgaaattacaaaattcagcagcaaccctcttgttcttggctgggttcgaagagagaaagaggaaaggaaagagagaatttcctattttttggcttttcttctaattttactaaatgagataaaaagttagggaaatcaatttcccttggctgaaagaatttgcttgctaggtgtcaactaactaggcagccacctatctcctctcttggcaattactaaaatgcccttactcataaaactagggtattttcaaggctaggggtaaaatggtcaactcccataaccccgcttaatcccgatattttattttctctaaaatatttccaactaagaaataaggttctaaacttatccatgtgatcaaattagccatccatcgcattttccgttgtcgccgagtaaaaattacaaaaacaacctatttcacatataaaataaataatacccctagagtttaataaaatcttcgaaatcttcgaaattataattctaatattcatttgtaaatattagggtccacaaataaa

SEQ ID NO: 35795 - DNA, 1502 bp, Cannabis sativa
ttcttcttcttctcgacaaacccccccccccttaacccttcttcttcttctagccaagttttcaacatctgcactactggtcaatttggaggccatcggctcggttgccggagaacgactgtctggccccaggcagttgctcagcgaggattgtcgaaggaatgtctcatgtgcgcagctgaatcagggtagggttttctgggtattgggtgggagggtttgtcgatctcgacgatgttgatggcgattgtaggtggtttcaggggtggtattaggggttttggggttctgatggtagtaatggcaaaagaagaaaaagaataagggttagggtgtttttgtcgagaagaagaagaagggttaggggggttatgtcgagaagaaagagaaagagagaaaaagaaaaggagaaaaaaaaaagattctttttaaatctataaattgtttctctttttaatttttaaattatttataatcactacaaaaatatcacttttaccagcacagttcgctactgcgctggtaaaagttactgcgatggcgaaaaggtcaaagttttaccatcgcacatttacagtggctaaaatctaacttttaccagcgcatttacgcactgagaatagttatttttgccaatgcttttcattttgtgctgccaaaagttctaataccaatgttattgccaaccctttttgccaacacatcagaagtaaattttatcttaccagcaataccaaacttttgccagtacgaaaatgtgctggtaaaagtgacatttcttgtaatgaattattttttaaaattaaaattacgtggatcactaaaaattttgccacgtgtacaagggtgtacacgtggacagtccaccgtggcacttataactgtgatttttggacggaggggtatggagcaaaatggaaccagggttcagagagttatgccaccaaaatttcaatttttgtggttaacggttacaaacctaaaaattagggtggtttagccgccaatattcttaaataaaattaaaaaatactaataataatataactacgtataaatatatatttagtaagttaaaaaggcaattttttttaaaaaaaaaattaatttttattatatatataaaaaaatacatatatataagcttttaaaccctaaaatatttattgttttctctatatataatttcagtttcagtaaaatgggttagagttggtcaacacaaacatgacacaattttttaggaattgggttagggttaaaaaaaattaagcgcaagttgaaaatggatcaacacactagcttacgaaatataaaaacaggtcaattacaatatgtctcaccagctaatacacgtgacaagatgacatgttttgtcattcctactctcatattgtatatatgtaatgttcccgcttcaagcttcctggaatgactcatagctcttatacacgagtacgacactctggctgcttcctggaatgacgactgaccctacagac

SEQ ID NO: 35796 - DNA, 1090 bp, Cannabis sativa
atattaatttccatttttcaatccatgtggagacgatactcgatttatcactctattacttgttaacgattgcgtacacttgtgtatacaattttcaaatatgaaagattaaaagtcgaagtgattttatgcgtttaagatgccaggggtcaggattgactttaatcgccaacctcgtacgtctcataccttcacacttaacttttattcttgttattttacagttgctaacatttatctatgtttgcaggtagaccgactcgatctgtactagacaaaagtcgtgtgaaaattgttgtagtgttgagtagccagttcaagatcgcggctggcgtttattgtgtacttctacaaaactgtgagaacacaaattgattctagacgacgctaagctttaatgagaaccaatttataaggagccttccaaaaataaaaagaaaagatagacaagcgtctttccaaatagacctcaaaacaagtatcaggtaatatgatttgacgattattgattatgttgtcttaatttttcaaattctcacctttaatttgtgtatcttatcgcaaatatgacttttctgaagcaataagccacaaaagacattattataatttatagccaaacctaaattgatgatatattaattgagagatatttggattgttaataacttgaacattaaagagtaatcctttttcaaaaagactatataaattttaattaataaaatttacatataataattgttgagtcataatcgacatttgtacccaaacatccttaattaaatttttttatgtaataaatttaaaaaaccaaataataaactattcttatttcatttttgaaagtgaaggcggtgagaaagggccatcactgtatataaaggtgttatacctggatcatttgtataataaacataaaatatcttcaagtgcatcatctgttatatatcagcagccattacttataatggaaagtaacagcgaaactaacgggttcatctagcaattctgataacactgcttgcagactcagctaattgattttatttaatcaattataattttaaaattaaactatgtcttattt

SEQ ID NO: 35797 - DNA, 1919 bp, Cannabis sativa
  modified_base (1605)..(1610): a, c, t, g, unknown or other
  modified_base (1753)..(1754): a, c, t, g, unknown or other
  modified_base (1812)..(1823): a, c, t, g, unknown or other
tggagggctcacccatctggcaccaaaggcactttgcctcttgtgaggaactgcttcagtaagctcctcggtgacatagtcctccccttcgactaagactttagcctccgcagacaccggctccccggcctcattatacctccaaaatttggaggttcagccactccttcctcctcgacctcggaagggctaccagggcggacgtcgtcctgctcctctatcccctagacctcaatgtccccctcatggtcttccacttccatggcgggcagatcctgctcgacacttggcaatgtggcgagctgggtcaaatgaggatcagatgcgttgacttttcgcatcgtcttctttgtgcgggccatcatcctcctcccggacgggtactgatgtgtgtgtcgtgcaacaatgacggcagggacagcaattggaatgccaaagttaccagcacttggacggccaacaggaagggtattagcaacacttggccaaacaatgtatgtccaattggatggaagataacgcctccaacctttcttcaattcccaaatgaagtggttgtacccctctcctgcgatctgctcggagtaataatggtgttgcactatgggttccggagtaagagaacgatcactactcacctccctatcttcaaagctcgagttagaaagtccatcgcttgaagaggatagactggcacgaagacgagattgatcctcgtactgaagttgaagcaagtcccggtcaatttggtgttcacctccccaaaactcaccagggttcatctacaaaagataacacacgagatgagtgtttgtctgggatatcaaacaataaacaggaaaatatgccgaccaggagtactcaacagattcaaaggacaaaaaatgtacaaaaatcaagtgaaaacccagaagtttgaaatttttgggtttagggttaaattttacgaagcttcgaatgagcaaggtgaaagacgaacaatgtgcgattaaagacaaatgtcgtaaactatgaagccgtgtggactattacaggaaaaactacaaagtttcgagcctagattttttatggatcttctacaacaagtcaagaacaaatgcattttctacaatgaaagccaaaaaattaaacatgcaaagttaaaagaggagaagaccgaagaattactcactgcttgaagcctaaacgaagtccaaacgaagctgctcggatgcctttggtggaaatctcacgacagacttggagtaaaaatccttttttggctctgagtttgtttagtagagaaatcagtaaaagtaagttatgaaaaaattccagccttatttataggcaatttggttaaaatgggtaatcattctgaaatatcctcagacgctttgattttcccccaaaaataaatattgggaaattaaaaacaatcaagtgtaactgtcaaagcatgcaaaagaaactgggtttcgaggcactaattaagtcagagcattaattagacaaaaaccgaatagacgcctggtcagactcacatcgaatcacaaacagacgcgcctaacacttgtcacccatttaaaagccaaggcatctcagatgaagtctacatgcaacttnnnnnntcccgtacagacttggggggcaaatgttatcccaattttggcactctgacgtggcatcacatgctggtgacacgtgaaatctgttggaatttattttaccagaatctagatttactacaatgtatgttgtttaacatcctaannatgaatttttaaaacaatgtaaattaaacacctttaaagtttgagaaaccttacattnnnnnnnnnnnnattaaatgactccttccgctcaaatctctaaccctcgtatcctttctgtagcagaatatcaccaagatctgagcccgattctccttctcttgaact

SEQ ID NO: 35798 - DNA, 4710 bp, Cannabis sativa
  modified_base (3513)..(3534): a, c, t, g, unknown or other
gggcataaaacccaacattttaagggttttatcttcaacctcctccttcaacgtatgcattgcaagagtagcattgttagctttatactcagcttccttaagttgttgccttgaactttcaacacgagtgtctagcaaaacttcacgagttttggttttttcgtaagcagtcttataatcatctctacccttttgtagcttctagattttagctttatagcttgttacaacgtcgtttgtggttggctctagcctcgccttaacttgacgctccactagctttttgagttggactttggctttttgcaactcaaataaagcctcatctttcttctggtcataagcttcatgctcagccttaaaagtctcaaattccaaaagagcatccaccgctaatccatgtgcagttacattaaccgttcgatgaatatagattagatacactcttaaaaatctaaataacaaatttgtcaaatcatctaataatgatccaagaccattaaaaaataaatgtcttttattaaaagtaaacacagctgctagacacaatctgtttcaattacatgagcagtaaaatttaaagaaataatccaatccaatccaatattatcataagtctcacacttagattaaaccacatgaaaacaacctgttaacagaaagaaaaacagaaaaatgtaccaatactagtaactaacataatatgaagaataagtatataaataacaatactaaaatttttaaaatattgtactgaagcaaaaatataatattaaagtaacaatagtattgttaataacaattttttttttttttgaaaacagtatatattgtaactaatagggatgacaattatacccgcagattcgggtacccgcccctaatggggcagggatgggggttaacttttgggggctgggcgggtatgggtttaaatattcatacccgagtcgttaacaggatgggggagcaatccccatacttgcccgccccgtttacatccctagtaacttaaaaaaaaaagatgagtataggttataatatatttagatttggaacattaccattctaaatagcctctctctcaagtcctaaaattattctaattaacttatgaagaacaacattaaattgtctaagaacatgatgaaaaaatactaaaggaaagttagagagaagtgtctctatttgactaatcaaatctgagagtgcacgacttgtcttttcatttatgctttattttattgactaacactttataatcacttttaatgacactgaaaggacacttaaccattaaacaccggttgagagcccaaaccaatacttttgcttcagccaaaagaagagacaagtttccatgcaaaagagaagacaaagccgcaacaacctctcctctataacttcttactgctcctccaatccttattttatttctgctattatccatggcaacatcaacacttagtttataacaatttggtgtgactgcattattgttaacttgactcaaaacacctctgactgcatccatgtccgagggacaatttaataattaattaagtttgcaaataaaaataaaagtgaacagaggggcaaacatcctccgatgtattataattgcttgaaatatttaaagttaatcctacaataaaatgaaattttatagcaaataccattaattctttcaaaatttagttttaatttgccaataaataagaaatagtcaatattcaataaacaatcctaattacatacaaataaacagataattcttctttacgcaaaaataaaaaatatttacgacgaaatttttttaatattttcaattattatgtatataaccataactaaaaaagaatatcggtaaaaatattttcttttataattttattgcacccaactaggatagttaagtacaaactcagaaccttgtgacaacatattaaataaaaaaatagttttatgtttttctcaaaaaaattataattattatttgtttgattaaaaaaatctgatttattttattttatttaaatttttatatttttaattaaaaaatagaataaataattattattaatacatagtctaataatatgtcacgacgtatttttaagttaaaaaagtacgtctgcaacaaaattataatgtaacgccctaacccgtagagacgacacgtgtgtgcttttataaattagtttaataaaattgtagattaaattcaactaattacttttaaaatataaagttacaatatttaaaagtttctaggttcggggatccttttttataaactttacaaaagtgttactatcacattttattacaaaacattaatacattcaaaatactgtgaacccatagtcacaacaactaggcactgcatgccggatgagctgatatgtacattcactggtgaagacctctgactcataattgatctattttttccttttccttacctacactacgaagcacttgtgagtcacaaagagtcagcacaaaaaccaggaatacaaactcatatagcaataattaataatattcaaataactgattagggaatcacaatatgacacaacatttacaatctcaagcatttgtctaatacgacaaattattctcgatacttcataaaatatccgctaactctcattatcaaatgagacactcgatgtcactatcgttgcctaatgagacaaccgataagtaagaacctaacatcaatttccagtttgagtaataacgataattatcgtgtcatatactgacataaaaagtggtacaattgttcttttcttacctcaaatccaaattcaggtgtgctggccaacttaagtgaaaaatgtttcaacgatcctaggccctatgtcacgataatggtaaatcggtaaataatttgcttaaacccgttctaagacttaaactcaaaatcaaaagtttctctatcgataaataacgtgataataccttgagtattgataaaatataaaaatctaggcacataaaaacatcacaaacagttcaccgtttactccaaccgattcactattttactgagttcttgcttggggaaacagttcaccattttatacgaaatgattaactgtttttctgcagagtcaaccaacacacgaaccctaaaatctcaaatcttacccaaactccaccaaaacctgtcaaactctccagaataattctcatatcaattctagaggtgtatgtcggtcggtttggtcagtttatgctatattttattcaacccaatataagaatcgggttacaaaaatttaagtgcaacccgcccaattaaaaaaatagtatctcgtctaatgaaattggtcggtttggtcgggttaacccgtccaaaccgaccactaattttatttttattttttacattcaattgttatattttaattaattgtaataatgagacaaatatatatattgaatttaaagttcaaatcaaccaccataaaaaaaaacatattagttttaactttatannnnnnnnnnnnnnnnnnnnnntatatgatatataaatatatatatgataaaaacatataaatatatataaaaactctcttaatcgggttagttcgggttggtattattttcaacccgctcaatataaagattgggtgggttatattttcgtcgggtttttcagtttgtatttttcattgggttatctcggtttggtttgggcggtttacaaaaatttatgtacaaccctaatcaattctaaacacaaaccataacttaattaacgcaactacaaaaccactattaaagttcaaacttgagttccatgaactcaaacttgaaactttccaccaacagcagcttagaaactctaaataactcacataataaaacaattgaagctcaaaaactgatttaaacacaaacctaaatacacagaactgaattcatgaaaaattacatttaaaaccatgtttttcttccaaaatttaaagagaaactaagatggcatttagttagaggtaataaaatggaatggaaaggaaaggaaacaatcttcattccactcatttatttggttacatattaaagtgttggaatgtcattctaatagaatggtctttccaccattttcgtgaaatgacaattccattttataatggaaggaaagaccattccaatgcatgatgaaaaaaaatttaataattttttttatgcattttaaattttattccattcccatttctattcttatatttttattcctcccaactaaacgtcacataagagcaaatgttacctcaagcttcctccacaccttgcatcagttcaaacaagaattaaaaactaagaaaaagaggaagatttggtctgaaaacccttgtcctcctgttggtttctaggtgccaatagagaaaagaaagagagaagttgatgatgtattgatttttttgtacaatgcttatctttctaatttattttattattttaaaacctaattacaattggtataaaagaagaactaagctggattaaaactcaaccataacggaatgtggagctagagtaagctagtcgaaattcattacttttgatttttttttttagggttattgtagaggattgtcgtgaacttcttgcatctttaaacaatattttcttattttttattaaacgatctgctaatatggttccttataatcttgctagagcatcttg

SEQ ID NO: 35799 - DNA, 1966 bp, Cannabis sativa
gttggaaaatatgtataattaagctcactagaaaaatatgttctctaattaaattaatactacttctaaaaatactatcatattatataatttaaatcgataaaatactatcggcaaaatgcaattgaaatcatataatataataaacaccctaataattaatagtttaacttacataaaaaaaaaatgtactattaaatttaaagttcaatttagaaaaagagaaatttaatataacaaatatgaaaatgaagaacaaagagaatcaatatattaaaaaaaaaaaattgcataaactaacacttgagtctttgtcaaaaaaattaatctaaaaaagacattgtctttacaccaaaattaataaactaaaataaaaaaaaaaaacagtaaaagataaattttggtatactaattttagataaaaatgattttttccattgtatttggttctagtgtaaatttactcttcagatataatattttcgtgtaccgtttagtgaaataaatggcagaaaagtagtacaaaatataataatgcggttaggtggcgcaaggaaagagttgaaccgtgcgccaattttgttaggagagagctgccgagtgggtcagaagtggggccgctgcttcattgttgcacatgttcaaagaatgaggacgtggcttcctcattggccttaaaatgacttgaacttaacaaatatgatggactttagtttgaatgagtttgcctcattgaatgaattggaggcttggagcccacatccaatttgaagattcaacccagagttatacatacatatatgtatatatggtgagtttgggatagctaagaaaaggtagaagcacgtttttttaaaaactatcatgtttgataaaattaaaaaattagttcttttaataatttaacaaaaaaatttaactttttgcaaaagttggccaataccaattttgagaaattagcttgtaccaaaagctattttgttagtttaataaatatttcacttaacaaaattaccctcattctaattataaaattccctttttaccattttattttaagattctcttctccccaacatatctttctctatcatctttgtgtaatatataatatttatgtaattttttttattattattagtaaaagtctaactaactattttattatatgttttaaaaaataaataaatattataagaaaaattattattgtaatttgtaataaaataaaaaataattataaatatattaatatgtatgaatttatttaaataaattaaataataaatatcatatttattttggtaattgtatatttaacaactattcaatcatctagcttaccaaatacttatatacactttttctaactcacagttattttaaaattatatttaccaaacactttttttctcacattacaactacagctgttttttctcacagcacagttatgccaaactagcccataatcactggttagtttcagcatgatttccattatttgtatcttgggcccatattgattaataacacatttgacttggacttggttggtcttactaaattaaatattctcaattaaaatatttttacaattaaaagtatgaaaatattaacttgattttatatacacaattaaaatcttaaaatatagaaattcaaggcttaataaacatttactatgttgttgactactatcatatatagaaaagaaaatcgagacgaagagtattgtttccttgagtgtctggtctgctttggaaacagagtatgaggtggttcgtgtgccttagtagcatcaagtatgagtttatttgctcatatttgaacataaacattgttttgttcaaaatgtgtggatatattgggaagatatcatatgagcactagaggtaactgttagactttttatttagacttacattaacttttattggttttattaaaacttgggttgattgga

SEQ ID NO: 35800 - DNA, 1586 bp, Cannabis sativa
tgagctatatggcatttcacctccgttcttgacaacacaagagcaggttttagaatctgagcatccatcaatacagtcacagcccttaggaggagtaatatggcaccaatccggatatagcaaattgtttgcatatttaaaagatggaggtttctcatcatctatagtattcacaacacgtattggaattagctccttcccgtgagaaatatcatctaggcaaacacctttttttgattcagatcttttacgtctcttcacacctttctgtgcagcctttggttcatcaagaatactcttgatggctttgtatcttgaagatggaggtctctcatcatctttagtattcacatcacgcattggaatcgcttcctcatctagacaaacaccctttcgtgatctagatcttttacgctttacacctttctgtgcaacctctatttcaccaatactcttgacagtttcatcgtttgaaggtggaggtctttcaccatctttagtatccataccacatggcattaccacctccttccctggaaacatatcatctagagagacacctttatgaacattagatttgttggttagcttcacttcttgggcagcttctggttgattaggaaatctctcagcttctggtctttcatctatagtatccacagaggatgttggaataaccttcccctgagaaacatcacctagaacgacaccttttttagttttcaatcgtctagtcctctcagtttctttacacacaacctctggttgaccaggaattctctcgagccaaaacttataaacaagattaccatgtggtcccgtaacctgcttataacttttcaccaaataaagcccaatgtatacaaatttcctgaatctccttttatatggatcacaaccacgtatcaccctaataggagtctttagaaccatactattcgttaatgcaaggtttccaccttcaagcttctgatcttcaggctttttatctgagtttgtcgtactacctccttgaccagtataaaccaagacactcgagtcatctaaatcatcggtgtggtcttcagatgcaactatacttgctgcaacattcttaccaccatgctttgaacaacttattccactttgagtttgcctatggagaccaagaatactaagttccatcctacatttgaatgcatcaccaacttcaactccagggacatgtcccaaaagttttaagtctgtgtttagaatctttttctcatcttcaagtctcttcgcaatttgataatcaacccttttgtggcaaggtctttcttcctttgtatcagcatcttcctgcaagagcttccgaaacaaaaacaacaactcctttactttatttcgaggtgaacttctatcatcacatcatgattgtcataaaagttatccgaaacaacagaattcttccaccgataatgctttctctttgggacatttcctttagtctttctcccacaagaagtcttgctctcaagtacttccatagacccttcatcaagttgaacacacccttttgattgtttcccatcagtcttcattgtctccatcaagacttcatcatc

SEQ ID NO: 35801 - DNA, 1696 bp, Cannabis sativa
ttcttgtttgactaattattacttcaactaaatattagaaccaatcacatcaccctctaaccatttatgaggtttacaaacatactttgatatagaaataatcatcacaccatttcttgaactttgggtagaatgtgggctcaaatttgtcacaagcagatttttgaacctgcagaaagaagctaatgtcaatataaaattcttgaaaatagtttatgtgcatcatctacaagccacaacaaccctaaaatgttgcttagcacaagaagaagaatgtgaaaaatctacgatctatcaagtaaatctaaaagcaaaatgatgcttaaagtactatcactatgttagaggtgacataaactattataagttatccttttctttctctattactcttggcattattttgttctataaaactaatcatgtgctattcaattaatagaaaggttgtccattttgatagcataccgtatgaaagtgcttgacatcttcctcgaagatataagcaggagttaaatcagtaccaccaccaaaccaccattgcctaggtgctccaggagtgtctgcagaatttgacaaaccgaaaaaaaatgcaaactgtatagtcatcaataacacagataaaaattaggcaagagacgtgtatggggtgaaacaaaaaaaacaaaaagcgtttatatcccaactgctgtttcatcttcatttgcacataacggaagaactactagcactaggtccaccacttcatagtatatgattgtgttctttatgctaactgaatcataatatgaaataatcaccaatcaaccgctacagtaaactatattcatcactttctctgcaggtaagagtctaacccagcatcgcaaaataatgaaatactatcgctaacatcttcaacctctggtacaagctaagtcagtattttgccttcatatcttcctatatctcaactatcccgggagttaagaaatcatcagattgataatgctttttaaatcaaaatattcttgacagcatgaaaagacaatgagattttcagtggagccagacaaaacatgctaccctgctagctgcctctcattttgggggcttcatagttgttaataggactctatgggtttagcagaagcatataaaattattaccttgaggcgcatcagtctcgaaatatcgataattgaaatgcaaagtaggcgcaaaaggattcttgggatgcaaaacctgaagggaaaaaagaaaatcgaaaatcgaggtccagaaaattatgcaatatacccataaaatttcgaggttgataggaatttccaagtactcacggagctaatgccggcggcgaagaacggcaccggaccaggcttggtatcagcagaagcagccttagcagctctataagcctcaggaggcataacgccataaacgacagacacattgacgccggccttctcccaaacggcaccgtcctgaagaaccctgctgatacctccaccaccaccgggcctggaccaaacatcctctttgaattgggcgcctccatcggctgcctcaatggcctggcagactgtatcctgggcgtcccttatcatcttctcgaagcgcgccctgatagaggaagaggatgactcgccccggagaaacgtgtcgggcctgtgggcctccggcgtctctttctcgatcgaaactgcggattgcacca

SEQ ID NO: 35802 - DNA, 2579 bp, Cannabis sativa
  modified_base (1623)..(1623): a, c, t, g, unknown or other
tgtcgtgacgatcttcggaagacaacctgacggctctgataccaaattgtaacaccctaactaatataggtgagttaagacaaaaaaaccattttgcccccacttaagacaaaaattcactaaaccatctaagggtaatttggtcaactctgaaatctcgactattcatgacattcccaatatctaactatattgccccactgtactaaaaatactaaaatgtgattctaatagtcaaacgtcgtgtttcaatattgtcaggcacaaaacatgtaaaaatatgaatttccatatatgacatatagaatacattttgaattcaaataaatctccgtaaactgataattcataactaatatccaagtttcataattaaaccctatttatctgctaatttctaaattaaagctaagtggtctttacaacattagacttcttatttccaatttttttatgtatttgaaaattctttgcaagcattgtcatgtcatcaccaccatcttcttcatttgatgcttccttttcagtacttttgaaagctatggtcttctcctttttttttggaggtacttggtttctcctttaaacgaatcttttgattcaattcaaatgtacgaagagatcccgcaattcttctactttcatagtactaaatcctttgtttcttccatagccgtgagttcaacattaaacctgaacctatcaggaagtactcgtactatctttctcaccaaaacagaatcataaagtttctcaccaagagcaaaatatttgttaaaaatatcagataatatttcatagaattcatatagtatttcaaaattagacatcctaagatcatcaaacctagtttttaacatgataaatttagatcttttaacatctgaagttccttcaaactagatttgaaggattgtcaaggcatctttagcagaaacacaagtagaaacaagtttgagaaaactttcgccaacactaataaaattagcatgaatagctttattattataattagataacttttcttcttctatattttacaaaagtttagattgtacctttgtgctacaatcctcatttttctctaaaggaggagaccatccagaaacagtttatttccatgccttttcatcttgtgctttaatgaaggctctcatcctcatttttcagtagggatagttggaatcattgagaagcggaggacgagataccaaacttccttctgcaaaaaaaaatatttcacacaagaaataaatatattaaacgaaaattaaatacaagatctcactaagagtttagtgaaccactctaataccaaatgaaactctatttttataattaccaagtaaaattattaaataatttaaataatgtgaaactatagtaaaattatttaaatagatcaataaactctattctatcagatatagaatccgacagaatagaaatatactgcagggagtagaaatgcagaaaataaactgacacacaatattttatacgtggtatcaacaaaccttttgaattgctcctactgtacaggccacgctcagagaatgaaatttattagatgaatctcaagtgattacaaaaataatttgacttatacaaataaagactccntctttgaatttgctgcaactgttgtaacctatccttctaatcaaatttttgaagtgcaagaccttgaactcccttcaaatcatagcacttgcacacttcctcccgacgagtgactcacttgcaatcttcctcccaaagagtgtctaacttgcacttttcttcccgaaatgtgtctcacaaacaagacttcttccgaagcttgatgaacaatatctaaggtgttcaacctacacaatttcaacaagaaacaatacagaataacacaataataaaatactaagaacttgttggactcaaactcttcacacaacaatgaaactctctctaaatttgaaagtaattatagagatgatacaccaaaagagatgaaagaaaccaacgacctaagggtgtatttatacacattagaatctctccaggtcatggtcaaacaaccaagaaacaatcaggtcaataaagaaaaatcttcccaagtaggaaattcaaaatatgtttaaacagacagttagtccattcaaacacgtacactgaacctaggcagtttttcagcaaaatttttataaacaaataaggaaatttgacaacctttatacacaataatacatggtttcttggttaagattttagataaaagtcaaataaatataataaagattttctttaaaaatacaaagataatttcaaataatctaaataaggaaaacttatatttattcacaaaaaaaaaaaaaaagaatctaatttgaaagacttttcacactaagaagagagtatatattttcaaaattaataaaacaaatacaaagatatttttaaaaatacaaaaaaaaaaaaaaaacactaagggagcatttggtagtatacttttattttttattttaaaaacaaaaaaaaaagtaaaatttgtgtttttaaaaaataaaaatgtgttctataaccacttttatttttcaatt

SEQ ID NO: 35803 - DNA, 1612 bp, Cannabis sativa
tgtactccacctttgcctttaggaaattgtccaattaggtccattcctaaattgcaaagggccaaggactctacatctgcgttagtttgttgggtggtgcacgaggtatctttgaaaatctctggcatttattaggcctttgagtcttcaatcatgctcggccaaaaataaccctgccttagaattttcttagataagctttgcccggctgcgtggttgccacagaatccatcgtgtacttcagacaaaagccgtgtagcttctttttgtgtaacacacctgagtaatggcatggagaatcctcttctatacatgactccatctacgatgatgtaccgtgcaaccttctcattttctgagcttcgtctctattatttgggagttccccagtgttgaggtaggctgctattggcgtcatccagtttggatatgtgtcaatcatttcaatttcttccgagcaggtgatactaggtttttcaaggaattagatggggattagattagccttatcatttatactgctgcttgtaagttgagctagtgcatcatagtcgtgttttcttctcttggaatttacttgagggcatagctcttgaactgtgcaagcagatcatgtattttgcttaaataggctatcatcttttcttctcgagcttcgtacttctcagatacatgatttaccactaactatgagtcactgcagatcttaatgtgttcggcatgaagttcccgagaaagttttaggccagtaataagggcttcatattcagcttcattgttggatgccctaaacccaaatttgactgccccgtgtagatgtttccccccaggtgtgacaagggcaatccctgcaccgggcagttgatctgtagccgacccatctacatgtaacttttaggtgggtttgtcttcgctgttgcttgactaaagttcttgtactggctccaggttgttttttaaagtgatttcttctttgcccgtacactcaactacaaaatctgctaaggcctgccctttaatcgttgttcggggttgaaacatgattttgtactggcctaactccactgcccatttgagtaaccatctagaggcatcaggtttttgtaatacttggcgtaatggttggtcagtgtatacccaaacaggatgatcttaaaagtaaggcctttgctttcttgttgctaagattaggcaataactgagcttttctatcagtggatatcgtccttcagttttaacgagtcttttgctgatgtaatagaccggatgttggatattgttctcttctctgatcattacgacacttacaacatgttctgtgatagctagatatattcctaactcttctccgtctagaggttttaaaagtacagggggttttgtaagttgcctttctaactcttgaacggcattcttgcattcctccatccattcaaattttttgtttcttcgcaagatgttgaagaatggaacacacttgtctgttgactttgaaaaaaatctactgtgtgcgggaatccgaccagttaaactttggacttctttggtttttgtaggcgatttcatatccaggagggcttgaattttttctagattggcttcaatacctcag

SEQ ID NO: 35804 - DNA, 1107 bp, Cannabis sativa
ttcggaaaattagcctttttttttttttttaagaaattttttccgtatcttggttatttaaaaaaataatatgagagaaatttcctcttttggggtgacaaaaaccgtaaaatatacttaagctaattaaaatttgttccccctaaattttaacaggtattaaatatactttttaaatttttttgatcattaaattttttttgaactattgagattgttagatttaaagatttttaatgtactaaatcatgctccttaaattttgatatttactaaattatatcctcgaacttagacatgtattaaatcatatttcttaaacttttattcatgttagactttttttattaaaattgaacaaaaattcttaaatctaataatctcaataattcaggagatatttttaaagactttaaaagtttataaaatataatttagtacatatcaaaattgaaagagtaaaatcctaattaacctatacttaatttgaaaatgaagaattttgttttctttaagagaaaaaaaactgagtgaagggcaaaatattgtacaactatgataactgttgagatgaccccagctggtggctggatgtatctccataataaaaggtcgttgaatcaagcaagtagaaatgaacggccacgattgaatgggcaaatgactagacacgttcactgccactaacacataagagatcgccacgtggcagtaaacaaccgtgtgtggggccgcaactggtggttgatgacgatcagacacagtggtgtatgtggacggctgatattttacgaggcaatggccatgtgactgttttagtatctatgtccctttcactgtccatcactgactctcaatttctttttttttttatttaaatctatattataaatttagttacagaataatccaagaaacttgctcaaaaaaatcttatgtaatggaccccatctcactcactctataaaaatactaggaaataattcatgttttgcgttttatttaataataattaagttataaaattattttaaattttaaattttaatattttttatcaataatataagtagaggcttcataaaagaaattaataaacaattattt

SEQ ID NO: 35805 - DNA, 1622 bp, Cannabis sativa
tataaggctaaaatcctctcaagatctctgataagtatcaaagtagtgcctgatgttctttctttcaagtcactgaatgaggagaagtcttttgatgtgattgttaatggtggtagtttatcgaataattctatggtgtctgcttcactagtgtggtctgatgatggcacccataatgtcagaagtccaattgttctacacaacttaaaggggccttgagtatgatgaagacttcaaatttaaatatactcttatttcttcatctaataaattacttgtatatctatattctttattaatgcatcaatgttgtagtttttttctatttattattattattatttattaacagaggctacaatgcagctccacatgttgaatttttttgcataactatttcttgactttcagaatattttattttttttggaagcttgactttcagatgttaatgtcatccgtgtttccggataaggaagggacatgtgcattttcaaaaatccaatatcaactaaaataggctcattcttggtcagtcaagttagcacgtcaacccaattacaaagttgagttatggctccagattcggatgtaagtccaacttacagacaggataaggccgaaccattttagtcctagaaatgttgtttggtccagaaggcaaaaagtccatcataactatttggatgccctaatggggtaatttggacacaaaaaattgaagagacatccaaaagccttcagatatcatcctacgtggcgacctctaaacaccgggcccaccatatcaggagtttgtcccctacgtcagacttaaggagtgtgtagcaccaaaaggcaaccacgttttttgtccaacgccatattctctgacattctcagtaccaacacagcaactcacaacacgtggcatcataatcggtctccactcgtacagacaatcataatctcgggaattgggtctcacccaattggccaaaagcaaatatatattgtattttatcccatcaaggcctagttgacacctctaaatcctatcagatccaggttcacccatactcggatcttgcctatgaatagaacatgatctcttcatgcaagaggattagtggagaaatcatttttctactactaagagctaagaattagagttcttcagctaggaaaaaaatatttgtgtaaatatactttgaagcttttctagctcaataatattgactcgtggattaaggctcagtaacgccccaaccacttcaaaatcctagcttcttcttctttgatttatttctttcttaagcttaattactttatatttggtttccaaaaattttggtaaattttttggtgctttcattgagagctgaggaaagatttaccatagttgtcatctacataatggttgcaacccgaaaggcaatggtcaagccacctactcgagatggtagggatattgtcgccaacaatggcaagaaccagcttcccccgacaaacactctaagtgtgtgtcgcgagggacgggaaagcatcaaaagtggacaattgtttgcacctagaagaccagcaccgcagagaacctgtcgttgatgatcctattaatgaggatgagcatgaaggtcatgaag

SEQ ID NO: 35806 - DNA, 1122 bp, Cannabis sativa
attatatggaaatgagttttatttaaggcataaaacccaacaaaaggatgccctcatccatggaatgccctcattccaccaaaaaatttgatactttcatccataaaataatcttattccactaaatttaaatttatggaatgccctcattccacaaaaaaaaaaaaaaatgaatgctctcattcacagatttattatcaaaattatttttttttttaaaaaaatataataaatacactgattacattcatacctcactggtgccacaagttgctgtaaaaaaagggttggcaattaaccccgttgattcgaaatcgcccaagcaaaaaaaaacaaaggctcaatatatctgttatgaaaaaaatattaattcatgatgtgcaaagtgatcccaaacaataaatcattcctttaaaaaacaaaaaaaaacaaatcgtatacaatatagatacatgccaaattttaatctttgtgaatatatattggtatagattcaataatggcaccaaagttatgaaaataggggtttgatgcgggtctcggtatatgtactgatattatatatatatttagtttatatgtaccttgtataaatgatctggcagaagaatatttgagatataatggccaaaaaaaattataatggatatatgtgcttcaagtatatagatacgaaatcctcctatcgtaagaattggttcggtcaactaaatttaactctcttcctataaatatatgtgtatgtattatatgaagggttaagaagtctcgtgaaaatttaatgacaagcattaatctatatatatactcacgatgtgactattttaaacaagcacatatattatatatcatcatttaacgtttccaaatttgaataggaaactcaatttggattataaaataatgatattatttcctttatctgataaattaaaatatctcagatattattttaaacattatcaaatatcaaatgatattctttaaattccgggaataataactaaaaaaaaacatcagtcaaataattcatttatttattatttaataataataataaatagaatttcgagacataaatctatcacaataaaaaaatggtaaatttccaaatccatacaa

SEQ ID NO: 35807 - DNA, 1086 bp, Cannabis sativa
atatatatatatccatacataaaagtcaggatcttgtcttaaagagtttacaacaatatccaaaatatgtttacgaaagtgtcgctccgcgactacaaaatgaaggaccaagtcatcttgagtccgaaccctccatatttaactatcatgatatgtacaaccaccctcaagctctggactcactagtgctcatctttcaccttgccctacctacacatgaagataatatctgtgagtcgacaaactcagtaagagaagcacaaaacatataacatcatatcgacttgcatctaggcacccatacacctatttataaggctttaaatgcatcttcttaacagaagtacaacccttataccacatgcactgagtactcatcttgtactactgttggtagggcggaataacacctcgagtaccactgagtgttgcaccacatgcactctgtacttgtctcatactagtgttggtaacattgtgtcatacccttttaacatcatatactatagcaatgcactccgtaccacaaccgtactagtgttggtagtatacaaataacataatacatgatgcatataatacacatacacatatatatacacattttatactaatcttacctcgtttcatgattcaagtagtccgatcaacctgaatagaaatgtatgccctaaatggaggtcctatgtcacaatcacgtaaaataggtaaaaaaaacttgctgaaacttttttgatgacctaaactcaaaactggaagtttttctattaataattagcatgacaatacaaggaaacacgaaaaaaagactatggcaaaactacctaaaaaagggctggcaattttgtaaaaacggcagactgtttttctgggtagtctggcaataaaaacggtagaccatttccctagaaatagtctgtcgttttcggctgcagagaaacacaaagtgttaattcaagctcaaaataatcctaaacttcaaacaaagctctagatcacctaattacatcataataaacataatccaagcaatagcagcagctagaacacacaaaattgaaaaatgccatggttgagccaagtttg

SEQ ID NO: 35808 - DNA, 2041 bp, Cannabis sativa
cgaagttactcttgaactagaagcagatttgagattagtgcagaggtggctaaaggaggggtcctggcaaagatctttggctctcgacaactcccaaagagcagggttaagcagattctaggtggtatatggactctgaaaggaaaatggcgaatgaaaaccttggagatggggctgtggggaatcttttttgatgtcaaagaagataaggacgagatattgaatagaagaccatggattgttgctaactagttgctgaatctgagggactggcctgacgatggacattggaaaaatgtggacatgtctaaagctattttctgggtggagatacatgggttaccaactccttatttggctttccaaaaatcggttgtcatagggaagaaggtgggaacctttatagacactaatagagcatcaaatgtggttattgctagaagaggcttcttaaagctcaaagttgaaattttgattaacttgcaatttcccgcgggttttttcttgagtatcaatcgagggagacgcgagtggattcaattcaaatatagaaaactgcccaccttttgtttcaactgtggacttatcggacatgaaagagggtggtgtggaaagcagaaggtgtacgcttatccacctgttggcaaagcggttcctctctatggcccctggttgaaggccatgattcctattcagagctgtttcgatacgagaaggccgaagtttattcgtgaggtggatattccgatgagtcgtcgggatttggagccggagatggcgcctggtgactccgggagaaggacaaccacggtggagggaaaggacaagcataatggagatattggtggcacaaaaggtactgttagtacgtccagtacaagtagtggaggtgtgcatggaaatggtacgaaagggagccagaaaatgccatctgtcactaaaaagatgagtcctaggatttcaaattccaacaaggaacgttatgatcccttacaggtaatagagaatcatcctatttctaagttgggctctaatccccatgatagtaatgtaattttgagtctgatgccaaatgtggggcctacggctttgcaaatggtggagctccctcatgaagccatctctaaatcaagaaccccccacatgcatcctgagcccatagtcttaccaaagcccaattctgagaagggtgagagacttgctgcgaagttgttgggctcttctattgtctcgggcctgcctctagaccgtgaggcccattcaaagaaaagaaaggctagtggaagtgtaacacctattgtctttgacaataatgagaaaactgaagtgggatctttgaatgggcttgctgcgaatctttccttctctgtgggaaaggatgatggaactcaggggaaccaaagttcagagagaaagaaaagaggatcgaagagaaactctgtatctggtggatcgacacgtaaaagtggtgggaaaattcacactagatcttttctagctcagaaagattcaagtcattgcaacgatgcatcattggagaggaacccagtttctaggcagcagagaatggtcattgagattaatctggatcaaaattttcatatgggcgaggaggcggcccttatcaagccccctatacctaatgagagctatttcgtggaattgtcgaggttttggccaaccctcggcaattcaagctttggcggcctaggtgaagaggtttaagattgactgcatctttttgatggaaactaaagttggaaaggagcaaatggttaagattagtagtgctttgaattttgactgtggtgaattcattccttctgagggcttggcgggtggattctgtctgctttggaacaaacaatctaggattatctcggttacgaaacatcgaactggcttcgaatgtggggtttgggattctgacctctctgctcattggacgctgcttgcgttgtatggcaccccatatgaagaggagaaagatttgttttgggaagaatgctctgatgtaatcaagaattgggatgaaccgtgg

SEQ ID NO: 35809 - DNA, 2435 bp, Cannabis sativa
  modified_base (2373)..(2400): a, c, t, g, unknown or other
ttatctcaaaattaattgacaatatggtaatttatttcaacacgttagcaatgggggactaactcagggccaaacgtgatatttgaaagaatctgtttcaaagacccccaacactaaaaactgacagacattggccgaaaagtcccaaagtttttaagttaagctcgtctttttggactgccagtattttgggctcacaacggatcacaaacgactctgataccatgttagaatttagaataacgtgaatgaggttccatctcaaaggagagtagtcattcatcttatgatggattttcacacattagcaatgtgggcctagctctaatactattagcaattctagaaggctaatttggatgtttacctcctgaactttgacatacaccaaatcatgcccctcaacttttatggtcgttaaaaattcatctcaaactattgagattgttagatttaaagacttttaaagaaagtctgacatggatgaaaattcaggggtcaattcggtacatattaaagtctagggggacaagattttgtaaatttcaaagttcggagggtatgatttagtatatggacaatcgccatattagaaaaattgaatgaaattagacttaagtccttaaatttaacaatctcaataattcagagagaatttgtaatgtcttgaaaaagttcaaagagtatgttttggtacatgttaaagttcaggggacaaaaatcctaattaactattctagaacaattaagagaaaaaaattattaaaatggttataataaaccaaagtatctctaaaagtacaaatataattgtaatttgttttaaggtacaaccatatatatacatacaactatcactaactataggtattaattattttatttaatatttttggctgaaaaaaatcaagtggtgcacattgtagagaaaagaaggagggagaagaaaacacacgaaaaagaaattggaaaaacctcactcattatcattaatgatcattgtatacaacaagaaaacagagcattaagctcataacagaaagtttaactaccttaactaactaaacatatttaactaacctaagctagcagcaaactaattaagattagttaatagtgttaatattccccctcaaacgaaaaatggttgaagccattttcagtttggacttaaggtagatgaatcgattcttagacaatggtttggtgagcatgttagccacttgatcacgcttggaacataactaactgagagcttcttttccagaatttgaacccttacaaaatacaagtctatctcgatgtgtttggatcgagcatgaaaaattagattagcagctaaggcagatgcactcttattgtcaacccaaataacagggcaatgagacaaggtaacctgtaacttagtgagtaaagatacaatccattttagttctacaacagtgtttgctaaggcataaaactcacttttagtgcttgagcgagcaataacattttatttcttagcagaccaagatattaggttgtcacctagataaaccacatatctaccatttgaccttcgatcatcaacacaactagcccagtcagcatttgagtagctttcaagagtcatgacagctttgagaaattggcttagtttgttgatcacaaaagccacatcaggcctagttaaggtgaggtactaaagagcacctacgattctcctatatagagtaggatcttcaaatagttctccatcattcaatgacattttagtggtgttgcttataggatttaaacaaatcttagcaccttccatatgtaactttaccaataggtctgttatatatttggtttgagacaagaacattcctatagaatctctgaaaatttccaccccaagaaagtagtgaacatcaccaagatctttgagagagaacttattgtcatgatcggtaattagtttggagactagatgctggtttggactcattattagaatatcatcaacatatacaagtaagatgataagatagttaccatggccatgaacaaaaagtgatgtgtcagatttggaagcagtgaaaccccattgaattggacaggttctgagtttgttattccaagctcgaggagcttgtttgaggctataaagagccttgtgtagaaggcatacatgatcaggtttggattgatctatgaagcctcgtggttgttcatgaacatagtttcagctcgcaaaccattgagaaaagcattgccaacgtctgactgagttactttccaatttgaagtgacagccagttcgaactgtgataggcttaacaactagagaaaaagtctcctcatagtcaatttttttggattatattttactaggatctagatttnnnnnnnnnnnnnnnnnnnnnnnnnnnnaatatgaatttctaaaacaatagaatttaaacaca

SEQ ID NO: 35810 - DNA, 2537 bp, Cannabis sativa
  modified_base (2446)..(2456): a, c, t, g, unknown or other
tattatgtataacataatattcctcatatatagtatatttttcatttaaaaaaaaaattatattatgtacaactaattttatacatggctatgcttgatttatataaatatacatacaatatgtccgatttattttattactctttgacttccaactaattactttttttgttttgtatatttttatcatatattatatctatataaaaaaatattatagacctatattttttatattataaatgatacgtgacgatgggtagtgaggtaattgatgatacacccaccaccgacttattagtatataattaaaaaatacaataaataaaatattactccattataaaccaataattatttattattttttttatagaaagaatttaattattttatttatttaattaagtaccgtgtagactgtagaatgaagtggttttattaataaataacaagcaataaaattggcataatcgatcaccctcttaaaattcaaataaataattaatgaacacatgataatataaacctcgacagagatcatgtttaattaattataaatataattcagattttaatcttaataattataaagtacatatttattactcaacctcctctatatatataagagcatgcttattattgtttaattatattataaactattcccctattattaatgaagagaatgttagaaaaatgtgtgcttcaataaaaataaccaaccaaaaatacaaatctataataagaataatacatggacaaaatacaaataaatcataataatgttacaactctaaactttaaacaacaaataaaacacaacataaggaaaataaacagtttatcttatggtacattttccagtttcactcacccatacggtgttgatcccattttctttctatttcttgcattaattgcatctcttgtatggctctgatgcacattaagtgcacatatttttcctcttttccttcaatttatactgtgatttttttctttgaggatcttcttactcttctctggcccttattcttcctcttaccttgaaaatgttggattaaaatcttattgttgacacatatgtataatgtatatgctattataaagtgtgatacaaaattaagtgactaattatgtatgagtattaaaagggtattaaattatcatggaaataatgtgtagataccataagttattatataagttgttgaggggccaaattttaaatacccaaaactcattctaagatgagtatataaatacgtagtggttcccaataagcactagagtttcggattctctcattccgcaccagagaaaatactttaagaatagtgtatttttggaagatcataaccttatgtgcaatctccaacaatgcttcatgttagtgctttcgctcatcttttatcatcttcttctttaatttagcaaggttctataaatttcgatattaaagcacttttaagaatatgtttagatctgtgatataaattcttgagtgttttataaatcctaacagaaaatagttttcttatcgtcgtttgctcttctatactacaagggtgatgatattaagcttaggatctatgaattttttcttaaatgcttgaaggaaaggttggattcgcctactacaagtttaaactacatggtccttcttaagagaatatcagtatggaggttgttcgtgatatcctgtcaattatggataagaggatcaataatagtcattttctctctttgtttgcaccctatactgctaatgagatcttatttggatgattaaaggaatgctcaaaagaatgctcttcctaatgcttgccaaccaccgtgtgttgcacaagaaccctttggttcctcctatatatagcattaggttccttcaagctttgtacaaatgtaattatggactctaaaaataacacgctgagattgggaggtgtagttaaagatgagaatgagaatgttgttgttggtttggctattccaatcccaggggctttagactcaacttacgctgaagcaccagcccttaagactgctctaaattagtgtgtcgccattagattttcgatattagttgttgaattagatttgaagttacttgtttataaaatcttgtgtaataaagtggctttctctcttttagcagacatagttgtttatatttgtaattgtttgtcaaattttcgtaatgtaaccgttagatatactctcaggatgtttgtaacgtcctcgcttcaagccttcattgagcctttacaaccacgaaatgatggctcttatacatgagtatgtcactctggttgcattctgaaataacgactgaccctacaaatcaacacgagtgtttccattgtgatttgtcctcactcacacacttcttgataaaactcttcaggaggtcttctatcttgaaattaccccaggtcannnnnnnnnnnccgtggagttctttcgtgatgggctaccaaaagacaagatacaccttgttgatatatgtagtactaatcaatctatttaag

SEQ ID NO: 35811 - DNA, 1588 bp, Cannabis sativa
tttattttcggtggaattttcatttgccacaaaaatttccatcacgctttagttttggatgagtcggattgaagtgcgtcctcacgcattgcaataaccattttatatccacgcctaaccgagtactctccgttcttgctgaaatgccacataattttttcctctagaccccattcaccactcgacatgcttagaataaaagcagcatcttccttattaaatagagttttaatgaagttcatatcccatgagccaccagcaagaagcaaatccacaactctcaaatttttagcatgaaatggcttgtcataaatcttaaaagtatgcagtcttggcaactacagatcctccaaaacccttaccatattcccatcacccactcgccagcgatagcccttcaatataatctcttttaatatttaagtttttaaactttatttcactattatttttcgtttaaactaattatttatattttacattaaactatatttttttttatattaactaaaatatatttttatttttttttgaattttttttttattaatatttcatttttcaaatcaatataaacaatttttcaaaataataaaattgataaattatattacattatgtgtttgttaagttagcactgaaaatttcagttaaaataagtgctaactacaagatattgttgtcacaaaaaagacaaatattggatagtaaataaattgagatactgctcgaaaagaaataggaaaattactttatatactatttttttaaaaatttacggtttaggtttcttaaatggtttttatgtgagttgttatgcagattttagttgcgatttatgttactccgttagttgctataagtgtttttaagtgtaattttataaaaatgcaaaaaaaaaaaaattatttaaaatgtaaaaattaaaaaaaaatccaaaaaaaaatactacatcaataaaaacttaaaatattagatacttttactttgctgctatttttccataaaataaataataccaaaataactcttacaagcaataatacataatcacccatatattaaacaaagtgaagttttggcaatagaaaagaatcccatcaaatctttgttagaaataaaacaaaacagatgatatccatttaaatattgaaaaataaaggtgtgtcaccgaacctcatatgtattgagatatttagttacagatacattaatttatttattattttttaatggttggaaggctgcctaaaaaggataaaaaaaataaaaatctgcagggcttttcaaatcttagagaacgtgctgtgctgtgctgtctcggaagcaagcaaaacaagtggagtaaaacaaaaacaaggttaattgtttccagtattgttacttgttaggatgtaccactactagttaccattttattgttaaaccttaaaaaaaaaaaaaaaagttatagaaagatgttaaaagttatagaattaaatatgggaccagatttgctttaatataataattattataaactatccctaattattggcaagatgatacattatggtggagataagtaaaataatacctaatattaata

SEQ ID NO: 35812 - DNA, 2422 bp, Cannabis sativa
  modified_base (1226)..(1229): a, c, t, g, unknown or other
ttttctgattcaagtgctctcacagatccagttgggaataattactagcagaccttgttctactcataaactgtgtcctacttacggatctcgtcttgcaacggatttcgtcctactcatgaacctcgtccttgagtgacttgtagatttactggttcccgtgctttctcaatcattagcgcaatgagaactttctcctcttcgagttgatcgactgtgggtccttgagcgccctgaggtcacacttgcttctttgcgccctgttcttccccctgagcggggttcgtcatatttcccccactggggtttgtacgagtcctctctctacgggttcgggaagaacgctggtgattcctcgtcggtgacctacgttccttgggttgtgccctgggtctttgtcgtttccacgaggaatttcttgttcattggtttctggttgcgtctcattctcatttctatgagagtgttctggctgattatttggattttcagggggaacctcattttccccaggctattcttcctgagcaatttcttgtctcatagttcatgagccacgaggtcttctcactccaggtttaggttgattttgagtgttatccccctgtgccgccctagctgcggctgcatcacgcactaattcagcgttccaccggtttgcctcctccaggtggcgtttaagatggccgatttccatttcataagtaccctcacccctgggctgagcacctccacaactgggtccttcatctcccattctaggattttggccctccccatgctgcgctctcctcgaacttgtcgttcgtgtactgggaccaacctcaggttgggtcctcctggaacaagtggttcgaatgctgggccactctcaagttgggtcctcttggagcgagtggtctatttagactgtgagttgaaaggccttctggagcccatgggctcttttccaggacggtgatgagtttctttatgtggtgtgttaatattctctgtgttgtctaccatgaagaagattatttttttatatgtaaggagggttttttccaatctttttcacgaaggctcttaatgaaagtagcaaactgttaacgtgaatttttgttaactagatatgagccttaaaggtgataaacttgcacagaaaattaaaaacagtttaggaaaaagtatgaacacaaaggttttttttacgtggttttgtagttaaaattctgcatagtccnnnngtcaatcttattagatttctgatagtattttagggccttttctcttatgaatttttcgtccttttttcagtccaacttgcctctatttataattttagagttgactgatatctttacaacaattatcccctgaaatcgtggggtttgattacatatcacgtaaaataaatgcggttaatatttgaatatcacacagctgtgattaattcgcttttactgggtcaaagtaaacgtgtattaaacacgttataaatcataacatttcgggatgtctcgatagggactcactaccaatggccttgatagcgagctggagcttttctcatatctttccgaggttgataatgttattctcgtcgcttttactctaaagtcataacgcttcatatgacaatcgcagttcttggtgacaaggtgaacttaaacaaccaatgttatttgaatgtcagcttctatctgagagaactggctcgacggagctgtaaatcttagtgaaagatgtctggagtcgactagtgaaagtacaaggagcgtgccatcttatagcgagatgggtgcctcgctattagttgcttgggtttacctgattgttgtacttagtttatgtactgtatattatgagctaagtgtcttcgcaatcattatatcttgcttacgtctactcatgcttagcgagattgatgcctcgccctgcgcatccagtgccatatggtttctcgttaatatatgaggcaagagtttgtatatcttagtcttgcgtaagacattatagtcagcaagttgtaaatatattctgtcacatccgcatttaatgagttattccatttttaaatatcattaccgttacacgcattgatctatattctttctactttgacacgtgtcttccgttgaaatggtagccgaatttcaggtataacaatataatataatatcttaatttaaaattttgatatttctaatcttttaatttaataaattaaatataacaaaaaataaacaagattgaatataagatattttgatggttacgatattatttaataattaaattaaaaaaatatcctatgtttgaaaattttgccaaaattaacaaatttttgaaatttcatgttatttcgccaaaaaataaaattttaattaaaataaagatctaataagataaaatgtcaaaactaacatttttctaatct

SEQ ID NO: 35813 - DNA, 3295 bp, Cannabis sativa
tcaatggtggtataccttgactcaaccttaatgagacactttctgatgtagtagactaggtgttctatccctccttcctcacaaactagagtagcactggctggatgcccggtgatagacaactagatgaataattcaacgccatctattggtttggataggatgggaggtttggcaagataatttctgagaggttagaaggttaactcacattcatcagtccattcaaacctcttgtttcttcctttaagtaaattagagaagggtccacacttgttagttgactttgagatgaacttgctaagtgcaataatttgtcctattaggctttgcacgtcttttactcttaacgatgacttcatgtctttcgaggcctttatcttttctagattcactttaatctctcttgagttgacaatgaatcctagaaatttccctaataggatgccaaatgcacattttagaggattaagcttcattcgatactcccgcaagatgttaaagcatacctctaaatcattgatgtggtctttggatttctttgacttaactagtaaatcgtcgacgtaaacttccatatttttcctgattaaatcgtggaacatacggttgactagtttttgataagtaacacctgaattcttgagtccaaagggcattactttgtagcagtatagcccaatgtcaattcaaaaactagtatgttcgtcatctggtgcgggcatgctgacttggttgtagctggaataggtatccatgaatgtgaggagttcatggtcaaatgacccatccaccagttgatcaatttgtggtagagggaaaccatctttagggcatgctttgtttacatcagtgaagtcgatgcaagttcaccacttaccgtttggcttaggcactagaacaggtttagataccaaaatcaggtagaaagcttccctaatgaagttgttctcccgcaatctttcaacttcttccttagagatctttggaatgctctttgtcaaggagccatagtttctgttatacaggtcgaaagattatttgtctatgttgagggcatgacagatgacctgggggtcgatctcgatcatgtcttcttgtgaccaagagaaaatgccttaatttattctaagacaagccatgagtatctatcttaagacctctgtcaggttttttccaatcttaaagaccttggtcgagtatactgtgttgaggggaagctcattgagttattcagttaaaccaactcccgagccgatttccccaaaatggggtactccccgtcttgggcacagtttcaagtggctttaaggcctgtctccgtcttctccataattttgactttaaaggtcttggtcatctctctgattcttgcaggagaggtcttccttgctcccctggtgccatagcagcataggaggtcttatttgtcccttttaaggctgaagcagcataggaggtcttcttggcgagtgataacgaagtgttatagcactcatgggcagttccttgattttcaaggagacaaccaataccagctgtcgggaatttgacagacaaatggtagattaacgagatggctcaaaggtcatataaagttggctttctgagcatcacattgtacagagacttcatattaaccactatgaacgtggcaatgatgatggtctgccttggggaaatgctgacagtgtgtggcagtttgatcttgccacatggagcaatcggcttgctaaaaccatacattagcttcttccatggtttcaagtattcgggtgacaaacccatcttgattaaagtatgcttgaataggatgctcgaggatgctccgtcatcgatcatcactctttccaccatcatatttgctatttgcacctcaacaaccaaggcattgttgtgagggtagctaacatgataggagtctgattctctgaatgtgatgggatcacatccgtagcattgagactttggaggatgttctgcaaccactagtactttagctcttggttcatgttgcaaggatcttgtatacctttctaaggccttcctcgaatttctagctaggtgacctccaataatgatctctagcatgcttgcaactacacaggttaaagaggtgcattactcctaactggagcttctgatcatacataccgctaaagagccgcatgtttttgtctaatgagatattctatctcatcttgcaactgattacactcattagtctcatgacataattattgtgatagtgaaagaatttgttcatgtccctcttctttgactcattgcagggaagaggtttgcgatacgacactgtagactgtgtggtcgtatagatctcctctcttggcgccaagaggattgagtaggtattaaagcgaggcccatactctcgtaaaggcctacccccattctagggcatctttccactgggagagttgccctacttaccactattgttggttattttccctctattagaacctcgtttcttcccattaccctgtgccttagtgtcaatggatggggagtctagtgacttcttcttgccaccttttgaaccctttgcttgagtgatagcttcttctagtttgataaagtcatccgctctatcgaggaagttattcatggtataaacgaccttgagacaaatgttgggccacagaggactcatctctttgagtttggatacaagtgtcattacccttgaatccatgctaagtcttttggtcttagcgactgactccaagaaccttttgatgtagtccttgaggggctcatcttcgtgctacttgatgtctaccaaatcattgggttcaatttagcattgtcagaaaggagcaaattagttgccaaaagcatccactagatctttccataagttgattgatccagtggggagcttgatgtatcaccattgagctaggcttgtcaatgtggcaggaaatattctacagctgacatcatctcttactccctgtagatcagtttgcacttcaaagtaatggatgtgagacaatgggtcttccttgccagtgtattgatgccaataagggttattgaacttctaagggattggtagagctttgattcttttagagagtggtctgcaccactctctatcaagtttgaattatgacagcttaggggtcatgatccctttcactaaggttcctaagatatcaaatttttccctgttgacatcatggatggtggtatgcgtccctgttaatgttggaagttattttaccaggaacttagttctactcacaagtatgttgatttaacaaactaa

SEQ ID NO: 35814 - DNA, 3489 bp, Cannabis sativa
ttagtataagtatactattctaacatgatcaaacttatcaaataaacagttttaagaagtgaaactttgctgtagaatacgtaatgctttcatgtatatatggttttatttggtgaaatttattattatgtaattaagttttatgctttgatgggtatatatgtgtatgttctcggtttgtgattgaatctttgtgaatctttttgggtctttctttcttatttaaatactcttatagttgcatctgtgagtctcaacatctctctctctgttttatttttcttttttccaggcatgttttaactctgttttggtggattcggctttcaaaattctctcacacctttagatgttagttttttgaattgtaaaacatatttacagtaattggttatcttgttttattccaattattgttaaagattttaaattttggctttaaggggttcgaaaaagcattcttgaactcaatcttatcttttgttttgactcatatagtttaaacaaatgaatatattgcactaaaataatcaactctatgttttaagaatctgatatatggggcttaattttaaaattttatatattatttaaatttgtctttgaccacttgatttttggtttaagaaatgaattatttacatttgattctaaaatagtgtatatacctctgcttctatcttttttctttcccttttaaatggaaaatttgactttttattcatagattggtgtggatgcattgaaaatagtaagatcttgtgtattgtttccttgaaaataaaaaaaatcataaaatttctctaaatggtccgttcttgttgtgatattaagttctttttcttactctttatatttgtactactgcttcaaggactagcaataatactcaaaatctcacactgttattgttcatttatttgctttgttagtttgctctgttgtcaaccaactaactctgtaattaattggcttcttcaatctgctgtatataaatactaacttatttatcagtgtgtaataattcattcaaatcaataatacagaaacacattcttctctttcgttctctctctctctcaaactcaacatctgtaaactgaatacagaaagaagaaaattcttacaattataaatattgcttattggtatgatagttgatgataaatttgccctttttaaaaatatatattaccaatattgcctttttgttggctggtcagattattcttcctttttcttctatattaataatgtcactattttgtggactaattcaaccaagtcaactcccataaactttattctcttcctcttcttctctccttctatttcttagtaactacacctcgtcttcacactatgttggtgatgatgagtttgggtgattcaaccacaatctctatctacacttagtactttttttgttgttctgtgaagagtatatatgtatttggaatggatttgaatggtgtggtgtggtaaatcttcagcttcgacatgcacatctctggattgatttagatgttaataccaggtatgtttattgatttcaaaatccctaattcttttacctctctttctctctatctgtatataaaaatgtaaaattccctaatttttttattcatatttctcaatttgttttttcaaatccctaatttctttacctctttttctctctaactgtatataaaaatgtgagatgcctaatttatttctattttttcaatttttttttcataaataaaatttacagccagttaccattttgatgaaatttatcttcagttacacatattttaatttcagttttttatttttgaatttcttggactgatgcatgtttggtaatttttcccttaaaagaaaaagctaaaaaaaaatatagataatttctagggtttgttttttttttttaaaaaaaaaaaacaaaaaaatatacaactatttgttaatttatctatatttagcttactcatcaaatacgtgttacaatggtaaattttttatttttcataatttctgaatatcagttagtagagttttcaaagtatttgaagataaatttttgattttatctcatattttgctacgtgttgaactaattgatatattagtgctgagtcattatatatacatgacatatgatttgtcagattgagagttatcctctctttaagggttagtataaggatactattcatacataatcaaacttatcaaataaacagttttaagaaatggaactttgctgtagaatacgtaattgcttctctaatttaacttcttcaacctctccggtttggtttactaagtcattatgaatttaagttttatgctttgatgggtatatatgtgtatgttcttggtttgtgattgaatctttttgaatctttttgggtctatctttcttatttatatattcttatagttgcatatgcgagtctcaacatctctctctctgttttctttttcttttttccaggcatcttttaactctgttctggtgggtttgacttaaaaaattctctcacacatttagaggtcagttttttgatttgtaaaacatatttacaataattggttatctagttttattccaattattgttaaagattttaaattttggctttaaggggtttgaaaaagcattcttgaactcaatcttatcttttgttttgactcatatagtttaaacaaatgaatatattgcactaaaataataaactctatgttttaagaatctgatatatggggcttaattttaaaattttatatattatttaaatttttcttcgatgacttgatttttggtttaagaaatgaattatttaaattttattctaaaatagtatatatatacttgtgctgctatctttttttttctttcttttttatatggaaaatttgactttctattcatagattggtgttgatgcacatgtacttttttttattggattttcatttttccaatttagatttaatagaaattattaacatactaaaattagggtgagtgcttctaggttgtgctttggacaaacaaaagaataattaaaaggtttttctggctgagtcaaaattatatgaaaaaaaaaattatgtaatcatgttattctaacaatcacatgattaagatacttttataatagtaagaagtaagatcttgtgtatttttgcattgaaaataaaaaaatcataaaattttgctaaatgattttttcttgttatgatattaagttctttttgttactctttatatttgtactaccgctccaaggactagcagtaatactcaaaatctcacactgatattgttcattaatttgttttgttagtttgctctgctctcatgcaactaactctgtaattaattggcttctttcatctgttgtatataaatacagacttatttatcagtgtgtgtaataattcattcaaatcaataatacagaaacacattcttctctttctctctctctc

SEQ ID NO: 35815 - DNA, 4405 bp, Cannabis sativa
  modified_base (3426)..(3429): a, c, t, g, unknown or other
  modified_base (3886)..(3888): a, c, t, g, unknown or other
agaaaaaaccctcctaaccaaaagaaaaacctttctccatggctgataacgggaaaaatggtgatactcatcctaaagagactactcacaatccaggaaaagagcctatggtctcacggaggcctcccaattcacagacaacacgatctacacagtccacacattccagaaggacctagtgtgaaggtggccaaaaccaagaaacacggaatgaagtacccaacaaaagtgttggtggtgcttaacccatggatgatggtgcttatgatcccatgagatacgtacggattgtcgagttggaaaattgtcatctcaggcaacgtgtggaggaggcaaaccaacgaaatgctgatttggaatgggaggcagctacagccaagacgacacaggaaaacaacgcaccaaaccaacctggtcctagagtgagggaaccacaaggaaaacctcgcggctcacgaaccaggaggcaagaaacggctcaaaaggaccctcaaaacgcttaggaagaacaaccttgggaaattgaggatccccctgaaaatcaacaaccaaatggccaaccccagctgggggcatgcaacaacctgtacccaaaggagaaggtcggtacgtgacgaggaaatttctagcttgggacacacaagaacccgtagtcgataaatgtgaggagggaatgcacaagtagaacgaaaaattactcaaggaggaggtccatgagtaggacgaggtttgtgagtaactatgaccagcaacagcctgaacttcgtaatcatttcaaccagaaaaaacctaaccttcgccaataactcattcaaaagaaagaggatcctatccaattgggaattaatgagttggaggacaaattcaggaggtatcaagatgggaaatatggaaaatagtctagatatgactgagacgaggaactcgagcctatcaatccaaacattatgagtgttgaattcccccatggattcaagaaccctcacatctcgtcatacgatgggactacagatccaatcgcgcactagaataattttaataccattatgatagccaacaatgtggtgaataatctacgcgatatttttttccctacctcgctagttggggcagcgagcagctggtttaacaaaattacccatcattcaattaccttttgggaacagttgtctaaagacttcaagaaatagttccaagcagcaagggatagatgacctaagccgtccttcctcacgaacataacgtagtaactgggcgagacgcttaaggcctacttaagttcttttagcacagctgctgcaatggttagaaacttggacgattgtatctggcttactgctcttcaagcatggatcacgactgatcttaccactattggaggccagctatgggatggcttgcagggtcagccagtgaaaaacatcagtgagttcaatgaaagaactcaagtgtttgtttaaaaggaagcaagaaaagagatgaagtttttcaagactagctcgagaagtatacccaacactatctcgacaagcaccgcctcgaccaaggctgacaatccagagactctagttccaagaggaaagataactctaaggattcagccaaggacaagaaaaaatagaagaactacgacaaatattttccaatatacactgtttataccgagcttaatgaaacttaggaaaacatctatctcgcacacgaggacaggcttgcattcgtaagcttgagcccatgaggcatgcgttacataagagagatgcaacaaaatttagtaagtatcaccaggacattgggcatacgacagacgagtgtcgtcagctaaaagacgagatagaaagtcttatcacacgaggtcactttcggcaatggatagaaccagcctaatccacctaataaaccatgcaaccagagatacaacctcctcctcttgaaggagaggatattctggttatctcgagagggccacatattgctggggaaagtaacaatgcccaaaagagatatgtaagggaaattaagaacgagtagtctccttttgctttggaaccttctaaaaaagctaagacggaggaacctctgattgtcttctcgaaggaagatacaaaacacgtgaggtatcctcacgtcaacccattggtaatcaccatccaacacaccaacaaaaggataaaaagggtgctggtggacaacggaagttcagtgaacatcctttataaggatacattgaagaaaatgggacttgaaaaagaaaagttagaaccttgcatggtaaatctgtgcagatttacaggcgacagtgtcgctagtcaatgaataattgagctcccattgaccgtgggcgaggcacctttatccacaacaataatgcaagaattttaatggtcaatctgccatcaacttacaacatattgctaggtcgtccaacattaattggagtaggggcaattagttcaattaagcacttatccctgaacttttagacactgataggtgtgggagtggtgtgaggtgaccaaatgttggctcgtgaatgctagtgcatatagctgcagaatagaaaggttggtcaccaactaatggtagtcgtaacttaagaaggcgagaagaaggatgaggaccttgatcctcagattcaagacgattaaaatctattgaaactgattgaggaattggaagaggttgttctagatcaaggaaatcccacaaagtgtgtgtttattaggaagaacctagatgaacaattgaaatagcaactaataagttttttgagggaaactaggatcagttcgcctggagccactcagatataacaggcctaagattatctgtcaccacttaaatgtcaacccaaattacccagccaagagactattgagatgacccttagattttgagagacaaggggcactcaagcaagaagtggataagttgttggttaacaactttatacgcgagaaattttacccctcgtggacatccaacccttttctcatcccaaaaccaaatggaacttggagaacttgtattgacgtcttgaacttaaataaggcatgtctaatggattgctttccactaccaaggatcgaccagttagtggatgcaactgctggacacaagcttctgtcattcatggacgcatattctagatataacaagataaaaatgcatgtccctgaccaagaacatagaagcttcgtaagcaacatgggactttactgttataaagtcatgccgttttgttttaaaaatgctagggcaacatatcagcgacttgtgaatgaaatgtttgcgagacaaataggaagaaatatggaagtctacatcaatgatatgttggtgaaatcgataaagagtggggatcacataatagacctcgcagagtgctttaagttattgaaaaagtacaatatgaaacttaacccnnnnagtgttcctttggagtttcctcattaaaaatttttaggattcatagtcaacgcgaggggcactgaagcaaatcttcagaagatcaaggctttgatagctatgccatcaccaactaaaccaaaggaagttcaggcgttaacaggaagaatggcagcacttaacagattcatttcgaggttaattgataagtgtataccatcttttaatgtattgcgaggaagaaaaaaatttgagtggacagaagagtgggaggagacctttaagagcataaagaggcatttgtccacacctccagttctggcaaaaccaataactggagagacattactcctttacttggctgtctcagaaaacgcaattagtgttgtaatagttcgaaaagagggaaagcaccagcaacatgtttactatgttagtaagaagttatttggggtagaatcgaggtatccccctcttnnnaaacttgccttatgcctaatccatgcatctcgcaagttacggccttactttcaggcacatccgattaaggtgttaactgatcaacccctgagacaagttttaccaaaactagatgcttctggaagattgataaaatgttcaattgaactgtgacagtttgacatagcttttcacccatgaacatccattaagggccaggctttggcagatttccttatagaaggaataactctagaagaaaatctgcttgttcagccagacgcggatacttggaagttgtatgtggatggagcatccaatgagcatggctcgggtgcaggggttatactaatttttctagaaggcttcaagtttcactatgctttaagatttcacttcgacacttcaaacaacgaggttaagtatgaagccttgattgttggtttgaagatagctgaagtgctgaaggttaaaaatcttatatgccatagtgattcgcaattgattgtaaacaaagtactaggggaataccaggcta

SEQ ID NO: 35816 - DNA, 3041 bp, Cannabis sativa
ctttagccttgcctttacctacacataaacgtagaactgtgagtcgacagactcagtaagaaaagcataaataatagcatagactcggattataatcaagctcccatacacctaaccataaccctatccccgtgtccaaaatggttctgagtcaagaatgatcgtacgatagtaatactgactataatatcagtctatactctgtacaatagtcatactctagttgcaccaatgtgatactgtcaagtagtacagtactatcgaccataatattagcctatactcggtgcgctagtcatactctagtcataccgatgtgatactgttgaatagtacttgagccaacatacatttatcgatatcaaatataatactaaatatattgatattgctattataatataatctaacaatcttaactaacatgcatgctaaacatggaaacacatatgcatatcattatactaatcttaactcgtttccaaatttaggtgtgtcggccaacctgagtggaacagctgctcgacgaattacaggttcctaatcacataattcgtaaaaatggtgagtgacacgctaaatcaatttttggggacttaactttgaaactaaaagtttccctatcgatgaataacatggcaataccctaaatatcgcaaaaacgaggaaaactagggttcccaaaaataccccaaccagtgaaccagttctccaaccagaatttgagttctgtgaggtttcctggagaccaaccagtcgaccggttcctacaggtccccctgaactggtcgatcagttcagtgtaggaaacactcaaaaattcactacaccctcaattcgaccccaaactttaccaaaccttctagacttgcttaatatatcacaatagacatctttcatgcaacaaaacatcataacacaatcagaatcaaaaattatcattaaagaccaaagttggagttctaaaagtcaaactttgtctaacaaccacaacaagccatgaactagcttcaaaacaactcaattaacctaatttgaacttcgaaaaatcatctcaaacagtaagaacaactacagaatccctaattcacaattcatgcaaaaactcactacttgaagcttaagaaaacataaagaagaaggttaggaagttttaccaggattggaacttcaacaaggaagcaaagatggctctgaattgcaggaaaaacaaccctaaattgctggttttccaaggggttcgagagagagggagtgaaaagagagagaagacaaatttgatttttctttctttgggtgaaaaaaaataaaataaaaccataataatccatttactaactcgtctaatatcagcatatagcactcatattattccactaaaagacaaagtatcatagggcaaaaagaccattttacccccacattaaccaaaaagttacaaaacctcctagaggtaatttggtcagttctaaaatctcaactattcccgacattcccaatatctaactatattgctccactatacttaaaatactaaaatgtgattctaatggccaaacgtcgcttttcgatgttgtcgagcacaaaacatgcaaaaacataaaattccatacatggcaaatataatacatcatgaattcaaataaatctccatacaatagtaaatcataattattattcaaatttcataaataaactctaattatttgctaattccaaaacaaagctaagcggtctttacggttataattcatgtaatgcaacagtcaatatatatattaacaataaaaaatataagactttccaccacgattattacaaccttaaaatttttatagtataattgttccatgcattattgtttaacacaagaattttaaattataaaattaatttaaaagttaaattaataataaataaaataaataaatcatgtctttacaagggtagcaattcgatcatttatagtacatttgaagcacctcataattatctaaagttgtcataaactatcaaatttggataagatcgatagtaaatcaagatcgttcagatattcttttagtacaaaaattttcctctatttataatatctgttttttatttgaaaaaatttattattcaacttttcagatattattattattattacatgtgtcatttttttgcttactattatactttctgtaatacaatcattaatttatattaacaaataaaaatttaagatttttcagtataataattacaaactttacaatttttatagtataataattgttctatattagaaaatattaaagaaatttaaattattatttagaaaaaataaagaattcaaattattaaattaatttaaaaacttaaattaaaaagaaaaacattatttttgaaaaaattgaactctgatataagataattttactacttacactataattatattattagttatattaattattgtagaattaattaacttaatattttatacttacaagtagagaataaaattaattaaaaataaacataaatttcaaattaaagatgtaattaatttaaaactataaatttagagttaggtgtgaagttttgttagttgaaactaattaataatacatttcaaaaaaaaaaaaaaaaagaaactaattaataatatttaaaactaattataaatgaaaaaaattattaattatgtttaaattttcaaaaaattaatttaaacctctatatattaattgatttgcattaaattgcctctattaactactttctcccctttccaaatcaaaaccacgagatctaaagtaaaattatcaaacttaaagacattctcagccttctgacgacggccccacaggacagataatgatcataaataacataatcaaataaacgagaagaattccgtgaaatatctttcagttccttttaattgattcatctaaaataacttttttaaaaaaaaaacattgcaactcgacagtataaagttaatcacggaaacaaggagagcctgcttctctactgtgtgggggaaa

SEQ ID NO: 35817 - DNA, 1816 bp, Cannabis sativa
gtaaaagtagtcctatttttttaagagttataagtattagtttagataattaatttgggtataaaaaatgcatagaaactcaaatttcccaattataatatattttcaataaactcactccaacaccaactacttgattccgagtctagctcagagattagggttgactccaaattctttgtaaatattataattcaagttaataattaatgcaatacattattttatccatgtatgcccacaccgttcataaataacataacaatagtaaaatcattttagtccggacaatttataaaatttgagtaaattattattaagatagaaatgaaagttactaaaataatttttatttaaaaaactgaatatatctataaacctcacaacaaaaagaaagctttgatgattgttgattatttaaaaaaaaaaaaaagctttgattaaaaaaaagaagaagaaaaaagaggcttgaccgaataagattatctccacgattcttctaatattatagtgaattcttttcaaaataaaataactttaaaaaaaaacattatttgaacagatagtataaaattccataaaatttgtaattttctaaattataaatctactgaacaaaattctaaaaaattctatctctagataaaacttctccagtttcatggattaacaagttgcagaatctctaaaagaatcggcaagaacactttcattcaaattatgacctgcaaaaatatatcaaaagtaaactgaataacgaataaaaaaccaagactggattgcaagagagggatagctaaagaaaacagcatgagctgatcaatacctataaaaactatcttgtttatccgagtttcttcattcttccaatcacgagcgggaacaatctcatatatttccttcacagcctgcatttaaaataatcatcatttcatgcctaatatattatataccaataatacacacaagaaagcccatattttgatgggcattggattgaactagatttagatttagataacttttatcaagtgattttgttatgaaactgacttatattttggcactttaaggtgtctaaccggacatgagatggcgttttatgagtgcaataaaaaccatgggtgcctcttaacaatagtccatgaaactagaatggattttgattatataataataacaataaaaataaaaataaaatactaatccaactaggggatattttaatccctttgaaaaactttaggtgattttatcctatccaattctcatcttcacttattccaatagtaaataagcaagaaaagcataacttcacatccaatttgtcttctcctaatatgttgttagcaaagaatcaactcttgatacgacccgagctgcctggcaggttattctaagtatatggagtataaaataataataataggaatatactgatctaagattgaagggaaatctgatattgatattaaacaaacaagctgccacaggtttcgagagcctggggtctctccaattgatgctgaaatcaataaccagatcaagcatagacacactaaaccactcaacacaaatatataacgctcacaaagccaaaccaaaagccaaaacaataaacacacaataaataaactagagaaaactgaccacccagccaattaattctattgagacccgttacttctcctagcataggtgtaccaagggtctaacagtaatataatcttactaccggtgacctaaaagttagcctatgacaatccaaatcttcataaattaatgaagcatggccaaaaaagcattgatcttcagt

SEQ ID NO: 35818 - DNA, 1768 bp, Cannabis sativa
agctgatcagccatgagttcaggagttgggcgaagaatgtacatgttcgagtcatatcagaccaagcgggttaagggtctaccagtgttaaacttttgaaactctactttgccacctaggccggctaactaaaagagacttgtaataaagtttgtgaatattttttttggatcccaactattgtaaagtttaaattattacaagtttttttttcattcggtttattagaagagtttaaattctgcgctattttgattagtaatcccatttaggggattaggatttcataaatattttgagtagcgtgccatacagacacctatactacatctctccaagatgaaactcagagaggattagtggcaacaggatcaagaaatcaaatcttgaagacgaatctactaactttttctgaatcaagaaccagacaagtataggatctaacatgaaatttctcaaaaaaaaaaaaatcaagctctaataccaaatgaaaggacaacttggactgattactagattcagattatcgagttacttaatatatgatttagcaattgtaactttaacattcaagaatcaagttaaagagcaaacaataatgaagacagtgatttacaagcttcatctgcactgagaacaaatctcagccgactagtgcttgggttctcagaaccagggtaataaaatccactaaatttaaagattcatattacaatcaccaattcacaattaggaatttaatacaatctttacaacatttagtgaagtaatacaaccatcaaccaagatccttggttgaatacacaagattccttgtgcatcagctaagttcttcttcaacacttttctccaatatgaaatcccttcagatctgatgatgaagatgacactgaactcccttcagtttgaactcagctcgaacaggctcttatctttctgttatggataaccatcaccaagctattcaattagacctataaaaataacgaacaatacaagataccacacacaatacagcttgataaaattaaactaactcagaaaacgaattcgctagttaaccaagtcgcaaaatagaactagctacatatagacaaacagttctaactgacctaacaacattttcagacaactgttaatacataacagactgacatggacactaacagaatattcacatgtagttacaacagatgaataccacagataagactagaatcactattaatataatctgtcaaaaatatgaaccttacaatgtctaaaatcattgcctctctgctaccctacctaatttgtcttacccaagctgcttttattctggggagaaatattcaggataacaatgtgattattcaagaaatcatccactcattcaacaggaaaaaaggcaaagaaggttgtttttccataaaaattcagcttatgacaaactgacccgaaattttattgatcatgtgcttgctgggttcggggcgccgcaaaagttttgaggttagatatcctagtgtatcactactacctccctcaatatatatttgccttaatggaggtcaactcggtaagattacgccctcatgccgccttcgacagggtgaccccttgtctccttacttgttcatttgggctgtgaaaattttgttaagacttttggtcgacgcccaatgtaagggtattatcaagggtattagacacagtaagggaggccctataatttctcacatttcctttgcggatgattttgttggaagttattttaccaggaact

SEQ ID NO: 35819 - DNA, 1329 bp, Cannabis sativa
actaataaatttcacacaagcaaatcagccctctgaaatacacaaactaataaatttcacaaccaaaaacacaaactcagtatctttctatctaacaacatgaacaaatttgttcttgttgttctacaatcacaactaggctatatagtaaataatagattaatataaaattatgattgattatataattaacacaatcatagtatacaaccaagttaaatgtttgttctcttacttagttttgccctacaaataagaccaaattacaaattaaaaatgtcataacaataacaacaaattaaaccaatgtatacacaattagtgttaggaaaatcttaaatttaaatcaattctattcaattcaactgtgttatctctatttttgcagaaaaacgtaaaattgcaaacccaattaaacccttcaacattttcgagcaaccaaactataaattaaacaaaaaattgaaaaacaagaaagaaatacatactgtaacagtgtatcataccataagatcactgcagtgtatcaaacctatccatctaaatatcaaaggtaatactataaaatgatttatagacatttccatacaaaataatcttgaataaaagttattcgaacaaactcctaattgtcatggtgaggaaataattacgttcacaatgacatagttatttaaaatacatgttctaaacagtaggcagattacattgagaaaaaaccaaagtctatagacaaacattaaacaactcaaaattagtgaaatcaatctcaaaaccgaaactgaatacctgttggagcttggaggagtacccaaattgctgaaacggaagcaaatatagaatccttgctaatgattctacaagcaaatcaaaagtaccctaaattaactcagtcccaagtcttgaaaattgaacaggcagatcaatactcatacttgctcaaaaaaattacagaaataaacacaaaatcaaacaaaaaaattagctctacttacttaaacattgattcaagcttaaaaataaaaataccaggtggagattcatgagagagaggccgaagctgcgtggtgccgactgcggagagaagaggagctgtgtggtgcggagtggagagaaggaagaggagctggatggtagagaaatggagagagatcgactgcgggtgtgtgagaagcgcagagagagagagagagaggtgaacgacgggggtttaggagagtgatagagggaggcggaggagtttaagaggttagggattttatttttttttattattattattgttattacttttactagtaaagtttttttttttttggtctacacatt

SEQ ID NO: 35820 - DNA, 1687 bp, Cannabis sativa
aggaattacatcgagtaattctgcttctcttgtcgaggccaaacaggccaaagcatcttcatgagaattgtaagcacgaggtatcctaataactataacctttttaattttaagtaataactcacaagtatagaagaggtatttggccaaacgcccgcctctggctaggtattctccattgacttggcaaaccacgatttgtgagttgctaaatgctccgaggtattcaaccttcatctcaagagcaagctttaatcctatgatcaatgcttcattattcgatactgaaaatttgaacctcaagggagcgtgcactttgaacttgttgggggttattagtattattccaccacctgatccttcgctgttggatgccccattaacatacaaggtccatccttcacctgatggtacactagggtcgactcgctcttctataatgattgccacttcgtcatttggaaactcgaggatgaaatcagtgaggctttgccccttgattaccgatcttagcttgtatctaatgtcaaattgacttagctctactgaccatttgagtaaccttcctgacgcttctagttttgctaacacttgttgcaaagggtagtttgtcagtatttcaatattgcatgcttgaaaataaggtcccaacttccgtgaagcgaccacaagtgcaaatgctagaggtccatttgtggataacgcgttttagcatccaacaggcaattactcacaaggtatactggatgctgtctaccttggtcttcacggattagtactgaactaatcgcgtattcggacactgctaggtagattgaaaaaacttctctaggcatcgtcttgggcagtatcaaaggttgcccgaagtgaatttttagggcttgaaaagcttcctcacaattattagtccactaaaactttttattaccttttagaatctaaaaaactccttacatttgtcaggggaacgtggtataaaacgatttaatgcagcgactttacttgtgaggctctggacctcttttggtttggtgggatgttgcatctccaccaattcttttatcttcgctggattgccctcgattccttgctgatttgccctaaaattgaggaattttcctgagcttaccccaaagatgcactttaaggggttaagtcgcatttcgtaatggcacaaggttctgaacatggcttctaggtgagcgacattcctgatacgagcatatcatcaacatatacctccgttgtctctcctattaaatctacaaacatcatgttaactaatctttgatatgtggctcttgcgtttatcaaaccaaaaggtattacattttaacaatacaaaccttgatcactgatgaaagaagtatgttcctggtcaggttcatacatcgaaatttgattgtatcctgagtatgcatcaatgaaattaaggagttcatgacctgcggtagcattaataagttggtcaatgcttggtaaaggaaagttgtccttaggacatgctttatttaaatctgtaaaatcgacgcatgtgcaccatgagccatttggctttggtacaagaacagggtttgctaaccagtttgggtaaaatgactcccttatgaagccacatgccaagaggtgatccacttcttccttgagcgcttggtacctcgcggggtccattttgcggtgcttttgt

SEQ ID NO: 35821 - DNA, 1379 bp, Cannabis sativa
  modified_base (792)..(796): a, c, t, g, unknown or other
gggcataaaacccaacacaaaggtcttctggtgcaggtttaggtcttaggttggctggattctctgatagaaatcacgccaacttccctcctgaattcatccgaaaccacaccaactttcttctgggattccttgttagcctgaggaagacctctaagatcgctcacaagatctatgtctattcctgtcgagacaaagaaaaaaaaaagaggaggtcagtggagtaaaaaaaaaagataaaatataatagtctgactgaaaccaccattcataaggaataatacttaccttcaaggatcacttgtgaggatctcccgtaatgggctacgggggttcccttggtttggattggtcggaagctcctcagtcttggaatccatcgttactgattccaattgaggtttgaagttcatgggaatgaatggaaaatggttggtgcatcccagtattatgagtttgggagggtaaacttttgaactcagattggacattctagcaacaaatagatgatccattctcaggatggatctcaccaaaaagccagaagtttgtgaaaaatgacaagcttgagccacccttttatacacaaagtcgagtgataagaaagctaaggattaaggaatctaacggttgggagtagggcagaatatgaagagacgattcataatgaccgtcgaaactgtacaaccgccagaatcaaaggacgcattttttctaaggagggattttaacgaaaataccctctgtaattattaaaaagcactttttactaaaaaagaactttttaagggnnnnntgttatacccaaaatttggctgccatctcagtggaggacacgtgtcaatataaagggaatatggatcgatgtaatcgctttttatggaataactcattaattacgtaagtataagagtatatttgtgacctgctgattataaagtcttaggcgaggaatcaatatacaaactggcgcttagtatattagcgagaaaccatatatcactgaatgcaaatagcaaggcatcaaggacagtacacataggaagatgaaagcgacacatatcaattgcaaaggcccttagtgtataatgtacaaactaagtgtaacagtcaaatccctatgtgtactgtccttgatgccttgctatgggaagggacacatatcaagaccaagtaagtaaggtgtccgtctcgctatgggaagacttcctctaacttcatcaagtcacgtcagcgaggcttacaaccctggcgaaccataagctaacattaaaatgagcttcaaaaaactctttgaaaataagaaccgtgatcgtcacaaggcatgcatcgtcaacctcggaaggaaaaatggccccagatcgctattgagatcactg

SEQ ID NO: 35822 - DNA, 3070 bp, Cannabis sativa
  modified_base (100)..(100): a, c, t, g, unknown or other
  modified_base (1490)..(1490): a, c, t, g, unknown or other
  modified_base (1814)..(1847): a, c, t, g, unknown or other
  modified_base (2328)..(2329): a, c, t, g, unknown or other
  modified_base (2411)..(2425): a, c, t, g, unknown or other
aaactgttttaaaatgtaaatatataaaaattctaataaaaaatgtcctttaatttattattagttatgtgaaaagaaatattttttaataaatattaantaatttaatattaaaaaataattaatttaaaataattgatccaatttatatttttgtagattaaatttgaattactatgtagattaaatttaaaatataaaattttcacttatagtgaattgaatatacggtaaataaaataatacgaattaaatggcatcaacttcaatagtttgaatcaaaatttcaatatatacggtcatacaaaaaatattggtgtttattatatatcaattacaatatatactgtcataaataaaatattggattcacaataataatcttatttaaaaataaaaaatctccgttttaacggaactaccataaaattccctaaatatttttaattaggaccaaatcaccatatcataataatataaatgaaggattttatgataaattatatccaatcaaatgcaagatattgtatttcctgtcgaatatctagtatagtctaatcaaatacattcaatagttaaacgaaatagactaaaagttcgattttagttcctattcgtttgtacggtgaattgggtaagataaagttttacgacatacaaattacaaattatgcttttcaaaaactatctagaaaaagaattcacctaacaactaacggagtaattaaaattgtatttaaaatatacataataacccatataaaaatcacccaataattcaaaagtaaaaaaaaaaaaaattaaaaaataatatatagattaatttctttttttttaaaaaaaaaactatctcaaaaaacacaaaataactttattagttttactaagaaagaagatatttaaaatagttatgatatacacacttttaatttacacatttttatacaattaatgacattaaaggttgattttatccatttaaaaaaattgattttatttatgttcataattcattgatgttatactcaagcccgaacccagcacaggccatttaggtttgtgtttagaaccctaactgaaggagatctcaaatttttaaaattatcactttttagtttttacatacaaaagctaaaaaaatttaaaaatgctacttcatataaaaaattagaaatataacaaacaatgtaacggaccttgcccatctcaagataaactatggttatacctcgaacttgtaatcctacgtcatgattggtttagtaaacctttggaaatctctatgggagatttgtatttgcacttgatagattcatgtcatgtattcaacttgtcatttaagactttttttaaaaaaaaactttccacttaagaaattatttgtaatatttgtaacatgaaataataataataataataataataataataatattttgaactctgtgtttcgtaaaagttaccaattgaattatctgttttgttaaatnataaaatagaccatgtattttctaaaatggtacaaatagaatcctgaattgattttttgtcactgtaaaatttaattacaattcgatttaaaagtgttatgacaaaactgtttatatttcctgtatctattcgtattaagaattgtcttcaagttagttatattaaaaaaaaaagttgtcaaaaattaagctcaaggtcttatttttaccattttagaaaatacagggtctattttatcatttaacaaaatatagggtccaatcggtaacttttgcaaaacataaggtcaaaaatagtatttaccataataataataataatannnnnnnnnnnnnnnnnnnnnnnnnnnnnnnnnntaataataataataataatgtagtatagtccctccaaatgaaaaggtctccaaaagtcatttctggaaaggtatctgtctctcgaaaagatgttctcggacagctttgttgctatccaagaagaagtctcgtggaatgatagttgttctcctagaaggttgttcccggatgactttcatgtccactccgggtatagtcttcacgaaagttagtcctcctccggaagtgagttataggtggctagatgttcttcctggaagatagtctcggatagtcgactccaactggttcgttcttatccgggatggtccttcagcgtgtgccttgattcgtgactccgagagccttcttactcgctcccagatgcactcctacttatgttgacgtggagatctcattcaaatgagagttggttaagttagttattgcctaactaacttaacaacctaagttcttacagccactgactttaggatcttgnncctaagcctataaataccaccaacacttatcatttttcaggatgatatcgatcaggttgagattatatatatatatatatannnnnnnnnnnnnnnagagagagagagagagaggtatcgagaggtacagagaaaaagagaaagattatgtttaggttttgtaagaagaatcttttgtagatgaagaagattcttgggtaagagtgtgagagttgaaacactttaagagaattcatcagagaatcgatctcgactgtattgtacatattcttgctcttgctcaatcaatgaagaggatttggtggtattttagaactggagtagagccatagatcacatcgatctattagacttgaaccagtatatatcttgtgttaatttctttattttttttttgccttaattattttagggtttttccttactctgttcatcttttttcattcaattattgtttgtaatctttaattttgacattgttaattgtttgattgtttaaagtttagtcgttttgattctgcacctttagttgcaattttcccacaaataatagtaataattgttatcctaaattttgtcttcttgacgtggcatgtccacgtaagccaagacagagtacatgtggaatacagccttaccaatagcaagataaggttgttgggaatattttactaggatcgagatttactaacaagtatgttgattaacattctaaatatgaatatctctaaaacaatgaaa

SEQ ID NO: 35823 - DNA, 1720 bp, Cannabis sativa
tggggggaaagaggtcttgcttaaagcggtggtacaatccattccgacttatgccatgagctgtttcaaactcacaaataaattttgcaatcaattggagagtatgatggctaatttttggtggggcactaaccaaaatggcaccaaaattcattggataaggtggaattctttatgcaaatctaagcacgaagggggcatgggattcagatcgttttttcatttcaaccaagcacttttggccaaacaagcttggaaaattttcaacatgccggattctctactcagccgtttgttaaagcatagatatttctcaaccacctcttttctagatgctaatattggtcactctccttcatatacatggcaaagcatttgttggggaagagaactcttggttaagggaatgagattcaaaatttgtgatggccatcgcatagtttgtgccactgatccgtggattccaagccatacaaattttaaaccagtaagctatcatggtccacccaacatgtcggtttcacacctcattactgaacaaagggtatggaatattgaattgttgaacagcttcttccaaccgattgatgttgataagattttaacaatacctttgagtttttttgcctccaatgatcgtctcatttggcatcattcaacatcgggttcatataatgtaaaatctgggttccatttagcctcatcattggaggatgaagatgcatgttctccctcagatccaaatctgacttggtggaaattcttctggagcttgaacttaccaccgaagataagaatttttgcttggaaggtttatcacaacataattcctactgctgctgcactacacaggcgaaaaataattgattcagcagcttgttctctatgtacatctaattgggaatcagttgggcatgcactatttgattgtaagcatgctagaagaatttggcaagaatccaaatttttcattgatttccaatcagccaaagcaatgcagaatggtgattatttccagcttttatcttccatttattcgcaagaggactttgaattgctggtttgtatcatgtggggtgtttggactgatcgtaacaagatcttccatggtggtcaggcacggctaagttcttcaatcgttgcttatgcaactggttttcaccatgattataatagagctaaaaatcaaagcaccagtatgactacaacctcaccttctacagatcgtccagcatcaagcagtcgtcgacatgagcaaattccttggtctgtgcctagatttaatgaatttaaattaaatattgatgctgctactgatagagatcagaaaattctgggcataggggccatacttcgggacaatactggtatggttttagcagcactttcaaaaaaggtgcaaggatcatttcgatcagatgaaatggaagcgaaagctcttttccatgctctcaattgggcgtcccagttacagctctctataacacatattgaaaccgatgcattgagagtttcatctgcaattaattcttctcttgctgatttatcaatgtttttcagatattatatttgatgttcagtgtctcttgtcctttttccctaatgttttagtttcccatattaaacggtctgctaatcaagcagctcatgggttagctaaatttgctttagggttggatgatgacatgttttggataggagagattccctatcctatttt

SEQ ID NO: 35824 - DNA, 3516 bp, Cannabis sativa
actttgttatgaaatcccatatttcatgtaattttcacaatataaaaagatgagaaatagactactgctcctattgccaattaattttgaaatgtaaccccattatcttatcccaaaccctaacattgtatgccaacataggtaactaaaatatcaatcgaaaatttagaaattaccttatgtactattttttttttttaaaaaaatttacggtttgggttgctctggtagtttctcagttagtttctatgtgaatttctatgtgcattttgattacgttttaggttgctccattagttgctatgagagtttttatataaaattttttatatatatataaactactttaaagtgtaaaaataaaaaaatctctataaaatttaccattaaggaatattttgaaatatctaaattaaattagcgaaatatataaccactggcgtaagttatatagtattctgtgttagatttttatttgaatttattaatttttagtgatcaatagtcaatgggtttagtatctatgtgtgtaaagtctagttaaagtaaaagtgtaactttttctagttaactgaagtttttgatgagcagacccagtctaattagggttatgtagctaagttaagtgtcatccctaattctataaatatatattgtctcatcataattctatactttagataataaaataaataaaattgattttgatttaaaaatatagagaggaagacttagttgatagtattgcactatcgaatcgtaccaattgttatgaatcaatcaggtatttattttaaatatatatatatatatatacactatagtattctatgttatatattaattcgtatcttggaattattaatttttctaacatgtggtatcagattacatattgtatatgatataggacctataatttattcaattcattaatatatgttaattttcttaaattacatattgatttcgctattattttatgttaaattttttttatgtattgatcttaaatccttaagagttttgttcctcattaaattctctttttaatgatatattatattcataaaattatttagtaaatcgagagaattttcaaattcaaattttaaagattttatgattgtattatgaaattaattttggggttttctgattctattgatttttgactaaaattgattgtgcgaatctcattcttgactaatttacaatgtttctacatgatttatttttcaaattggttcagaaacatatcacaattgagttatttttcattcttaaaattcagaatgggttttcaatctgatttacaattttttagatgctaatactcaaaattaacaccagcaatctcttagaaacataatactgagtaaaattcatcaaaaatcatgtgtttttattgtgtttttggccagaaagacaaccagacccgaaactgcacgaacttggtcttttgacccgctgctcaactcaactgttggttgaagacaatctgcctggacgaagcccactcgcgactttcgaagagtgagggagagtgtggtagttttcgaactttgttttcgatgatttttttcttcagttattagaatttaatttctaattttttagtgatttttatttaattttttgactccttttattaagtattattaatttaaaagatgattaaaataatttttgatgattgtaaaagttttatttaatcatatttttcaatacaccctttggttagcaaaggttggcatagcaattaagaaaaatattgtagttcacctaaacttatagggcgttataactaacttgttactaatttgactaactaattacttattagtaactagtttgtaataaattaactagttggtaactagttactcataaaaattatataactagtaagtagttattaattaaatgtttaatcttgtagtatttctttattttgtaagttgtgagatcaatttgtaaggatctcaattatttggtattaatcggtttagctagctagaggtatatatttattaactttttttattaattaattatgaatactttgaagagtttgactatcttaaatattcattttagtgaagtatgttctgcgatctattgtactgcggtcggatgggtcgaataatttgcatgttacatgaatttgaatatcttaaatattcattcacactgaagtaagttctacaaatatatgtattgcagtcgaatgggtagtaaatgtttgtattattaaatgttgatgtgatggttttatcatgtttaggattgttttttgttgttattaatagcttttaatttttttttaaaatgtttaattatagtcgttatactattgaaatttgagtagaattaagactggttactgattaattatttattatactataattagttactaattagtaatttaattaaggtaaattagttactagttagctacaaattatataaatagtaactagttataagaaactatttagttacaaattatataactagtaactagttataattagttactagttagtaatatgaaaataatatttattttaaactattcttactctaatttagaaagtaaaattatattccaaatataaaagaaatgcatgtataaatgcaagctaagctaagaatcgaaagaacaaacttgacacatgagaaatctagagatataattaggaggttaataatgacatagagagagtagactaagaataaaagttgtattgatttcttgttcttattatgatgcaaaagttatcacaccaaaaaaaatataggtttagcttttatgttcgtttttgaaatttatcattgtcttggtttgtcttgttgtctatataggttctttcatattatgtcataataaaagttaaaaagtcatttttcaatatttgaaagaaaccttctctcaattgctaccattttttaaaattgttattggaagttaactagtttagtttagttcaaaatcaaataactcataacttcaattcaccaaattccatgttataactcaagtcatatgacaaatcctaaaaacgtcacttacacattgccaattatatttgggtagaaaacataaaatatcattaataatgctatcttataatccttttgtagctcaacactcttaattttcatatagatgttacacaatttctcatttaagcaattattttggtttttctttaaaaatatatcttcagaagcattaatcagtgtggtagtgatattttatttatgtttttttaattaattcgaatgtaactctaataatatttgtttaccgaaattttagtataatgttcatttatggcgtctcatacacacatagtcataattggagaagatgtacaataagcgacgttatgtgattttattggaagtcaatgcatgctttttcgtatgaagtatgctttctttaacctatttttataagaatatttttttttcatgtttagataactcttaaatacttagagtaat

SEQ ID NO: 35825 - DNA, 1905 bp, Cannabis sativa
taattttttgacggtaaaatatactgcaaactcccattttattttgttatttactatttcgtctaaaattttatatttaatgttacggtatgtaacataggtatacataagtggcaaatattagtaacaattttttttttttttattttggttaaaatcataaagaaaattagaaagaatttaagggtaaatactattttggatattgtattttgtaaagttatgatcattttattatttaacaaaacagaaattataattgttaacttttgcaaaacacacagtctacaatggtatttatccaaatttaagagacaaaatacaataaaaattataaaagaataacaaaaaataccgtcttattatgttgaacttatgttaatttgttgttattttttttattatttatatgttattttttgttattttgatgttatttaaattttatttttatgtaatttttttgttatttttataaaaaattgtaaaaaaaaattctttaaagggtaattttttttaaataataataattatctaataaaaaacccaaaacattcattggtcactttccctcagccctccataactttgcacaatactctccctctctctctctcttctctttctctctcccttgaagagatatttagagagagatttggtgtttggtgagtgatgtaacaaagtgattggtaggattttattgtctattgataatttttttttttgaaacaactttgccatttcatcatgtaatcaattaaatatattagaagccttctatgttaatttataatatatgataacaaaatatttcctctgaatttatttcatacacactcttggaatttggaatcattgtggatctgatccaacaatatataatctcaagtttatttgttgcatttctcccactttagaatttaatatttctaatatcattaaatcttatgcccattaggttttgtaacaagaataatatatatggttttatatgttagttattatctacgcagttagaagagtaaaacatattgtagatacgtttgatattttggagagtatcttgaatcagataattgttctgttctctatatcagctttaacttacccactgtataataattttatcactttgattttctcttaacttttctctgttgcttagtgaaattaattattcttccaactaatatttaaactatcttttgaaattaccctgctttcttaaagtcatgtggtacaaaaatttttagtcttttgaagaggagaagacatgaattggtttgtgtaaaaaatttaggggacttagaagaaattcggttattattttttactaggaagtgaggcttgatttgaaccttctttttgtagcttcagttcaatgcatatatttcatttgtgtatcatcttattcttatttggccctctcgagagctttttgttatgttaaaaaataaataagggaagcattgtaactaaaagagtttgtctgatcttgatctctcattggtaaggtttctttgtttataattttagaagcaagacttgttggtgcaattctcttgtctattctatataaagtgtgactatataaccgaattataactgaatttttatttatattaaaaataaaataattaagtattaaaaataaaatagtttttgagatatctatatatctatatatctatatatatttatgggtgatttattatagatatttattatagatatttattataattgaatatatataaacttaattatatttaaaatgcataacaccctcttctatccatttttaccaggcagatttacacgtaagtgtgtattactttgttcttttattttctttatttttcaatctaattgactctcttattgcttctaaaattatttttt

SEQ ID NO: 35826 - DNA, 5800 bp, Cannabis sativa
ctagtaacagactgaaaatgttaaaaactcctacgctattatattgtgcaagcaaagagattaaactatatgaacacaaaagctacgcattataaaaaccttggctaaattgtggggacatgattacattgtattatgtaatgtattatgtagccttagattgaagaagaagctttggttgattaacttgtcggcctcatcgaatgaataatagtcatttggtctatagaagcccacaccaagagatttgatatccaagtagccctccaccaaattcctcaatttcaaatggtatagctttgagctgacaatttctttttgtatataaatataaagatcacaaaaattagaccatacgaacatcactcgaaattgagaaaatctcaataaacccataaatgttcattgccactgtccattatgcattactcgaaccaatgaaaggtcttacaaaagttctcatttcagctgaataagtacgtattataaaataagtaagctggagatgttcatgttgttgtatgtatgttgttgtaagttaggaggcctttatggtgtggaggtggccataattcaaggctgctaaattggcctgaaaaacaccacattccttactttgctttttttttttcctactagtcaacgatagataatttaaaagtatgactgctaataatccgttgaaagaaaaaacaactatagtaaaacttaaaaccacttataaatttcatacgaataagcgttttctgtgctgaacaaataagtggtgaaatcacacaactacgcataataatattaaaaaagtacgaatagtcctcaggaaacaaactatgaaaaccgttgtttcatgggaaccgtttaattaaatgtagtttttttaaaacttaattagaagaagcttgattcttcttgccatcttccttcctcgaacagcatggtagttcaggtttgaatcccttctcaagtaacttctcaacctcctcaaatggtagtcctttggtttccggcacaacaaaaaagatgactacaaagccaatggctgagaacccagcaaataatagaaaagtccaagcagagcccaatgcattggtgagggtcaagaaagtctcactaaccaaaagattagctgaccaattagtcactgcagcaattcctccaccagtccctctgtatttcaaagggtatatttctgagttgacaatccatggaacactccccattccaggtgaatagcatatgatataaagtccaaggaataatactgccaagaatccaaatctgctgggacaaccttctgagtaccaagtacgtttctctgctctacaagagtctctgatttcaggagtggcagccaaacaagctccaggaagaagctgttaaaatgacaaagtaataaaattaagttaagatggttctctcaaacaaaaaaaaaaaaaaagacattaaatatgtaccttatttgtactgatggaacagaaggcacagtctggtgacttcaaacatgtcatacaactccatgattgagcatttggggcagagatgtaagctggacatgttgtgtttccaccaaagtgagtggattcaaagttgctaacagcaggagcagttgcagcagccttgaaaaacactcctcccaaggcacaaaggcatataatgattccaactagggagacaagcatgaatcttctccttccgtacttgtctacaaatcccatacttatcatggaaccgacaaagttaaggccagaagtcactagagaaagtgctagagcagtctgtttagaagcaaatccagcaaactgaacaatagtggggctgtagtacaagacagtgtttatgccaacaaattgttgagtgatttgaacagtgacgccggcaagaagacccctgcggactattttgttttgaagagcacccctcaaccttggtataaatccatcaccaagttctccatcttcagctttctccgcttccaccgaatcctgcaatgctttcatctctccttctacttgatcagcagggtagattttctctaagatggacctagcctcatctaccttgttctgatcataatgaaaatatgaacaagttaggattaaatcattcgtatatcatttttaaagatgagctagttgagactctaacctttctgtagagccatctaggagactctggaagagacatcataaggaaaaactggataagggctggaagtccagccacaccaagcatccaacgccaagttccaggagcctaaaccaaaaacatttttttatactttggtttagagaaagattgaaaaattaagatagacatatgaataaacataccttagtaaacaaaagattgatgatgtaggacaaaaattgtccaccagtaatgagcaaagcatttgtgctaacgagtgcacctctgattttagcaggtgaagattcagatatgtatagtggtgatgtcatggaagccatcccaacaccaagaccaactaatattctaccaattataataacccaaggagctggagcagctgccattacaattgcaccagcaaagaagactatatctgcacctataattgattttttgcgaccaaaggaatcactaatccaaccaccaattgcagcaccaacaatagcaccagcaacagccatactcactattgtctcctgcagccatgttttcttatctacttcatcaaagtcctccctaatgtaaaggagtgcaccagaaatcactcctgcacaatcatacaatacatattttaaacgtatatatgttaagtggtcaaaaaatttctctgtttcaattctatacattagtttcaaaaggaaaaattaataattttttaaacacacaaaacgtctacatttaagactaaaaatacacattaaatgataaactaaagataaaattgacaagaaatctatcaaggaaggtagttcatggatagtatagtagaagaagagaagagaaaggagatgtgattacctgtgtcataaccgaaaaggagacctccaataccagcagagagagcaagacgcataatataaggagtcctccatgtgatcttccaacaatctgagaattctgtcctgtccgcgtgataacctccttccatctcatgcaactctcacctcaatacccctgtaacctcagatttaacaaaacaaaattggtcaacaaatccttatcatttccttaaatcttaaaacataactgttgaaaagttgaaaaagtaacaggtaaaataaatgattgttaattttttttttattttttgaatggataatacaaattatatttgcgtcacatacatagattcacaaacaagaaaaaaaaaagacagaaaagttttgtccagagaaataaaattccacaagaaaaaaagacacaaatatataaaaatatacgatacgactggtagttttaacacggagcgggaatgaaaaatatctatggtacgcttactttttaaaatctaataaaatcaaactacacacaaaatttaagctttgattctttatatttaatttgttttggaggccccaggactagctagggacggcagcctttatacaaataaaaaaaacattagtcatttttgtaagaaaaatggctacattatttttcagaaaaggaggaaattttgaatgaagaaaagagtaatcaaccaaaaccatatataatagagaagtttattaagtgataagaccattacctgactgactcttcttcactaatgctagtgtatttctattcactagttttcagtgtatctagactaagtttttttttttttaattctcacgaactttttgtgttattcatggctgggtggggaggtatttatagatttgaaatgaagagctttaagaaagtgaataatcattctctccataaaaaaaaaaataaaaaaaataaaagaaaaagcgaattaatattcataagatgataaggacggaattatctcaaacgaaaatgggaacagaatccttaattgattttggtaattgattaatggatataaattttatggatttttttttattatttttatttaaagaaaaacaaattgccaaatacggttattaacccatttaaaaaaaaaaatacggttattaacataaataaaaattgcaaaaaagaaaaacataaataataaatataaaatatgacaacaataataatgtggaattaatccattatctacttaaataatcaagaagatatcatcccttattcgtgatcacattaaaacttacatatactataataattactgccaataataaataggtcgactacatattttaatgataaaaaaagtatttaagaaaaaaaaaaaagaaaaaagacgaagaaaagattcatgtgcttcttacacttgttgaaagtaaaactccatccatgcatatcgcgtgattaattttcatttgaattattttttatttatccgttacagtcaaattatgactataagaatataagcaaaaattttaactgttagaccattgatacaactcaaattctaaattataaattgagcagaataatataaatatatatattattattatattgacattaattctcttctgaaaactttctgaaaaagattatatgcacatgcagtagtcccagtatatctctcaatcgacctatcatataaactatccaaaatagacttaagataatatatgtatttaaaaaagaatatagtaagcatttattatatgcacactaatttaggatttattatatagacaatacaatagccaatcagtattgttattacttaccagtgttatctaacactttctcgatatgttgagttgcgattggttaacgatattttttaaaaactattatgttaaaatatatgggacccgatacttagttgaaccaataatgaataaacttttaaagcctacctttaaatttccataccatctccaatgggagtgggagatgtacatggacacaacaatttaaccaacacaacaattgtaaaagatttgatgcaaaaactattcaaccatcaatactcatttaatatttattgaaaatgtgaattattattattattattattgtctcacaaaagaaataaaaaaaaaaaaaggaaataagaagtctacattcaaatttagttttgtctcataataaaaatgatgtaaaacataaacaaataaaaataattacctttggcacattattagtataattttaaaaaataaatgaaaaaacatatatgctatatcattagtgaatttcgaaattaattaagaagaaaaaaaatatatcatattttcatgcatgtcttaatagatagaaaaaatagaaaaaagtgagataagtatgtgtgtcaaccttatacgattttggtatagaaaaaagtggaaagatagaaaagtaaggggacgtttcgtaacacttttgttttttaattttaaaaataaaaaacaaaagtaaaatttgtgtttttaaaattttattttaaaaaaataaaaatgtgttctataacgacttttgtttttcaattttaaaaatagaaaacaaaagtgtgttctataactttcaattgtatttttatttaattttatttaagtcaggtccaggtccgggtccggggcggggccgtagtccgagtccaggactgggccggcgccagagtccgggtcctaaggtctaggttggggtcggagtctaaaattttttattaagaaaaatgttatttaaaaaaattttaaaagtgattttttttgtttttaaaatgtagattcttaattaaaaaattgaa

SEQ ID NO: 35827 - DNA, 1693 bp, Cannabis sativa
gctccacaagagtcctaaggttcagagtccaaactaaacctaacagaaagaaagcatttacaactttcgatgacttaagaaataaagataaataccattttagatcctgagttttgcaaaagttactaattggactttctgttttgttaaatgacaaaatggaccttgtattttttaaaatggtacaaataagatcctcaattaattttttgttaaaataaaagttaataataatccgatttaaaggtgttatgacaaaacattttatattttttgtatttgttcggttaagaattaattgtcttcaagttacttatattaaaaaaaaattgttaaaaattaaacttagagtcttatttttactattttgaaaaatacagagtttattttgtcatttaacaaaatagaaggtccagttagtaacttttgcaaaacacataatccaaaatagtatttacctacaaaataaataggagcttaatatgataatttcttagaagtatacgaaatctggttagatttcaatatatacatacctctgagtctcttgaaccaagcaaactcctgtcgttaatgttagccgatccaattaaagtaatacaatcatcaacaatcattattttactatgaacatagacctgcaacaccaataaaagtatcgagttaaatgccgagaagtagggccataatttgacagagtaaaaatgccctagacaagagatgatatacctgactggaggccaatggaccgccatcataaagattaccgtaagcccttaagccataaaaagatatgtagtcatgcatttttgcaccaagtatgttgtacagattatgcaatatcgaattgtttcctctacagattgttcgatattgccaatgcaatattgctcttacagaggcagcaccagcatcatccagacctccctgtgaaacaaaaagtttattattatatgtatgcgtatacaatagagatgaaatgagtagcaactaacaacagattgagatgctcaacctggaaaccggggagaagtggtatgacaataataaccctaaaacacttattgtcattgtacgctcgcactatgcgcctaaacattgcttctaacacacgattttgtattaactcatctcctgaaagacctgatatgaaaaattgattctgtacaagtcccacaagaatggaaaaaatggtcaggaaggcaaaacacaaagtgaaacttagtaaggttgtttgtaacttatgtgaggttttaaacaataaagtacctctatgtagataaagtgctctgctttctcaataagagagcaataagcactatggatgctctcttcagtttgacttgttccagccgaccattgactgacacttctaataacctgaatatcaaatgttaataatcataatagggtgttacaaagcccaatattactattaacactattagataacatatctagataatcgtccctgccactggtatagggaccagaaaaaaatgcttcactaggttaaagtgacaaatgtacaatggatactcactaccagaaagataactcgtgtatcagcacaacagaaaaatcaggtcagtaagccattgatactcccatggtaaaagcattactgaaattttagaacctgaatgttgaaagtatcaactatcaacccacctgacatcgacatgaagtacga

SEQ ID NO: 35828 - DNA, 5214 bp, Cannabis sativa
  modified_base (470)..(470): a, c, t, g, unknown or other
  modified_base (1276)..(1277): a, c, t, g, unknown or other
tatctaaaaacatcacaatgaaattttttcatgtggaaataccaatcaaattctcaacaaaaatcaaactaaatggccgtcctaaatctgcctaaatcgaatggcccgaaacctccctgtccaagattggaagtcttataactcatccaatcctgatctaaatgttaccaaattttgtagagaacctaaaaacatcataatgaacatattttatgaagaaacctcaatcaaagtcgcaacaaaaatcaaactaaatggccatcctaaaactacctaaattagatggcccgaaacctcctattgtctgagtttggaaatctcctaactcatccaatcctgatctaaatattaccaaattttttacagaacctaaaaacatcataatgaacatatttcatgaagaaaccttaacctagtttgcaacagatttaagttagcacaaccaagttaagtttgagttctttgaactnaaacttgcataacttttgctacaaccacccaaaacaattcaaaccacttctaaacagtcctaaataaccttaataatcagttcataaccttcataaacttattcaacatgttataatataaaaatccactgaaaactaacaaaaatcctagaaaactaataaatttaaggttaggttttaccttagaagtttggaggagctagttgttgaactccttgatgaattctagctaggaagagggttaaaaatggtggaaaacactgagttttggccctggttcagaagccacgaagtagagggagaaggagaaggtgatttggtattttttttacttttctttttgcttttgactttgctttttctttttggttcctttttatttgctttctaagcagctggtcatcctcaaaaggatgagccacaacgtatcccttccaaaaagagtgactaagctcttagggtaaacagactaaaatgcccttatttccccgcaaagttatctcataaccctagaggtaaaatggtctaattctattatttcgttaaaccccgatattctaagatatccaataatactgtcccataaaatacttgatacaaatttgtatccatgtgactaaaattgccattcaacccatttccactgttactgggcataaaaatataaaaatatgaaaattcatagatagcatgcatatcacacatataattcaataaaattttcagaatggagaaataataatcatatcatatattttcatgaaaatagggtctataaagcataaaatacataaataatcacatanncatattaattagtgctaagtgtcccactaatcacatgtctaagtataacggccattaccagtggccaggcacaaagtaaaaaaaatcctagaaaataaaaaggatgattaaatttaagaatactgagatataagataatgaaatttatctaggttggtttgaaattgcagagcgaaggaggcgaagggctgaatctaggctggtttgaaatcacagtaagaaggatgcacatgaacgaaattactagtggtgatgttggaacgaaggaaggaagggcgacgaaggaagatggctaaagttgcagggtacaaagtgtgcatggtgccgatcttggatggaggaaagaaggtggtgagaaggaaggaaggttggtaaggatcgggtaggtgaggaagaatatttttataacataaaagtataatcgggatataaaaaattaaagtaggataaattatataccaagaaaaaaaagtaaaaataaaatgagttaactaaaaaaatggtacaccttgcaatttccatagacttaaaacaacaaacgtaattgtagaagcccacgaaaaactcaaatcagccaaaccacagatcaaatacaaacagagcattgagaaccgtcggatctaggttagaagaaaccacaaagccatcatcgttccaaataccgagtatataagtcaacgtaaacagattttgggctttcacgcattctcgctctggtaaaggtctctctagggtttcttccttaaaccttctttactttccacattatagagaggttaaaggtcggcgctgctcttgccgtccgccttgattaagctatagctgcttcgtcttggccctcgattttgctttaactctaatatccattatcttccattttcaaaccccaaattttcataatgggcaagctctcaaaggccgagaagaagatcaactacgactccaagctatgccagcttttggacgatttcacccaggttcttattgtggctgctgacaatgttggatctacccagctccagaacattcgtaagggtcttcgtggagattcagtggtgcttatgggtaagaacactatgatgaagcgttcaatcaggatccactctgagaagacaggcaaccaggcctatctcaatctcattccccttcttgtggtacgttttttttgttttagaaatgggatttatttaattgttattgctaatttgagattcgttatgttgtgatataattttttatatgttcataagctaattttgggctgtattgaatttttcttttagggtaatgttggtctgattttcaccaagggtgatttgaaggaagttagtgaagaggtctcgaagtacaaggtgaggaatcattgcgatttatgtaaatatgctatatatttatgcgtgtgtgcgtagtttttgtgctatgttctgtacagtctcacatatttattattgtctaaatcgatgaaatcatagtgactaattattatcactgttttttattcaatattgctttttgctaaaaaaaaatacttttagctattaagtgttgaatccgagaacacagtgcaactctattgttgcttagttttgcttggttttacctgttggatatcaatttagttgtgtatggtattcactgattcttgtattatgttgtattccataccacattttcatgatggtaattaatatctttgtttctatttaataatttcattttgttataaagtacggaggttgatagtaagctttgaatccgagaataaagtgcgaatctgttgttacttagtcttgcctatttatttaggttgagtgtgtctaatttaattgattatgtcttgcaaatgtaataggtcggagcccctgctcgtgtgggtttgattgccccgattgacgtggttgttcctcctggcaacactggtctcgatccatctcagacttctttcttccaggtctgcacacttacctaacctatattttttcattcattgtatttccttagaatttatgactaacacccttgggctcaacaggtgcttaatatcccaactaagattaacaagggtactgttgaaattatcaccccagttgagctcatcaagaagggtgacaaggttggttcctctgaggctgcccttcttgccaagcttggcatcaggccattttcatatggtcttgttgtccaatctgtttatgacaatggctcagtcttcagccctgaggttcttgatatgactgaagatgatcttgttgggaagtttgcttctggtgtagctatggttacctcattggcattggcaatttcataccccactattgctgctgctccttccatgttcatcaatgcctacaagaatgttctagctgtggctgttgctactgaatactcgttcagacaggctgatgaagttaaggagttcttgaaggtaatgtgctgtttgtacgagtttactaaattcttgcagttgtttttttgttgggcatcttgttaaaatattttgtgaacatttcaggaccctagcaagtttgctgtcgctgctgccccagttgctgctgctgcaggcggagctgctccagctgctgccaaggtcgaagagaagaaggatgagccagctgaagagtcagatgatgatatgggattcagtttgtttgattaagttatatgttagttgtttttaccattttaggattttgagtttatctcttgcttgattatcttttttgcctcaatacattttcgtttttatttcttattttggagatgttctacaaatataaatggttgcttaggttatcaatttaatttttattgactatttttttgctttagcttttctaccgttttgatagtcgagctatttatctttaaaaatgaccatatcattttcgttcagtaattcttgtttttcatcccatttgtttgtagttgtctattcgaatagaaagtcttgtgaaatttcaagaatatgcaagatgtggtaggcaagtttgtgaaatgaaagttaaaatacttaattgcatcagctttctaattaaaggtgaaacagtttatggttggctgatttaagtaggggtgtttatagtctattcagatactatttatgttaaatgttgctacccaattcaattaatttttattatttattgaatgtatttgatgtatatttattaatttaatttaaattcatgaaatattttaaatttactattttttggatcggtatcatccatctaatatattggattggtatcatccatctaatattttaaatgtaatatattggattggtatatactttatggacgatgatattagtttgattagatctatttgcatttttggatacgttatttttatctgtttagtaaataacttaatacaatattatttctgttttatagtttaaatggatttattttttttattgattattttgatttcaattgtagtttaataagcgtgtcattatatcaattactatattataacataataataaaaaaattattttatttacataaaaataaatgatgaatatatttttatgttagttttttagctattttggtattaatttttaattatttgtatattatttttttagggaaatttgcggcataaatactcatttgttgattttgttgctaataagtacccaatttttaaaaattgcggcattaatactcaaaatctcactttttaaactctgctgttggtaccacttaacagacttactactaaggacacgtgtagtgtcctgataattcttcctttctttttacctaattaatcaagtaaatacataaaactaattaaaataaaaataaacaaattagtaatcatttaaaacatatattatcaaaaaaaaaaaacctaaattagtaaatctaaaagtactgacctagccacccacccacgcactccttcaccaccacga

SEQ ID NO: 35829 - DNA, 1217 bp, Cannabis sativa
tagatgtgtcgttgagtttgtgatctagaaaaagggtctcaaggtccatagtgatttggttacaaagctggggttgtaactggggaaattacattgtatacctattttattttacttgttttaatttttatttctattctatattctttaagatatacccacttttataaatgatgtctccattagatcccttaggttagtgtaaattatatgctagatttaagtaagagagtgaggatatattaggcaatccactcaaaaaaatgtgtatattttaataaaatataatataagggtattttttattaatgaatacaaaaaaaaagatatttttcaacttctccccgttgtaacttgtaagcgagctctgctccgagtccgaggggccgtttggttttagcatgtgagaattagatgtgagtgaatgtgtagtatacctttggttgatttaaatttttgggaggaatgtatttatttattttttgggtcctaatgaatattaaatggttatgttaacccatttgaaaagttgaggtttagattctcctacatataaacttttctcactctttcctaggtcacctaacaacttaaaacaaactgtgcctaatggtcgccattttgaaggactcattcccagttcccaccggtcggtcctatgtacaattgcaacgacgatgcataaaaaaagaacccctctgcaatcacctcttaataatcaatacaaatcactatacctagtattattatgtataagcttatggatgtctgatttaattactaaatagttttgaaatggacaaaatgtaaagaagaatgaaatcaaggtaataaccgccaaaggaaatatataatactagtattctaatttcagttttttgcatgtccttcgtttaatttcagtgcataaagaagttgatacaaaatagtctgaatctgaaatagtgaacacaaccaccaatgcttcttttcttttctttcgcaagttagctaaaactacattatgttatccaatttacgtaaagtgagaactttaagtaaaacacaaacattgaatataaatccttcacttaaagcaatggcgtcaaactattcgaggtaatatataaaattatgtgaaactacagaaaattggggacaaaagaaaacagagacaaatgtaggtgttgaaacttgaaacacaagaaagccaaagctgggttttttttttttttttt

SEQ ID NO: 35830 - DNA, 2230 bp, Cannabis sativa
ttaacggtgtggtgctttcattgagagcctacgtgaaaaaagctcagaaaaaatccctcctgaccagaagaaaaacttttctccatggctaaaaacagggaagatgacaatattcaatctgaagagactactcaccatcctagaaaagagtcggcgagctcacaaaggcctcataactcacaaacaacacgatctacacgatcaacatgttcaaggaggaactaacctgaaggtggccaaaacccagaaactgggaatgaagtacccaacaatgacggtggtggaactcctagaagttggggtttttatgaccccaacaggtttgtttcgttagttgacttggaaaatttccaactcaagtgatagttgcaggaggcaaaccgaataaacgcagagttggaacaagaagcagccgcagccagggtggctcaggaaaatgacgcacaaaactaatttgatcctgaggtaaagagagcaggaaatccctcgtggaaacgagagagatcctgggactcaacctaaggcaggtgggtttcccccgagacatcgtcaatgcccttctcgcactgatagagaaggggcacatacaaaccccagcagggggcatgtatcaacccattctcaaaagagaaggtcagtatgtgatgaggccagttctagttctaaacgtacgaggactcgtagttgatctacgcgaggaggggatggagctcgtcgcagtactcatcgagaaagtacgagcacaagcagaacagaaagttactcaaggacgaggtccgtgagtaactatgatccacaacagttggatcttcgtaatcaattaaactagaaaaaacctgaccttcgttaacaactcaatcaaaagcaagaggatcctatccaattgcaaattattgagttggaagacaaatttaggaggtatcaatatggggaatatggacaacatcctggatatgacccgagcctttccatctagacatcatgagtgttgaattcccccagggatttaagaaccctcacgagtcgtcatacgatgggactatagatcaaggcacgcacttgaataatgttaacactatcatgcgagcgagcaatgttacgaataatttacggtgtattatattccctacctcgctagttggggtagcgagcagctggttcaacaaatttacacatcattcaatcaccttttgggaacagctgtctaaagacattaagaaacaattccaggcagcaagagacaggcgacccgaagtgtgttctttcaccaacataaagtagcagccgggtgagacacttaaggcatacttgagtcgtttcagtacagttgctgcgagggtgagaaatttgaacgatagtatccaacttactgcccttcaagtagggatcacgaccaatctctcaactgctggaggtgagctatgggacgacttgcagggttgcccagtgaagaacatcagtgagttcaatgagagggcttaggtgtttgttcgaaaagaggaagcaagaaaagagatgaagttgttaaagactagctcgggaaataaacccaacactctctcgacaagtaccatcttgacgaaggctaaaaatttaggaggctctaagaggaaagatgactccaaggaatcagccaaggacaagaaaaaatagaagaagcatgacaagaacgtgccaatctacactatttataccgagcttaatgaaacttgagaaaatatttatctcgcatgtgagcataaggtcgcattccgtaaacctgagcccatgagtcatgcgagacataatagagatgcaacaaaatttgtaagtatcacaaggacattgggcatatgatagaagaatgtcgtcaactgaaagacgagataaaaagccttatcgtgtgaggtcactttcaacaatatgtgaagtgacaaggtgatggacaaaaacagcctaataacccaggcaaccatagattacaacctcctcctcttgaaggagaggatattctagttatctcaggagggccacatattgctgggaaaagtaacaatgcccaatagagatatgtaagggaagttaagaacgagcagtctgcttttgctctggaatctcctaagaaagcaaaaactgatgaacctccgattgtgttctaggaggaagatgcaaagcacgtgagatatactcacgtagacgctctggtgattaccatccagctcgctaataaaaggataaaaagggtgctggt

SEQ ID NO: 35831 - DNA, 2915 bp, Cannabis sativa
aagttttagttggttttgaaatatactattgtaattttggttttgttgagttatggtgttgttagaactgagttttaggggtttaattatgtttgttttagttggtttgtttgatttttggtggctatgctttgtgttgagcaagtttgagttttggaattcaaaagcttgttcaataatgctgaaatgcactatagagcttgggtgttgtatttttcagttggaatatgttcattatgttgtttttaggtgttctggatgttttggtttgttttggggtagaattaagcttggagtggagtttgtatgttttcttgcagaaaaatggtgaaccgtttttctaggaagaaccccacaaaacagtccaccgttttaggaattcagtttaccagttggggcagttttgggagcctcaagttttgcattttatcaatatttaaggcattaccacactatttattgataagaaaatttttagttttgaatttaagtccctaaaagtgagttagcaagtcacttaccgatttatataaattttgacttagggcctttaaattattgagcagcagtttccactcaggttgaatgacacatgtttagcatacatgattttatggttgcctattagttaacatatcaataaaagaagtattggtgtacatagagttgcactggatacgggcagatatatgttgggcaatttagttagtatgaattgatgctaccatatcagtggaactagaatgctgagtataggatggtattctggtcgattgtactagtagtatggattgacactatcacattagtgtgactaaagtgtttagtaaaggctgatattatggtcaatcgtacttttgttaaaaatatttttgacctagttatagtatcatgattaggtgtatgagaacctggttatggtttggttacatgtttatgtttatgcttttcttagtgagtttatcgactcacatgtatgtttatatgtgtaggtaagggcaaggtaaatgctaggcagtagtgagtccagagctagatgaagattctacttatcgaggtggttagacctagagtgttcagatcttcgggacagttaggctcatattttattagttgttgaactcgactatcattactcacaactccttcctggatcgataatagtgagtgaacaacttcccaaaatgacgattacagagacattttcatttgaaagaactttaccacaaattctacctagttacttcaaattaaaagaatgatgatgatgaagaaagaatgtagccatcattggttggtgttccagaaatctcagtatactaacttctgagattgatcaagttcaagcaatgcttgaacttgtttaaggttaagaccttagtcccaacatcagcaggattattttcagtactgaccttctctaaatcaaccatcccttcttttatcttttctctaatccagtatagtcttatttttatatgtttgctcttttcataataaaccagattcttacaaagatagatggatgattggctatctgaatacacagtcactcctcctttgatttgcttcaactcataaagtattccctgaagccataacgcttctttaaaagcttttgtagtcgccataaattcttcttctgtggttgaaagagcaaccacgaacagtaactaagccttccagcatatatagttctggtttgtcaagaaaagatcaaaagtggttgattttttggtatctctattcgaggcgtagtctgcatccacgaactctttcaactctaattctcatttttcttcctcataggtcagagcataatcccatatgccctttaaatatctcaataaccatttaagggctttctaatgttccatgcccggattggacatgaacctgcttaggatgtttaaagcgtgagctatgtccagtctcatgctcaccatcacgtacattaagcatctgagaaccacagcataggttacatccttcaactcttctttctctttcatgttgttaggacatttttcctttgaaaaaatgagttgtccccctaaaagaacgaatgtactctttgcatcttccatgttaaatttctaaataatcttcttgatgtacccggactgcttcaaactaatagttctttcctttcggttttgtgagacttcgatactaagtattttttaaactgatccaagctctttcatctcaaattctctcttgagcttggctttaatacttttgatcattgatttatctttgcccatgatgagcatatcatccacatagagcagtaagaacacgacgttagactcctccagattcttaaaataaaggcagtgattgtatacagattgtttgaatttgatttgatgcatatacgtatcgaatcttttattccattgtcttagggattgttttaaatcatacaaagatctattaagtttgtaaaccaactcaactctttttccttccaccttaaacccaggtggttgcttcatatagatctcttcatccaagaatccattaagaaaagcagtttaaacatcaagctgttcaacttcaaactccaaatatgttgtcaaggatagcatcagccatatcgtcttgtactttaccagaggtgagaagattttagtatagtctatatcttcctcctaagtaaaacccttagacactaacctggctttgaacctcacaggttcattctcattgattccttctttcaccttgagaatccatttgcactctccaatctttttgctctctggctttagcataaaaacccaagtctttttctttcgtagagagtccatctcctcatccatggcctagagccatttagacttgttttcacctaaaatttcatcttcataacttccgggctctttaattttagcttgttgaactactgc

SEQ ID NO: 35832 - DNA, 1078 bp, Cannabis sativa
caaccatcctctccacactgtctggttaaaacaataatcataaatacaaattatagtttaccatatttgtccaagtcttgtcaacaataatcaaaggtggtctgccttctggttaaatctcgtggacgaccgaagaacatcccaactcaagcaaggtcgatgagaagtagaactatagagagagatagatttggggctttggggctctttggtctttaacactcaaatgtgactttcactagtagtggttgtagtatagatcgagcggttgattccacagggcggtgattatggacaaaaacgtttgtagaaaaataaaaacaaaaagttaataataagtgacaaaagtaatcaaatgagtttgagacttttgttttgagaataatatattacaagaaagcaataaaatgtgtaatcaatagtaaaagagagaaagacttcaagattcattcatatgcttgtttgactagcttgcacctttgattcacaaagttgacacatatgatgtaacattaaagttcattatattttgagtatacaagttcttacaaataaatgaaatgatttaattttatgtaaaacctataaatgacattatgcatcaatcaataatgcaataaaagattaaacacaaaactaaatattttcagtaacacatagaaagaacatgactaatcctatatatttttagtaaaaataatggtaaagagatagagatggttatgacaatgaaggaaatgaacattaatattatttttattaatttctagatacatagaaaaaacacgactaaacctatatatcatttaacagaaagtaaataaaaattaacataaaagatagaaatccacaatactatcatttgtggtgggtgagaaagcttgggatgttgatgttgtcaaatatttatttgacgaggaagtgacggtcaatattcttggtattcttctttttaattcagttgctatggattactggtattgggagtttgactcttctgaggagtatacaattaagagtgtgtttaaattattatagacaaaaccgcgagagcagtgtggacagggaggttgtgaca

SEQ ID NO: 35833 - DNA, 1063 bp, Cannabis sativa
tctttgtctctctctctctctctcatattttagtgagtgttgacattttgtctgatgaaacgtagtccaagcttgagttagctccaacaaactatgattcttgtactactcttggttaccatatcaaataaatcacaactcaaaatatacccaagttttgctattgtcttatttgcaaggattggttatggtgtttctaataaattattttctcagcttgtggacatgtttggctgtaataattggcgttaaagctgcttttgattgtggaactgaagtaatcaaaagtagaggtaagatagaagatagtagtttttggtgaaaaggttgccatttgatcaatagaaaaaaaaaggagaggaaagacaacaaaaattgaagttgatcgatatcagttgaattttaacattttaagtttagctatttataaataaagtatcacgaatgctttaatttcaggattatacacatattttcttttggtatatgcttttaagttactcaattgatgaagaagctgttagaaatttgaccctgctttctggctactgtgctttgagatcaagtaattccacctgagtgtgagttttaaaactaacgcatatatacctaataacatatgttgggaggaaattattccaagataagcaaactacatatatctattggtaatgtaaagtgtaaacattcatgaaactttttagtggctgttggcttatgtctatatcaggttttctgttttaatcattttgttaatcttgcatttgacattattgtgattaattgagtttctagctgttgtgttcttgaatgagaggtcaatccaattcatcacagtttgtgataaatggaagaactgatcaattgaaaaaagaaaaacaattgttatagaatatatgaacatccaaaattcattagaagaagtggagagtctagaagaaggcaatatttataaattatacttattttttgtattaatctcataacaattgagtctaatgtgatggtgttatatatatagggatatgattttgtctcgtgatgtactttcatagaatgtatt

SEQ ID NO: 35834 - DNA, 1176 bp, Cannabis sativa
aaaaaaaaaacctcattcattgctacacatattttctgaaatgtctacatgtaatatgttgaagtttccaattatgactatgatcatctcaatagtcaccatcttgatcttatcatttccatcctccattgcaataaccaaaacaaacccacatccctttaagaaaatctacgcctttggtgattcttttacagacacaggcaacaccaagtcagtttctgggccaagtggctttactcatggctctgaccctccatacggaatgaccttctttcaccatccaacaaatcgatactcagatggacggttggtgattgattttgtagctgaatcactttcattgccttacttgcctccttataaatatgttaagggaaattcacctaatggagtcaactttgctgtggctggttccactgctatagaccatgagttctttgttaagaataatcttactcttgatattactcttcagtctattcgaactcagcttcaatggttcgataaatatttggaagaaaatgttgggtgtaaagttaaggatgtgaattgcaaagttggtgattttcatgatgcattgttttgggttggtgagattggtgccaatgattatgcttacactattggatccactgtttctggtgacactattcgaaagttggccatgattagctatactcaatttttaacggtaagatttacaaaagtagacacatttactaataatattaagaacttttcaaaacagcattgttgttaggcatagcacctctagacatgtagtcttgtaattgactagcaatacttcttaaaaattattatattaaattatatgggacttgataattagttggactgatagcgatattgacacgtaagaaaatgctaagtactaatggtatcttttatcatttttcttttcaaaaatgtgtcaaaatgtgtagaatgaatttagaatgtcatttcccatataattatcaaaatcatataatggagagttttagcgagagaatatttcccatcagttacccattcatatatatatatatatatttgaaaaaaatgatgtctcaaaaagaattaaaaaaattataaaagctcattaaaacaacaaacataagtggaatagtgtttataataaataaaattaggaaatacaaaattggtaataaaaaa

SEQ ID NO: 35835 - DNA, 2614 bp, Cannabis sativa
  modified_base (516)..(516): a, c, t, g, unknown or other
aatagttcaggaagaatttttcacggctagaaaagttcaggaagcatgatttagtacatattaaaatttagatgtaaaaattctaattaacctaaataatatacttaattattattgtgaaaattttgatggtgcatctccagacatttttatttattaatttttttaattgtgtatattgtatatatttaagatattatgtaaaattaacctgtcgaaaataagatttaaacagttaattacacacgtttaaaataaataatttaaatattataaattattataaaattattataattttacaaaatattttgaataactacaaaatacatcatcataaaaaaaaaaaaaacaaactaaaaattaattatcctaaaatgtcaaaatataaaaggttgcaccattaaaccttcctattcctattatattattattatgtctatatatgtgtgcagcgttcattgaatacgtaagaagtcattggaggtctatttattattattagtattattattnttattattattattattaatttcctttgaagccctccaaatcaaacttatagccttttaaatactcataatgttgtggtccttatttatcactggtttcatattggtgttggtgtggtccttggcatcacttgaaaattttagcatttcatttgagatggtaattaaggccaagcaaattaaatacttgtttattgtatataactcatgtagcatatataattatttaagaaaattttaataattagtttatataaattaatagcaatattattaatacttggtaataattacattaaaaaaaaaaacaatttattggtttttatcttcattgtagtatgtgcaaataataagattaaaagtcaaggaaaactgttgcaacttgcatgtctcaaaaattaaagtagataataatgtctagtaaatgaatggcaatgtggttgtaatgtttatatataaccctatatagctaggtcaataaataaagtttgtcaaatattaaagtcacattattattattatcaattgtagtaagtttattatggtctctacactctagctttctcgtaaagttttcatatattggatttagttgtcatacgcggcacaatcataaccatggcaataataaataaatttaaaaataaatgaaaatgtatttggctataatttttttttttttaaaaaaaaaaaaaaattatgttaaaaaattcaattgcactaatataattcatacctaatagatgaatcaaacactacaaaaaatatcacttttagtaaactgtgacttttaccagcgcattttgtaaattacgctggcaaaaagatcaaaaattaccagcgcatttacgcactgggaaaagttatttttttcagcgcttttcattttgtgctgataaaagttctaataccaattttgatttgtcaactccttttgccaacacataagaagtaaattctattttatcagcgtaatatcaaacttttactagtataaaaatgtactggcgaaagtaacatttctttagtgaaactatctcaatacatatggattttagggaagaaaagaaaggaagtagtagtgaatatcataaataaaaaagatagtaatcgtgttgtttggaattaagagtaaaataaagataaaactaaatattataattatcgtattattcattctagtatacttgtaattatataggggtagataatatataattttttttcttttttctcaatttttggagggataattgatgaaatttgtatgtttggagagaaatgatctctcatcctatcttcctcatatcacacaaagaattcattaattatttctttatccttctccaatattaatattaataatattcatatgtatatgtatatattaaagagagaatgaagattttcattaagtgacaaaaagtcaagataaattacaaagactcaaatttttctcaaggcatatttttcttttcaactctagatcccattctctaacaaatattgcctccacaggacaaactgaatttttttttctcaaaagatttctcatatttgtattataagttgtaattaatcatttggttttaacgccaaattaactttaatttgatagacttaaaatcatatagtttactaagaaaaaaaacaataatcatgcagtcaagctgcagcttctttcttcaactaaaagtaaaaaatactttgaaatagaaaatatatttatatatgttttgtttaagctcacccaatataaggtaaatatttatttggactctatattttgcaaaagttataaatttgactctttattttattaaatgacaattcaaattttgaattttttaaaattttaaaatagtataaaatagattctaaactcattttttcgtttttttctcaatataactaactatgaaaatagttttcagcacgaacagataaaaaaaatataatcattcttgtcataatacttctaagtgaggttattattaagtttaaattaatttgatgaaaattaagcttgttaattccatttttggcatatttaattgacaaaattattttattatttaatgtattttcggctggtatgt

SEQ ID NO: 35836 - DNA, 5832 bp, Cannabis sativa
aaattaattttttaaatgttaaataaaaaaaaaaaaaaaacaagaaaagtctattttgctaatttcaatttgttaaaagtctattttcacaaattttataacttttgtatagaaatcattctcttttttctttttttttttttctaggaaaggaatcttgattttctacaatggaatcgaatctaggagatgcaatcttccattacacattgcaaaactagaaaaagcttattcgagaagatggagaaattttatagtattcaatcacatttggaagaagaatcaaagttctctacaacttaagagttacggcagagaaattgattatttaaggagtgttggcagaaggcttttatgaatctctctctctctctatttgaggtgggttttcaatcattttgcatgatgctgatttacatcacttttggatgttttgaagagtgaaatttaaattttggtagttgtttcatttctagcatatattatatttcacattgagactaatgtaggtagcaactctctttcattcagtttttggagtgtccatgaagttcaattccaaggcttgtatagtcttttagtgttcctgcttctcttaatcttaataatctcaagaattctactaagttcacaaatttggtaagactctagacagcttggtgtgtaaaaattatccaaactactgttgttggggtgcattggattagctaacttggtgtttgatttttctattcttgtttattttatagtgaatttcccctttaatattgaagagtttcggttaattggatcaagaacatgttaatttaacttgcggtataattttttgtttcaatagaaagcttgggaggtcgcataggctcccttgaaaaaaatgatgatgatgggacatgatgtgaatggctggaagtacagtgcatttgtttagcattagaattaatttttctgctctttggcagcccattagcgccttacaggtgtagaaaagggtaaggatacagaattaatttttttgtgctagttttccttttctatgtattttaatgtgtaataacataactagaaatattagttaaaaggtaactatatataaaattagagggtaatctacaccttcaaagtgcaaataaattcatttagatgagatagcttcttattacatttgtaatttccattcacaattatttgttgctttgatgtattatgatttgtagttacttatgtttaaacggcacttttctattctcacgacactaaagtaattattgttattttttattttaattccacaatttttgagccttataaagatggcaaggttggccttcttgctccaaagttgttcattgcccttaatttaggaggtctagctctaagtgtttggaacgtcgtgattgttgcactctccatatattttttagtttccttatcatttttttcctaataatctttagcaatccagtacatgttgaatgattcacacttggtcatcatgtgttctagtgaatgattatgaggtaaaaatagatatttccaattgggataaatttattctttagtgtttattttttctcccatatatatggaaatgaaagactttatatatatgtacttagtactttcatgtaaatatttaagccactaaggctagcttagtggtgagggaggatgggaaaaagggagaggttatgggttcgaacctatgactcttaagctattaagctaatatatgattgtaaaataccattacgctatactaaaaaaaaaaaaatatatatagaacattgagatttagtacaatctagttgattatggttttgaattattttaaattattaacttgtcctcacattattatctctaaactgtttgcacagaatagtttcaatgtaatgaaacatgatctgtggtataaccccacaaaaaagtaaagaaagcataatctgtcgtgaggtaactaattgttttattttccttttttcttaacagattttggtattggtagaagaataatatgacatttgttttcttctcatacacagactagctagtattttcacaactagaaatgttttgaaaagaatagttgtctaacatcttttcccacaaatggcatggaatcttttaaaatgtatgtatacacacataaaaataatctataaaattaatattgtgagaaactaattgatgtactgtaattaataataagtgttctgaaattagccacacacagttgggaaatgtcttattttgtattatttgtcaaagttggtaaaataactttaagtagcttacattaaattttactattaattctatgcttcttgtgttaattaagcattattatgtcttagattttattttctgattggtacttaatgtgttgttaagcaggacatgttgtaagagttgcagctttagggagtgttttgttgattaaacctccacttacactgatatcaacttacttacaaggataaaagggtaaatacatgcaaatccttaatttggccttcgacttctatatccctaacagaaattagttagaatggattaggttataatccacacctaactaatttctgtaactaactaactactaaaccaaatcagaaaccctagtgctatatatatacctgctgcaaatccagttaggcctacggttgagtgatattcttcaagatccagagttgaaaagcttgaagaggaaggagctgaagctcgtacatgcacaagaaacagaagaaagttagtatagttagagagagagggaataaacacattatatgtaataaataaagagattgccagtcaaaaccatacctgtgacttggaatctcatccttgtaactctgaacatcaatttcatagtggaatcgagctctcaatctgaggagcagctcaaacggagacgtagccaatttattggtgaacttcaggctaaatctggtgttttataaccctattttctttctgtttgtgtgtgtgtttggggatagatcagatctctagtcatatctgatcttgtgtttgtgttttgttttgggatttctaggttgttgtgggtttggcttcgagtttctcagagagagaaactctctgctagggtttcgaaagaaaaacctaaggctgggagaagtgattgagaagtttctcgatccttggtttttgtctaaagccaaaacggagtcgttttgactctgctgactttgaaaagtcagggattgttaaaggttgaaattgaccttggtttaatactgattatttgatgttggtgtagggtaaataggtaaaagcacctaattcctacatgtttaagtttggattgtattttgcaaattcacgagttgtttgctgaatttcaaagaagaggagggtaatgaagttaaaggtgttgggaaacaaattaaagttctaaaaaaagaaactttgttgtactacaatcaaatgttgagcattactagattttgtttcaattggatcagaaagtagtttagtattattttgaccatcgcctagtcattggatatgtaagtaactacctttgtttattgaggtagttatgtctatttcctctattttttcaagttttagctaaaaatagatcatgaacaatcaattttttagccaaaaagtagtaatgaaagaccttgctaagagatttattgaattatgcttatatatattatagctaaaaagtaattaatctttgtataccctaccatatagttttttttaattgattgtaaaaaaaatattaatcataataaaaaattgtgaataaattagaatcaatcataaacttttgttgtgacttaaaaagaattagtgataataaaaattatgactaatttgtcacaaaataattattagtaacaataaaagttgtaagtgaaaataaatgaattgtggctgaagaatggttgtaactaaatataataatatcttaacagctatagtcacaaagactagttgtgaccaaaattgacttttagtgacaatgatatttttattgtaactaaaatttttagtcacggattttttagctacaacctcgtcatgacagcaaatttttcatgacaaatttttggtcacaatattttttattacttttagtcacaacagaatttaagtttttttattgtgtggggtcggtgattcgagacaatgagggtcgtgtgtttttgggtcttcacaaatttggtggcaggatgcttttctccttattcagctaaattatatgcttgtttggaaggctctcaaatggtgttacactataaggccggagattgattgcatggagagtgtgattgccttaatgcaatttatgcaatctatgcaattacaaagagaggaggctctagtgacgatggtgttattgttaatgttggttcttgtcatttaattttgggtgagggaagtattatggcccatatattagttaaaatgtgtttaagagaagatttcaattctatctttgaaagtgatattatggaatgtattactcacttgattggaatagagaacaaataaaaaaagtacagcttatgtggctgaattattatatggggtgtcaggaaagaactcatagcaaagacacaatctgcatgaaacacattgaatctcgtccgatcactaacgaccacaaaaatttcctctactgaaaacacccctatttcataactctccctctcaaaataagaacgttaagtcagggctattttcgtaaaaatacaatataaaaaacaaaacaggaaatagcctacgaagcatcacaacatatggactcagcatggtattatccaagctagctcaaagtgaccacctttgtcttgtctccatagaagtgtagaagtaccataactgttcacaattcaatttacccaaggaagaaaatgaagagcccaatatgctccacttctagtgacgaagatgagtacgagaactcggcgggtttggagccgtattgctggtggagatcatcggctgagaagttcaaattagaatgtgcaatgctcaagctctataataatctcccaaacgtggctgggctcacgccgaggctaagggtgttgaaagagcttgagagattggctcttgttgcaaacgaaggtatcaatgactttaggcagaagctggtcacgtatcggtccggtgatttttggatgccaaccggaggtgttccaaaggaaaaaactgatattcctccggttattacaattctattggttggattttctggttctggcaagagctctcttgttaaccttatgtactgcgttttgggccgttcaggacttgttccttttgcccaaacttcttctggtaattgatatttactaattaattattaagtagtcaactgcaggttttgttttgttaatatacattttgctttttgtttggtttattagggaatagtcccgattacacaagtatgttcttggaggaacataatgtgctgaggtcactgcgaagtgggttttgcgtgtatgactcgagaggttttgattatgaacaaatgagtgagaatatagaagagttatcgagttggatgaatgatggggttcaccataaccagctgtgtttgagatcaggagattatttgttaagaaaagatgaaatagaagttcttatgtcaagatcgtcttcaaaatttgaaaggaggagagtcaattgtgccatggtggtggctaacatagcagagatctataaagcttacaaggcagggaattacaagcctatggatgccattaaagagctttactcttcacctgcctttaaaaaatgcagtaagtagttcaatcaactgattcagcttataattaacac

SEQ ID NO: 35837 - DNA, 2770 bp, Cannabis sativa
tgttattatagagcattgttattgggcactagtagtgcccaatatcttttataggtagcgtcctacgattggttagtaaaagcatctctaatggtaacattctttgaagatgctatagatttacatatcatctaaatatataatattttattttattttatgttcttccacattatttttggcacatttacttctaaaatactccaatggtataatacatttaaaaatactataatcatgatctcacacattattatatatatatttttattattaaactattatatatattgcacaattttttattgtatataaaaaaaaacataacatcaatgccattgtgtgacatcaattcaaatttcaagaatagcattcttttccaatgacatccttatattttgcaacctaaatttttcacctcatcaagcattatctaaaatattaccattggagatgttataatattttttaaaaattatttcttaagttatataggacccaatattaattacactaagatatgacactgataaagatgctaatattctcttttagcaattctataatattagattagagataaattatacactatatatagtatatacagtccgattaaaattgccctaaataaagtgtagagctaagtccataagtaacttaaaaaagatcataaacctacaatctcttctcataaccaactatttaaatcatgtggtgtaggagaacttatactatcacatttcaaaaataaatataataattaataaaaagatggagaggcatagcatttgggccaagaaacccttcacaaaaaccaagtcactatcattgtttccctctatatatacaccccaccatcaagctcataccttgtaaataatttcttcattttattagcttttgccttccaaatccatctacactactttctcttcttccctattatatatccatatatagtacctctatagttgccacatcaccaccaatattatattatattaatttaacactacatttttaaaaatggagatttatattgttgttacttgtaattttgcatacacaacaacaatattattcctcatatttctctctattctcatctattatttggtaatcaaatctcaaaactacacaaaatccaaatacaagctcccaccaggatcaatgggatggccatttataggacaaactctccaactctattcccatgaccccaacactttcttttccaccaaacagaaaaggttcattattttttcatgtacttaattttaactcattccaatccataaacagagtgtttggggtttaacagggtttatttttttgggttttgatcaggtacggtgagatattcaaaacccatatattgggatgtccttgcgttatgttggggagtccagaggctgctaaattcgtgttggtgactcacagtcacttgttcaaaccaacttacccgaaaagtaaggagaagctgattggtccgtcagctctgttttttcaccacggggagtaccactcttcgttaaggaaactggtgcagagttctctggcttctccgtacaatctgcagaaaagagttgccgacgtagaagccctcgccatttccactctccactcctggctcacagcacaagatcaactcgttaacaccttccaccacttgaaaaaggtcaaaattttcttttgtctttttctctaaaactcaatatcttttacttatttaaaattttgttttatctaatccaatttgtaactaagactatatatttacaacataaataaatataaaaagaattttgctattaaaggaaaattaaaggagttaaatatataaaatcaaaaaataaagtattatttcttgtaaaatttttatatttttatgtttaaataatttttttttttatatttttacaatttttttatataaacaatacgaaaatacgaaaatatataaaagtaatagtaaaataacatttaaataatatcaaaacaacagtaaaaaataatatacaaataataaaaaattaacaataaattaacgtacaacataaaaagacagtattttttataaataaaataattaaaatcataaaaatatttaaaattttgtaaaatcgtattttttataatttttcttttttgttttaatgtatttgtgaaataatccacatatatattggggtcctccacttattttttgtttgttagtacaaatattatattaatatgtggatgttatggttaatttggtttgcagtattcttttgatgttggcattctttctatctttggtcatttggattctaattacaaggatcaactcaaggagaattattccattgtaaataaaggatataattcttttcccaacaacgtacctggaactacatatcaaaaagcactcatggtaattaaccaaaaataaaataaataaaaaatctcacatcaattatattcaataataatatttaattaattgaatgcatgacatgtatacatgattgtgttgtattaggcaaggaaaaggcttaagcagattctgagtgagataatgttggagagagaggagaagaaaatagcagacaaggatctattgggtcatcttttgaatttcaaggatggaaagggaaaagctttaacaagagatcaaatttctgataatatcattggggttttgtttgcggctcaagacacaacggctagtgtattgacttggatccttaagtatctccatgatgatcaaaagcttcttcaagct

SEQ ID NO: 35838 - DNA, 1793 bp, Cannabis sativa
atactagcctagcatactactttgtctttgtcaatgctgccctagtagaaataaatgacataacacttatccaaggtgtaactaaactttatcgctgatttatcatgtaagtgtgattccagtgtattgacaaatcatgggacataaactttgaaacgtataatcatgattatattccactatgttgacaacattataattatgattaactatatgttcttgatttaataaaatttatacattaaacatataatcataaaaaacttgtgaaccatgcaatataaaatgattttcagtctttattaattaataattttgattatattgaaatgtgttttatttaggacataaatcctcactgtggcacagtttaaaaccgtcgcctatgcttgggtataggcgacagtttataactgtgttctatactataaataacaaattaaaattgtcgcctatagtacagggcatggttataaaccgttgcctatacctaagcataggtgacaattttaagaagtttagcttggcgattgtttcgcccgttttgcgatggtcaaatagaagacggttatataaattgatatgaatactttgcccgactgtttaacaccttcaggaaaaaccaatcttgtagtagtgatgtgaagaatattttaaataattagataatacatggtcatttacaaaataaatttgagatattttctatcgtctgccaaggtttctcatttctaaatgcttagttgtctgaggttgtcttttttctctagccaagcccaacgaccctcccgggttaggcgtggcatggtctcggattgtggttttgctactgcgattaggttattgcaacttcaattagtattgtccatgtgacatgattttgagtgtcttttatttaagttactacgattagtcttgtccctgtgacatgattttgttttgttttgttttgtttcgttgttagttcatcttctttgttcttcgatagctcaccatcaaatcgctgttaatagttgggaataacaagttttctgcgattaaaggggttgttagtggtgcagttacgtatcttgcgaatagttaagtgcttaagctaaggggtcgaatctttagaatggtagaagaaactgaatataaatattttaaggttaactgtgatactgcagttttttctatttaatttattttagtttattttgttaaacgatccaagaattagatgttcgattggttgacccgtttttctgattctaattcttattgtgtttttaacagggaaaatgtcttaattatgttgcaatttattattttagcatgttgctattactttgttaagttataaaaaaaattaaataaataaagtgtatccattcttaaaataaaaatatatagataaataaataatagataggtacctagaactaaggtaatttgaggaattttaaggagggaagggactacgagttaagtttccatttaagaagatctgtcatgaatcaatggctcagctttctaaactttattttttatttttggagttaatattttgagattgtagatgtgaggccactgctacttcgatctagttgtaccacaactcttttattaagtaaaattatgtaattattaataatgtttaattattcatttaactattacactactttataggttcccacaacttatatcattaattgaacctaaaaaatatacgtccatgaaaaatgaattgtcatttcattctcactaattatggcaaaaatattgttgtgaaaattaatataatattattt

SEQ ID NO: 35839 - DNA, 1968 bp, Cannabis sativa
gagaaagtactgacagacagtgtgcagagtgctgatactgccgttactagtgacacggacttaatttttgatctgtagctagtgacggactcagaatttttactttgtggggacttatttatcattaaaaaatatttatacctatattataatcactcttactagattttactagatttattgcttttctactattttagtctacaattatcaaattaaaaaaaattatatttaattttttaaaagacaatatttttgttgtggggctatagcccccatataagttataaaaatatttattatttactttatattaaaattataactattttaaaggaactttttattattttgttgtataattattaaactaaataaaaaatatttatttttttttcacactaactttttttttagtgggggccacaatgttattagtgtgtccgtctggttatggcagtgattcttcagaagaccgcattgaaatagtgtctgggcgggtttgatcaaacaaaagcaacaaaaacaaaaagcttacaagtggtcgaaggaacctttgaataggatgatactatgcacggaataagaagttatcaactttgtaaactgggtggttcattatccttggaaatcttatgatttccccacaatgttgtaccatgtagctttaaaaattgttcatttaagtttttgatgtgtacactaactaatgagaagagtctgcatagcacaccagtttctatttattcatcacagaccctagccatgggtccaaatagaaagagcagagcagatattttcgaattccaacatatgttatggtatttgatccatttggaagtcactgaatcaatttgtggcattgacaaggagcaaatacgaaagataggcatttttagtctactcaattagtaaaatctgaacaaagattcattacaactactgcaccacgcaactcttagcagtgaactaactaacaactttacaagcttactaatagtagtaatgtagtacataagtcacaaacgataccagcaccagtaattaaggcaggtttcaacttccaactcttcaagagatggtaatctcaacttttttgggtttcggaggtggaggaagcttctcaaccacaacagtcaaaaccccattttcgcatttggccgatatagctccgacattggcattttcaggcaatcgaaattttctcaaaagcttgttgttcaccctcctctccagtctcaagtatttgcacccttcttcttcaccctcctcacgtttcctcttcccaccaccacttcgaataatcaaagtgttcttgtcctcaaccgtcacctgcactccaattcacaattatcacttttacttttattttgttaaaaattaatattacgatcacgatacatatgaatttacataattatgaaaaagtacctgtatatcagacttggacaaaccagggacatccatatagaagatgtagtctttcggagtgtccaaaatgtcgacagggatggttgaaaaggttttgttctcacgtgtttcttgacctcgagaagggaaaataagtttctctatggtctccgggaaatggaaaatgtgattcactgctgagcccaagtctccattgaagaggctcgcatctgcgactccattactcatttcttttctttcaaatatcaaatcaattactcctaaaaaaaccaaagaagaataaaaaaattgctcaacgatttggcgtagcaaagctagagagagtgttagtaaaagtgatcaacgatcagtttgtagtgatgtttggtggctgagaaaattgagggagagattttctataaaagagatgagtggaaagtatcgttaaagttccagaaaaacagagcggaaaggcacagaacggtctagaagcctcgcggattttggagaggggttatggacatacacgtgtctaattgttattggcttgccctatac

SEQ ID NO: 35840 - DNA, 1041 bp, Cannabis sativa
  modified_base (31)..(40): a, c, t, g, unknown or other
ccatgaccattgtatataataaaataaaaannnnnnnnnnattatttaaaataaataatcatacaatcaaaaaatataaaaataataatttaatatcacttacgccgtatctacacgtctccaagaggaaaccctacaacaatttcattctataccatagcctgtcaattttcatatcattgacgttgtatacacgtcactaggaggaaaccctacaatggtttcattctatgccataaccttgcattttcatatcagtgatgctcgtatctacatgttgccagcagtatcacatcacctaatcaggtgagcccgtacttcttctcggtactcatatgtcaccgacgcacgtatctacacgtctctaggagtctcgcatcacataatcagatgtgcccgtacctatgcttggtactcatatgtcattgatgcccgtaactacgcctggtatgtcaccaggcataccacatcacctaatcaggtgagcccatatatcacatgcataaaatcatttcattatcaatactcaaccaatcaatcttttcgttacataacaatattaactatgtcttaatattaatcaattcataacaatactaattgtattacatatgatgtactatggagtacaatatacttttcttacctcaagttccggttcaggtatgttggccaacctacttatgatcctaggccctatgtcataacaatgataaaccaataagtgattatcccaaaatactgcttgacagttacaaaggacaacgtagggtttcctaccaaactccgtagttcaaatacactaaaataaaacttatactttggctctaaaacatacaccatatggtagagctccttggaagcttcaaaacggcatatagaatgtccaaaacggacacctaagtgaaaagttatgacaaaaatacgatttcagatcttactgaaatttctagaaacggcaaggcaggctcttttttagcacgaaaatctcaaatttttcactcactaaaatacccccgaaattgttggaaattattttac

SEQ ID NO: 35841 - DNA, 1065 bp, Cannabis sativa
ctagattctattgataatccatcgataatccagcaatgataaccgacatagcaaaaaaataagtctaactcatatcgataacctatcgacaacccatcgataatgaatcgatagtcaagcgataataattaaaaaaaataaaattccaattcttttgcaatgcttcacctatcaagaacatatcgataactcgtcgataatagctaatttcaataactatatcgccgataatagctaaacttaatgactacaaccgaaagctaaatcttattgataacctattgacaactcgtcggtattcaaacgagaatcaataaaaaaattataattttcatggcaatgcttcaactatcgataacatgtcgataacatatcaataactttttgataatagctaaacttaatgaccaaaagctaaaatatattgataacctatcaagaatctattaatatataatcaatattcaaacgagaatcaataaaagaaaaaagaaattataattttttttcaatgtttcaactatcaagaacctgtcgataatagataaacttatgaccctcatcacagcttgttgatagcctatcgagaagctgtcgataaaatacatcatttttatttttctcaaccaaattagaaaacaccataactaccattccaaattgaccaaaaatttagaaaaattgatcataactaagtgtatttcaacacaaatattaaacaatcattctaaatcaaccgcagcaaaaaaaattaaaatttaacaaacaaactggcttagacgggcgacaggtagtggatcggactggacgaacggcaggggaacgagctcggactgctgggatgggtccttcgcgcagctgggatgcggctaggacaaaacagatgactccttcattcgggcttcacgtggctgggacgcgacagaaagcttcgtcattctttgcgcgggcagagtgggggaccgggttgtggtagagaatgggatcaagactttggagtagcggaggtagaaaggaggatggaggaagttgggctactgatactaggagagagagagagagaga

SEQ ID NO: 35842 - DNA, 5618 bp, Cannabis sativa
tctcctacaatatgggcatgatgacttttctagagataaccatgtgttaatacaattgtgatgaaatgaatggcaacaaggcgtgttggcaatctcttcttcttccaaaaattcctccaaacacacacaacacatctcattattatgataatctttgtttttcgatgtataatatttcgagcttttgagtactttttcagtagtactttcttgatgtggcatcatcaactgttggggtataaaattcaacaaaggtaggttctctagcgacaatgacgataaaggtaaggtctccagcaacaacgacgacaaaggtgggacctctaacactgtaggcaactgcggtggcggtataaacctgtttatcacaatgcttgatctttcataatttattaactcatgtattgtattaactctctccataaataagttataaaagtgactccttaaaaaatattgatatagtttatatgtgagatgtgagatgatttactattatatatatataaaaaataaaaatgagttctaataggattaggagtaatcaattttgaattttgaaatattgatatgattattaattatattttgggattttaattttagttttttaaattcaaatataactcatttaaatttaatgcatgttattccgtatctatataacgatatatcaaatattatattattttttttaaaaaaagataacaaatatttaagattaaaaagataattataattcttggtatataagatgaatataccttaagttaggatatattgttaccaaatacggcagcgttttggtcatttggactccaaatacggcagttggtgaagggttttggaaattatatatttttcaatcttttttaaatatggatgagattaaaaatgactaattataatttttaatcactttattaattttcttaatttatttttctagtttataataacatatttaaatacttctctgccctttctcatttttcttagtaattatacttttcatatactactgtttatctattattattttctttataattgtagagagagttttttttgattgcatataacataaatttatatttcatattattgtgaaactcataaataatatctcattaattatttaaataatataatcattgatatttaagttatattaaatcatatatattcttttatttttttttgcctgtatgtatcattgatttaactaaaaattaatctaaccttatatttttatagatatatatataaatttttctgtggtggtaagtatgtttggtgaaagaaatataattttttttttagagtctttttcatttttacactttaaaataatttttttttacggaataaaaaaaacaatatatgaggtaattctttttttttttttttattaattaatggaaaaacatcacaaatctttatcaaacaaaccttaataattaaatgcttattgtgttgaattataatttttatcattattatttaaatattttaaatttaaatttcaagtcaattatatattcaattttcaatatcaatctaatttaaggtttttcaaaaataaattaatcttatatagttttataaaataataaaaaaaaattaacataataattaataattagaatcactgaaattgcaatgtatatatctacaatcagtgcaagacactctttaaactaaaatagctcattgtctaaccaaaaaacatacttatcaaactatagactgctataatctcaacgcgaatcatatgagacgaaattgctctaaaaaatttaaataataaaattataacattttaaacaacacacccaacatattgaaatacaccttctcattattaataattattgcaaaaactaataaatctaaaaaaaataaatatataaaatatcgcaacaccaaatcaaaaaataaaacattaaaatgttaatcttcaaaataaaaattaatatgcaaaaacatttaaagttacacacaacctatatcattagtccaacatttaaaaaaaaatcttaggaatagtaacccatttcttaagtttaagataatataccctcttctctttcactccttttggctctgtccattggaatggaatctcagagcttactttttcaggtgaaatcaccatcttctttaaggtatcaatcttcccttcccttctttctagtaatgtcaatttttgctgttttagaactcagtttctttaaatatatatatatatatatatatatcaaaatcatggtgtttattggctctctgttaaggtacaagccaaaataaaaggagccatttttattgttttatagtcaatcttcagaagttttgtgcccacaaatctgtgatgaaatagtttagaaatgtacattgacagtgttcactcttgggttaacttcatttttggttcattctgttgattttataacaagtttactttaatagttcattttaggtttaccgatttgcttaattctacactggcaatgttcaattttgggtttctatgctaaattttcttttgtgaatgctttctctggttccaattttgttgaaaagtcatgttctttggagtaattgacttgaaactgagctaccctttttgggcattagaaaaaagaaaaagaagctttatttgaaattgggcaccttcaatatttgagcaatttcaccacaagcctgaagcctcattgtttgaggttctatttggtgtctttaactcttctttgtaaataggaagaacatataatttcggtaggaagctattttgtaacattttccatttgagtaaagtgtgtctattgattttgtatttataaaacttgtgcaataaccagctgctgtattaaaaatgagcaacccaagaaggttagagaagagaacttgcgaaatagatttcggtcactaacagcgaaaaggatgatgccaaggaggctgcttttgcagtttatggggttcagccctctcatagccatagcacaacccgattttgcagcaacaggaccaatgcttgaaatgaaggaacccgaagtcattcggtatgtgtttgtttggttgattggtgttctttccttaaaaattaaaactttagtctaaattgtttggttggttggtgtcttttgtttcgatactattttcaagttctcatttgggatcttttgtttcggtatttgaagtgtccaggaccttaaagcttcccaatggtgtgaggtttcaaggtactgcattcattcataacattctataatatatttgctcatacaaaaatggtgtgattgcgttattatgtttgtttaagtgtgaattaaacacaaaatagggagtggattttatctcgtgagggtacgcattacgtgatttccataatcattggatcataattgacttgatctaaccattgttagttattggaagctaaagtacattaaacaaagcttatagtacataaccgaaatgcattccattttttattaaaataggaacaaaatccattccctatatatgtttatgtatatacatatgtatataaatagatagagaactcttgtataaagaaacatgtttatagataggcaattggaaacaaaccaatatataattgccttactatgtttggagagatttgagcaattcctcttgggaactaacacaattcatctaatcttaattataacatacagttgaggaacattatgagcttttttttagtcaacaaatgatatttgataccttttggatatgagtgttttagctcttatttcgaaaaatttcactttgtttagagatacttgaaggggaaggaccgaaagccagtgaaggtaatcgagttgaaataaattatgtttgtagacgatcgaacggttactttgttcataggtaaattttcatacaattatttattcttagttacatattccttaattttttcttaaccttaatttctctgaacttgtgatattggacttgaaatccatgtagcactgtggatcaattcagtggagaaagttcacctgttattcttcctttagatgagaatgaggtgaactatagtttctactattttactctctttttgcaaagtgacattaaaaatagtgtcacttttattatatttatagatgtatctatctgtttacatgtcaaaaatttaatctttgatgacagattataaagggtttgaaggatgtgattgttgggatgagggttggaggtagattgaattaattgttttctttggctaattacatgatttaagcctttaatgacttattttgattttgaatcatatttttttaaggcaaagtttcatactttgtttggatttgttttttcattcttaggaaagagaagagcattgatacctccttcagttggatacataaatgaaaacttacagccaatacctcaagaggtatttttgatttttatttttacagaagatttcttgcaaattttcaaaatacttgagataatttaggatgttgaaatttaaacaaaattacaatataaatggagcgagctgaccctcgttaccacccctttaggagcggccactcgtgaggcttttacctctcgagttggcctaggccaagccaattaggggcattgggccaaaatttataattgggcaatttttaataaatttttttgtattttttattaaattattgtaaaattacaagatatagcattattaaaaactaaattgtgggcttgccttcttttaaggggttttcgggtcaggatgggggcttggacatgggtccaacctgccccacccttgggccggtcctgcccgtgaggcaaatatccatatgagaaatataaattgtcataacattatcatatatctaaatgaacaacacaagggcaacaatttggtcttcataggttgactttagcttagatcccaaatttgtgtttcaagtttccacctaacaattttgcaacactccataaattgaggtctcattagtaaagagaaaattacatccttgttgccttgtttgtctatcgagtttttcgaactcggatttcatataattcgtatatctttacttgtagttcggtcctcgacgcagcctcatgtctcacatgaatgagcctttgatctttgaagtgcagctgttgaaactactttgagtttgtgcattatttcatctttgttatcatgaaaaaaccttctctatatatgttggtgtctttattcactatatagtaaacaatttcttgaaacatttatttgattcatatgaaagtgatatgtaattatgttcttatgtataaaagttatattttgcaaattttctaactttatcccttaattatttgattttcaacaacagtatgtgaactataattgaaatgaaatagctcaataaatatttaaataaattagtatgatcttttatcgtattagcaaaaaacaaaaaaaaatattttatctttttattcttttatcaacaataaaataataattttataaaaaaacaaaaatactttgaattttctgttttatctatatacacgattttttttaaacaaatatctatatacacgattaagataacaaaagtaggttttttttttttttt

SEQ ID NO: 35843 - DNA, 1705 bp, Cannabis sativa
gttatttctattggtagaaattattgggagtgagtttgtgcttcaaaaattagtttggggcaaagtgaaaaatataggggaggtgctgcccaattttttttacaccaaaaattagaattttagctagttgaatggtatggcgactagaagaaccaaaacccgagcaaatcgccatatgcaaggatcatcgtcacattctcctaatccccaagaagaccaatctcaacagataaataggagtatatataattcgggagaggggttttgaatttcaagatgcaccttttgaaaggaaccaggggtatgaaatcattagaggagagattgcataaaggcaatggtagagattatgtgctgagtagcacgtgggagatgccaatcaaaatgtggtgtgtgaattctatgcaaattacccatacagaggaagcaacaatgaagtctatgttcgaggagtgaatgtgccagtcactgtggaagctataaataactcctttagccttcctaccttgagagaggatcaagatggaagaagaatagcactgggtagggagatcctcactgatgaggccattgcaatagagttggggcaagaggagactagattccaggttgaaggaaaccaaaaccaaaagtttatctaccgatggcaactcaactcggaagccagagcctggacatattttgtaaactcctgaataatgtcgacgtcgcatacttcatcactagactatgagcgttgcgtcatagtttatgctatcatggccagaatgacattcgacattggatgggttatcttgagaaacatcaaccacttctctgagatgaaaaccacagcaggtccggtacgtagtgccttaattaccgcattgtgctcgcgacagggtgtgcctatgattgaaggagacgtcctaaaatcacccatgtagtccatctcacgctggcattactatgactttccccctgcatcattagcacctccagaagaaaacgccaaaaggatgatattgatgtcgaggaggaggggccagcagacgttggtcccagtgagacagtgtcacacctattccccaaactgaacccccactggactcctgtacgcagggcacttacgatagactggatcaccttatcaagaaaaatcattatcttgttcagtccaaccagtaccttgtctaggcccaccaggccaaagctgcttattataactcatatctccagcagcaacatgattttgctcaaaggcaagtccacgagttaaattttgctttctcgttgtggagactggactcagatgctcctgaccacgtctcacagccagcaccgtggcatccatacaagccaccaccaccaccgccatactgatgtggtgctcaggtaagttccattttctctttctttaatgtcacattggggacaatgtgtcactttagtttgggggattgaacttaaacttttattttgtttttagttttaagtttcaatttttttagttttttgtttttttagtcaattttcttaatgtgagtcaatttgaaaataggtaaatagcatggtttgaaaagttcttttatttttcgaagaatctgtgtgcttggtgtgatattacattcttgactaaaagaacatggaatcatattaagtaattttctagtaattaaattggtttatgtatgctaattcggatatgtggaaagttgcttggaaa

SEQ ID NO: 35844 - DNA, 2618 bp, Cannabis sativa
  modified_base (1123)..(1132): a, c, t, g, unknown or other
tgttatttgttattttatttattataatgtgttgttgaagacataaaataactataatttgttttattttgtttctagttatgtgaagaaaaaaaatatttttttcatctatattaaataatttaattttggagctcaaccaaatggtaaaagagaatgtctctttttggagatgaatcaaaaatactcgtggaaggcaaggtaagattcttatacgcttgaaaaataaagatcatcaattcagctcaaatgtttactttaattgtgcccaacatgaaaaataatattttgagtttaagtcaattactagagaaagttatgacattcacttaaaagaaaataactttttcttaagagatgataaaactaatttgatcgccaaagttcccataacaaagaatagaatatttctctagaatattcaacatgatgttccgaagtgtttaaaggcctgctacaaatgagtcatcatgactttggtatctacgctttggacatctcaattttggtgggcttaaactcttagagaagaaggagatggtgagaggccttccatgcaataaccaattccagatcaactttgtgaaggatgtttgcttagaaagcaatctcgaagaagttttccaaaggagtcactatcaagagccacaaagtcgcttgagctcatacacactgatgtatgtagcccaattaaaccaaattcatttggtaagagtaaatacttccttctctttattgatgatttttcaagaaaagtatgggcttatttcttgaaggagaaatcagaagtgttcaagaaattcaagaaactcaacgctctagttgaaaaagaaagtggtcttcctattaaggccatgagatctaactgaggaggagagtttacatcaatgagttcaacaaatactttgaggatcatggaattcgttgtccattaacagtgtcagatcctcccaacaaaatagagtggcagagagaaagaatcgaaccatactcaacatggctcgcagcatgctcaagagcaaaagaatgccaaaggagttttgggctgaagcaatagcttgcgcagtctgcttggtgaatcgctctccaacaagaagtgtacatgagaagacacctcaagaannnnnnnnnngaagaaaacctggaatttctcacctcaaagtctttggaagtattgcttatgttcatgttcccgatcagaaaagaacaaagcttgatgataaaagtgagaaataaatcttcattggttatgactcaagattcaaaggctacacattgtacaacccaattactagtaaaactatcattagtctcgatgtaaagtttgataaagaagattcttagaattggaacacaaaagaagacaagtatgattttcttccttactttgaagaggaagatgtagagaaacaaccaaggtggaagaagaacttcaagaacctactactccaacaatctcgccaattggaaatatacaagaagattcaagtgaaagctcaaatgaaaagacgccacactttaaaagcttgcaagaactttataaggtaactgagaatcaaaatgatatttctcttatgtgtctatttggtgattgtgaacctctaagctaccaagaagcagtaagaagcaagaaatagagagatgcgatggatgaagaaatcaattgaatcacaaaaaatgacacatgggagccagctactcttccacagggatacaagccaattggagtaaaatgggtgtacaaggaaaagaagaatgctaaaggcgaggtgagagatataaagcaagattggtgaaaaaaggttatagtcaaagggaaggcatcgactatgataaggtgtttgctccattttgcttgtcttaaaactgttagacaaataatttctttagcagcccaaaatagatggaagatccaccaaatggatgtaaagtctgctttcttaaaaggtttcctcgaggaagaagtctacatcgatcaaccattgggctatgaagaaaaagttttgaagttgaaaaaggctttatatggcctaaagcaagcgcgaagagcttggaatactcgaattgacaagcactttcaagacaagaatttcaccaagtgtccccatgagcatgcactctatatcaaaattaagaatgaagatatcttgattatatgcttgtatgtggatgacttgatcttcactagaagcaactcaagtatatgtttgaggagttaaagaaagatatagcaaaagagttcgagatgacagatattgggctcatgttttattacctcagtattgagatgaagcaagaagacgaaggtattttcatcactcaaaaaggctatgctaaggaagtacttaagaagttcaagatggataattctaatctagttagcacaccattagaatgtggaataaagttgtcaaagcatgacgaaggaggaaaagtggatccaactcttttcaaaagccttgttgaaagtttgcgctacctaacttgtataagaccagatattctctatgccattagaattgttagtcgctttatgaaagcttcaacaacaactcgtttgaaaactgcaaagagaatacttcgatacatcaaatgtacgaccaattatgggctatttt

SEQ ID NO: 35845 - DNA, 1498 bp, Cannabis sativa
ggtttaaaatataagaatactttgtacaaatttgaggcttaaaatgtaaagtatatggtaacaaatttgaggtttaaaatgtaagaatactttggaaagatttgaggtttagagaattagagtactcaaagaataaactcataggtttagaaacaacaagcacactagcactcgatcattcaaggtgggagactatgtaatttgaagagtattccagcctgatcacttaggtagttggtaatagaacatacaaactccaaacgaatgaagggcgcgacatcaacaacagctggaacattgttcatcttaagcagtatcgcccttaaaactccaaactactgttctattctatttacatttattttgtttactcttctccacgcactacttctagcaaatattcactcatgcagggagacaaaactacatttggacttgatccctaaaaagggtacgtaggcagctctaccgagtgcagcccccctctctctcttatcataaccatttttttcctctttttaagagtggcattcagtcagaaactacgtgaggaagtttgagaaagttgtacagaattggattccgaagtggtttctattggataagttaagaagaacagagaatatcttcagtccctttttgttatgcctctcccagaagcatataatcagtctccgaagctttagtattaccatctcgagcaagtgatgtgtttgagaaagttgtacagaattgaatgaataaggggtaagttaagaatgaaagtacatatctaaattttgaagggtattggccaaaacaaaccagtatagttctctattctgtttttttttttttttttttaacttaatatttctaaaaatgaccacattgcacttcttctcacaattttaatactaataatgataagggcagtctgtagtatcatttaagaagtagaaaacatatgttttctgttcaggaatattcagaaatcagcattataattaacaactaagaaacccattcaagcaaagaaaataacattgaaactttaaaaggcagcatttacaggtcaacaaggaaaaggagcatcttctgtggaaaggtattgttatttgttattgcagagccaatgttggagataagagtgccactgagaaacttagttcctatttgtagcttccatgaggtatttcctgatgtgactatttcagctgttcaattcttcattatcatagcatcatcagtagaaacaaactctttcatcacccgagaagacttgtccgattttacttacattaatttctccttttcactactgatgaagtcatttggacctgtaaaattgaagtagctcacctcaatcttcatatgattttttctggtatgtaatgtttagtttatttggcttaatacagaaagcattgtctgtaatgcttcttgcttttccaccaaatagtctgctgtttcgcaaagtttcaagccattcccatgaaaacaaacatatccaacagtg

SEQ ID NO: 35846 - DNA, 1228 bp, Cannabis sativa
gggggggggggcgactccacagctggttggggctcatcctcatccgcaaacaacattactggcaatagtttttgttcacactcatggccatggtggtatttcttgtcgcaacgaaacacaacccttttgctctcttctcttggtactccgtctctgacattcgacgcattgttggtggtttcccagctgcagtcaccactgttgtctgtgaaggagttgatgttggtgcggttgtgagtgacttagtttggaaatcattcagatgtggtcgtggaggtgtgattgggcttaagttaggtctaccgctcctaatcggttggctcaaatgacttagttggtttccctcttcgatctgctgtgccgtatccatgatttgtgccaagcccacaggctgcaacacatgtagagttcccttaatcccttccttaaggcccttaacaaagctcccctccaatatatacttcggcactcctggtaatccagaggccgccgcctcccaacagagcctatagtcacgcacggtggtgatttgagtcacggatagaagctcctccgacagtgacccaatcggagctgtgctgtaacaccatatgtttgagcattgcccacgaggtaatgggatgtctctgattttcccacttgaaataagggagggcgtccctgtcgagcccgatgacagcagtttcaagcatgagtggttcggagagacgaaatatgaggaaataacgttcggctctgtaaatccaccccttgggattggctccagtgaacactggtaactccaatctcggtggtcgagattcgatactaggatactgggttggagaatatggattcggaggaggaggcggttgtggcaaaaaaattcgagtgcggtggtgtgggagagaatcgaatctcaagttccatcggcccgattgacgatgacccatctatgggcacgatcggtggacggagatcatggctggacgtagtagtctcggcgggcaccttacccacagctacaaatcgggtcatctgtgccatcaacagctccggtaacctctggatctctgcccgtgtctcaaaaacttccttgcccagctgggacttcacctctgcgatttctttctgaacttccaggcacaaggtctccataatttcatccatctgctccattgtagtgtccttcttaagccacatgtcttggatcataaatgctttaataccactttgataggatctcccc

SEQ ID NO: 35847 - DNA, 2486 bp, Cannabis sativa
gtttaggctgatagattttttaggatttttggacaacgacagtcaattaatggcatcgattttaatgattttgatgttgtcttttagcttgtattgagatataaattactttaatttgatgtcttttaccttgcattatattttttgtattttggattttttttaatccgaaaataatattgtttaaggattttattgttaaagacctattaatatagtacataagcgtaagattaagtgaatttaaagtaaaaaaaaaataattatttgaatttagggttttatgggttttgaggcatagcagtggcggcgttaaatggtggcttcgattgaaggtaaaaatatcaattattttaaagaaaataaatacctatgcctttgattatttgtaataatcgaaggcataggttccagtatattttaaacctatgtcatcgcctaaaaatttttcgattttgagtttttttaaccgaagatagaccaatacaaaaagcgaaatcagctgggctacttttggagataaaaattctgcctattttcatgcttctctgaaatcaaggagaatccataaccagattttctcgatagaggatgagcatgggacttggcatgattctccagaaggtgttcagaaagctttcttgggataatatgaaaccttattgggtaccagtatgcagaatagaaggaaggtgttaaagtcagtggtgaacttgggcccaaggattatagaggctcacaaagctattttgttggctgagtacacagagaaggaggttaaagaagctttgttttccattccaggcatcaaagcaccaggaccaggtgggtttggaagtgctttctatcaagacaattggacttttgtgagaacagattttgtagctgttgtcctatcttttctttcaactgggaagatgctgaaggagatcaacactacaactattaccttgattcctaaggttacttgtccaaagagtgtggtggatttcagaccaatctcttgctgcaatgtcctttactaaactgctacgaaggttatttgcaataggtgaaggagggtcttgccggatcttattgctaggaaccaaggagggtttgttcatgggaggtatattcctcataatgtgctggtttgtcaagatcttgtgaggctttatgggaggaaaaattgcaagccaagttgcatgataaagattgatctaagcaaggcatatgacactgtagaatggcaattccttgaagaaatgttcatggagtttggttttccagatcatttcattaagttggtaatgatttgcatcaggacaccaaagttctcactcttagtaaatgactctatgtgttgattctttaatgcaaagaggggattgagacaaggggatcccatgtctcctcttctctttgtattaggaatggaatacttgtctcgaatttttcagaagattggtgactggcctggttataagtttcatgacagatgttcatctttgaaattgaatcacctctgttttgttgatgatctattggtgtttagtcatggagactttgtctcagtcatgttgatgttgaggggtctcaagcttttctctgctacatctggtttgatgccaattgaacaaaaatctgctatatattgctcgggcatgtcaaatgaggaagtgggaagaattcttgaggcttcacaattcaaaagaagttctctaccattcaggtatctttgcataccgatctgctcaaagaagatatcaactcctgaatgtctaattatcctagagaaaatggttggtaggataagagtgtggagtatccgaaacttgtcctatatgggaagagtaactttgattaatgttgtgctcatatccatacatgcatattgggctcagatcttgctattaccaaagaaattgcttaaagaaatagaggcaatttgtcgatcttttctatggaaagggatccaggctggtgcaggacccggattggtggcttgggagtaggtttgcctacctaaaggagctgggggtcttggactaagaaatatccaaaagtggaacatagcatccatgacgagatatgcatgggatatagcaaataagaaagactgtttgtttgttaaatggatacacaatgtgtatctcaaggacaaacactggtgagattatgaagttcccacagattgtagttgggcatggaagaagcttgttggggttaagaatcaactgaagcttaaaactgacttggctactttcacactgcagaagtttagtgtctcaatgaattattagctactttacagtatcccggagaagaagccctggagccattatgtgtgggatagactaattatccctaaacataaattcattctctggctggtgctgtggggtaggttgaacacgaaagaaagaatgagtagatatgacccaaatattgatgcaacctgtaatgaccgctttagtaaattgaattagtaaaggcaattagca

SEQ ID NO: 35848 - DNA, 1263 bp, Cannabis sativa
aataatattaattccacacactcaaggtcgaccctgatataggcgggctagacctgtgcttagtgtgcttagggcccacctaacctaagagctcaattttttttccttttgaaaatatataatttttttattgattttgaataatactatattttttttctaaaggcctaaaaataatttttttttctatggcccattaaatttttttctatattttgcacacactattgatgtgaaactatgtaacaacatgtaagacacatctagaaagtctaatttggtatggtgaatggaaaatggtaagaatggatggtatataaagtgtggaatatagaaaatagtagatggatttgatgtatacttagaagttgtttggtaaattaagaggaaggaaaggtatgttcattttttaccatccatccaaagagaagactaattttgatgggccctcatgaatttggtatccacacatccatccttttcttaattcttttcttcacaccaaataaacatgggctatggatggatatataagcccaatccatcatatttaatccctctcttcttcaacacctcatcaaagcaaaacgggatggttgaaagaatgaaccacaccatacttaacaaagtgagatgtatgctactttagtcaggattatctcaagaattttgaggagaagcttctttgacagcaatttacctaattaatagaagtccatcaagagcaactaaaggtaaaactcgatgaaaaatagttaagtaaacctccagacctttctcatttaaaagtttttggatgtgctgcttatgcacatcagagtataggaaaacttgaacttagggctttaaagtgtgttttcttaaagtaccttgaaagagtaaaaggctaatgactttgggtaaaggaaaaagggagatttaaaatataaatagtatagatgatatatttcaagaaaatattttttcttgtttatataataaaaagtctagtgcagaaatggaagatactaaccttgtaggtacaaacttaaaagttaaaacaggttcaaatcaggtagaataaaatggagacacactgggaaagtttcaggtgaaaccaaaccaaaaccagcagcccgataacaatggtcaagaggaaagaattgatgctcaataaaagatcaatgatgaaggcaccgaagaagactttacaaactatcaattgacaaggaataagactaaaagtactccaaaacattaaaaagaaaaaaacctaccacgata

SEQ ID NO: 35849 - DNA, 1782 bp, Cannabis sativa
gcccaagcagcccacacctcaccatcacccccccgaatgacccccccaaacccagcaaagccctacccggagtgaccgtcgcgtccacagataagacaaactcacccctcaaaggaggccgccatctacctggcacgcccaaaccagcaggcccacccctcacaaccgcccccccaccattgacgcccacactagccccttgaaactccactaaagcctccctcgcaagctctacaaccccacacaaacatgattgttttttcccgaacaagaccgaattccgatcataccacacccaccaccacaccattgaaaccaactcaaactcatccttgctaagcacatcaaataaataaacaagcaactcagccagagaacccacccgaccgcaatacagataatgccaaacccgaagcttagtccacaaaggaagtaaagacgagcaaaacactaacgcatgttccggagtctccgattcctccccacacctatggcaaataggctgaacaagaaccttgcgtctaataagctgggaattagtaggaagagcccgatgatacattctccaaaggaagatcttgactttctgtgggactttcaaattccacatcccattccaccaatgagattgggtacaagaagaggagccaaacctcccacctgcaacatcaagagccaccgcatacccactcttcacagtataagaaccattagaactataatgccagcaccaacgatccgcacaatcactactacccagtggtataccaagaatggcatcgacatccaattcatgctctttattaagtggttttaggggcttttttttctactgaaacatattatttttgtaattttaacataatattttttaaaatttagaatagtaaaaatataaaaaaggctgactataaaaatgtaaaaataacccaaaatgaatatttttataagatctccatttaattattgagtagcgtagtaacttcgtttttttagtggctcgattgatctcttattggtgcctgcagctcaggaataaagaagtcgtaattttttttaaaaaaaataataataaaacaggaaaaaaaaaaaaaaaaaacctgagcaccaccattaattaatggaaagcaaatattaagcactggtaaagtaaataactatactaatgtagtgtagtggtttgaataatgataaattaaatcctttatttatgtcaataagtactcgataattaatccactataatatagaaatcttttaattaattgatttacttcttttatctctctgtgtaaaacaatagtcaattattctgtagcacatgtagctacctatctataaatagaagcatattttattgcaaagaattttcattcctttccttctgaaatttgatatttttctatctatttaaatcatatacaatcttacaaatattcaataatcaaaagatgaagtggattaaattccctcttatcacacttgccatctttagtttggctatttcccttgtctcagcctatgatccaagcccactccaagacttctgtgtagcaataaataatctcaaggatgattgtatgtatatttttttcaaacttatttattattatgggtaatgttctatgaccatcatatgaatatatatctatatacaaaaattgtatgtattttataaactttagctagcatgtgatcaatttaattaataagcctatgtgggtgtaacaatatataatacggaaacatataattcttgcgtcaaaaaaaaaaaaaaaaaaa

SEQ ID NO: 35850 - DNA, 2336 bp, Cannabis sativa
atccaagacataaccatttggttacatctaagccaagaaccattgagaggatcattagaagaaggtttaggaattgtaccttcaagaaatggtgtcttgttgcgagctccaattgaaatcatgaagtcacggcaccaaggttgaaagtttcgatcggtgaggatgggagtggcaagaaccatgcctggatgatcagcattactcaggtaatatgggctgtgaatatcctcatatgcaggtcgattgattagaggttgctgttgaggtagaggagctggattgttgttgatttcagcagaagtatgagatgggggaaggatcgatttgagcaggagcatcatccacgggatcagtgggtgtagcagagaaagtggctctcgtcctcgccattgttgagagttggaaaagcttggaaaaagcttgggaattagttttcttctgataccatattagaacagagaaacagagaaaatgaaagtatttctttattgaattgtgttaaaatgaatacaaggaaagagttgttgtttatataggcagcaaaatgaactaaacaatatcccaactgactaactgacctaactgaatttaactaacagaataacagaacaaaacagtttaaatacaaacagtttagtattatcagctgagctttacaccaaagatgttcactttctcatggagcttattcaggttgatgtttaatagattaaagcaatattttttagttctgagtttatttgttagaaatggagattaataaatgtttgttttttttgggtagaatgctgaagataatgagtacgaagagagtgttgagccaactcttgagtttttttaacaaaggaagacataactgagactggtgcaccggccaccctcttgattttcaacaatgaaattggtttttcaaagaagaacatggattctctttgtagtataggccgttctaccaaaaagggaaagagacaacaaggctttattggagaaaaaggtaaatagaaaagcttaagtttttctttcatttcattccacataactttttttttactcaaatgtgtttttttgatactctttaaaagaaaagcttaagtttttcttatcattccatataactttttttttttttcactcagataggatttttggatactctttaaatgaaaagcttaaaatttcttatcatttttactcagatggggtttttgtatactcttactctttataaaggagaaagctcaagtttttcttatcatttctttccatataacttgtttttgttgtttactcagatggggttttttggttactctttaaaaagaaaaaagttctatattatgagtgtttggtgaaagttggattcttttattttgttaaagagatttctgttaccaaaaatgcaggaattggattcaaaagtgtcttccttgtgagccagcaaccacatatatttagcaatggttaccaagtgagattcagggaagagccaaactcaaattgtggtattggttatatagtgcctgaatgggttaccaaaaagccttatcttgaagatattgttaatatatatggttcaaacaaagagttgccaaataccatatttatacttcccttgaaaccagagaaggtagaagctgtcaaaacacagctctcagagctacatccagagattttgctattcttatccaaggttaagcgactatatgtttgcaaggatgaccgtgattctattggaaatgacaatgtctccattgtttctatagccagtgagactagttgtgtggatttgagtagtgaaggagctgattctcgtgtggttcagctctcagtcaaagagaaaacttgtgatgctgaggagacttgcagctatttcatgtggagacaggtgttttcggtgaagactgagaacagagtcagttcaaggctagattttgatcaatggactgtaactcttggtttcccatttgggaatagattgagatcaagaggaacttcttctattggtgtctttacattcttgcctacagctatggtcacaaactttccctttgttattcaagctgattttatacttgcttcttctcgggagtccatacttttggacaatttatggaacttgggtattttggaatgtgtcccaaccacatttttgaatgcttttcaggcttgtgtaaagtcagattccttgttctcttcaatggcacaagtgtttgagttttttcctacttatgcttcatcatacccggaacttaacaaagtaaaagatagcattaaaaacagattggacagttcgaagattgtgccatatgaggtgtacaatggtaagaagtatttaa

SEQ ID NO: 35851 - DNA, 1606 bp, Cannabis sativa
tgaccttaggaggaatttttaatgaccaaagccgcttccaaaaatcagtattggcatctcgagaccaagcactcttggattgttgcaagaatttataggcacttttaactgaataattcccacaagtctcaagtctccaactccaaccatcattagcggcctaatcactaagctgaatggacaaaataagatcctgatcacgggaaataaatagatctcgcacaacatcctcatcccaaacacgagtatcgacttgaaagagacagctaaccgacttattcacaagagcagggtgtcgtgagacaacgtagctgttagagttatgaggaagccgaggatcattaagaatggagacattttccccattagcaatagttctttgagcacatgcatggattagatctttagcttcaagaatactatgccatataaaactaagattgtctcccaatttagcagaaaacagattaccactagcataatattttaccaacagacgccaatattgcttccctaaaagagccaaattaaagtctctcaaacttcaatcccaatccccctgcatgtttatggcgacacaaccgctcccagctcatccaatgaatatctttaccactactcgaattcgattgccaccaaaacttagccataagccgctctaactccttgcacgtgtttgaaggcaagagaaaaacattcatagcataattcggcaaggcttgagcaatagatttcagcaaaacctcctttcttgcacaagataaaatacgcccttcccaaccctgaattctatttcgaagcttatcctatttaattctaggttttaatgtgtaattaaggtgctaaatcatgggagtgtccaaagaataattaaaatgtcatattagtaaaatgcttagcgctaatttttattcacaatgagtgctaattataaactttttattttattttacttttttaatttatgcatccgaaaacatatatcaccatattttttttctaatttctttttattgcagtatttattatagttacatcgtttagcatattataaaaaaaaaattacaatgacaaaaataagtttgaagcttttttaaacatgtgcaataaactggagtatcacaattgttgtcgaaactatgcactatcttgagtttttttaaaaaaaattaaatttacaggtttaatattgtaattataattaacaaaaattgctatgaaaaaaaaattaggaaaaaatattctaatgtatgtttttatattagatatattattatcaatggagtggaaatcaaaaaactacaaataaactgcaataaaatacaaaaactaatattttaagtaaataaatgctacaacacatattcaaaatacaaatgaataaaaaaggttaaagatgaacaaaatgttataaacacaaagtaacatgaaagtaaaggaacactcactcataagggtgttcacgatacggatagtgtgggtttagactattttttaaaactaaaccgcatatgtggtttttgcaattttttaaaacgtaatcgcaccgcaaaatcttaaaatcataaaaattacactgggcgatttaggcagtttacactatcat

SEQ ID NO: 35852 - DNA, 1613 bp, Cannabis sativa
taaagaactttgcataaaattgagcgaccatgttgttccaactactccataatggcaaactcgtataccaagagtatgctcgatcagtgagagactttgaaaattagattcttaatcaaaaatcatgctcataaacacccaaatcattaattaattgaatgatacgttctttggcattgccaaatttcccattgtatttttgaaaactgaactcatgtaaccttgaaggtaaggtttgactgcaacttccacagggtggggtggatgaaagtcgagggaagttaccgatgatgatgatttacccgttttggctttaaggagaccaataaactcttcttttatgatgaactttgaggaagaccacgcctcttcaccaatcctttcaataatctcagaagttcggattcctctaacattatcatgtgttgcctgagtttgttggtcaacagtatgtacttgccttatcaaagattcatttatcgcacgttctttaggtaagccactccttttgacagatgctttttagtgtgtctgtggtagaagcaaactcagtagttacatcatgttgtgttgggccttttgaagctttccaaatctagctaacacaacctcatccatgttcgttagattagtattattgttattattgtgtaaataggtattttagtgaatagagatgatattaatgtaactttgcttgtgtagagagaaattagatgaagaggaaaagaaaagacataataaacaaagagggtgcatgtaagcacactggtttgaagtttgtctttctgaaggatttgaggtggaggatttattgaatttagatgaagttggtagcttgtatacaagtatgatgttatgctttgaagcttacaagcagcctgtgtagaggaagagaaagaaatgataattctttgaagattgatgagacaagtttaatgggactacacgcctttttttcctcctctcttatctctgtccctccctaactaatagcttcagtgactgtatttatagaggtagcttgtcgtgcctcctcaaggtgaaccttatcttcgtaaaaaaatcaattggtagttgcttttacatttatgcattcacacataaacccagatgtatattcatatcaggttttgtgcagctaccattcattttttttatagacagttatttactattttacttcttttgctattattattttattttattacacataatcttttttctctctttttactcatcaacatacttgacgaagagggtggttggtcagtacccttatggcgtgagcttgaaagtattgttttaacttccgtgaagcaattagtaagcaaaaagaaagtttctcaatcatcgggtatttagactctgcgcccagtagttttttgcttacttaatatactagaagttttacttttccttattctcgcactaaggcggtacttatagcatgatctgacactgtcagctacaggaacaatggctctccatcaactagtttggacagtattggagcctttattagatgttctttcaattgttggaaggctacttcacattctgctgtccattcaaatttgttatttcctcgaagcacgttgaagaatgat

SEQ ID NO: 35853 - DNA, 1398 bp, Cannabis sativa
  modified_base (785)..(789): a, c, t, g, unknown or other
  modified_base (1009)..(1009): a, c, t, g, unknown or other
ttataaaaaagtgtaaaatattacgaattacaaaatgcgtataaaatatttgttatttatactaaataattaattaaataaaaaatattatgacaaatcctagaattaaattttttaattttttcaaaaatataaaatttaaaatatatattaattttaaaaaaaataaaaatattttattagctatatttttttataaatattgtaattatgaattaaaaaaatttaatatctaaatttgtatatataaaagagaagtatatgacggtgatgtgacattctaagatctctctaatgagtattatttgttctctctttaattctctcttttctttaattttttattagctttataaatattaattagtaaattaatacaaaatatatttattttcaccttaatttgtttatttttttgttttattttatttatttatttaaaaaaataatattttatttattagctttttttctcatcactggccacattttattaagcttatatttttttttttaaaaaatgataactcaaaaaattgatattttatttattagttttttttttctctatcacttggccacgttttggcttattaagcttattaaaaattattttattttttttttaagaaaaaaatcttctaccaaactcttaaattaaatgagataacaattatctatatatacattaattctaaatcataaatcgcatcacttttcttaaaatatgtatatattgttagaacttattttaccgagatttaaatttactaacatgtatgttnnnnnacatcctaaatataaatttcctaatacgataaaataaacacatataaagttagaaaaccttagattgatggtagcggaataattcgactccttctgttcagatctttagcccttgaatcctttctttagcagaggattattaagatctaaacctggatcttctctccttcggtttggttaaccaccgtctttcgagctatgattgagtacttgacttgcnatgtgtgggcatggtactctatcattaaagacttgaagattgatgaagaataataataaggattcgaaatcactatgaaatgagcctctcatctactagttgtctgacggagttaaaaaactaggtttagtttgattgaaggttagatgagaatgaaagcatcatgttccttttatagtatttcaattagggtttaagatttaatgatatggattaaaaaagataaaataatgggcaaaaaatacactaagtggctggccacacatgtgggcctcactagttacaattttaccactttatttcaatcatttatcttttctttcaataatgtcacatttccaatttcgatcatatgaatgtcaaaactatttatttaataattataatta

SEQ ID NO: 35854 - DNA, 2360 bp, Cannabis sativa
ctgttattatcactaaggactacactatcataggaaatagggaaacacccaactaaggcactaaaatgggcaagaattgagaaaatgagttgttcgggaaatctgtcaaaactagttaaccagttttacaggacctagcaaaccggttaaccggtttgcaccaggtttccccaaaacaactccaaatttactcaaaacttctccaaatgccaccaaaccttctagagtacctaaaacaaccttcgacaacatattccaagcaatagaactaagaaagatacttagaatcaaaatatgccattaaagatctaagtttgagtttcaaagctcaaacttgtgcaattccatctcaatacatttaaaccagcatccagaactcaaaatcaacctaaaatggacctaaaaaccagaccataacctaatcaaaccctaacagtccctattctctaaaatcacaagttaaaaccaactaaaaccttgaaaaattcataaacaaagagtgtctagggcttaccttaatttaaaaatcctcaaattcttgctgaaaacataaagatcagcaacaaattccctaggtccttgctggtaagaagagagagaagggaaaaagagcgaaattcctatttcttgattttttttggctttttctcaaaatgaacaaaataaacctttgctgaaaataaaataattaggtgtcactcccctaggcaaccaccaaatctctcaatgggcaaattactaaaatgccctttttcttatagctcaagcaaaataaagcctaggggtaaaatggtcaaaaaccataaccccgctcaaacctgatattctattttctccaatatatcccactaaaaaataaggttctagacttacccatgtgattaaaatagtcatccatctcattttctgttgtcaccaagcaaaaattacaaaaataacataatttacatataatacaaataatacccctagattttaataaaatctctagaattgagaaattataactgtaatgcccattttgataatgggacccacaattaaataaattcacaattaattataaaaataccaataattagtgctaattgcctttactaaatcatattatgaaatacggacattacaacgactatctaaggaacaatgtcccactgatccccaagagatagaagatatgagaaagtttccttatgcttagcaattggaaatctgatatatgctacgctatgcactagaccagacatttactatgcagtaggaattgtgagcaagtatcagtcaaactcaggaaaggaacactggacgacagttaagcatattctaaatacttgaaaaggacaaggacttatgtgttagtctaaaagggtggtgctttaaatcccttaggctatattgactcaaatttccaggcttgtcttgatgatataaagtctacatctgggatggtattcactcttgggggtggagcagttgtttggagaagtgtcaagcaatctgcaatatctgactctaccatggaggccaaatacatagctgtcgctgaggctactaaggaattagtacagctaagaaagttctttatagagcttggtgttattctaggcatggaaaaaccactagtgttactttgtgacaacaccggtgctatcaccaacaataaagagcctcaaagctacaagaggagtaaacatattgagaggaaataccacatcattagagagtatgtggcaagaggagacgtgccggtagaaaaggttgatactcaagacaacctagtcgacccattcaccaagacattgactgcatttgaaaagtacagagagaatctaggattaattgaaatgtactgattattttatgttagtgcaagtgggagtttgttgagttttgtgccctacgaccctaaatcctattctaatgtcatcttttattttcatttatcaataacggaacaaaattattttattacttgtttaatataatgcttagttcacatgttgatttcatggtcatttgttcgatatataaattcttttaattccttatcacattgttattcatgattattgtgttgtcagtggaaagtaatcaagattatgtgattaaactattagtcccatgatttatcagtacacagaatttacactgatatgataatcaacaatttggtttacttacacttagatagtggtatgccttttccaaaacattagtaaagtaagcttgtattagatgtattgttacaatcggtctggaccgagcttcacatgtaaaagatatcataaacttaccgtaatgtcttttctaagtatatatcacttagttgatcttagatcaatgatcttaatcctgagatg

SEQ ID NO: 35855 - DNA, 1294 bp, Cannabis sativa
aaataagatcatttcatattttattaattaaatatgtaaatatttgatctcataattaaaattaataaataaaataaaaaataatcaaattttaaaataataaaaatattaaaaaacattcatgattctaactctcaagttgcttcttccaccttgttgtttctctacaacgctttcttaactagtagaattgtctcattccatatttttttttcaagttcaagaccttgacatgatgtttttcccatataataaatctatttgaagcttaaaatcgccacagctcagaatatgggtcgagtctaacacattttttctcaacatggagatatgaaacacattatacactctggacaaagcaggagtcaaggctagctgataggctacctagcctacttactccagtatcaaaacgtctaatgaatctagggtttaagttccctctccacgtatctctttcatacgaaatactcagagataaacaaaatatcccatttggaactcgatattcctacgctttaaatcagcgtaacttttttgtgtactcaatgaagcaagcatacaactcaaattcactctatggttttataagttccttggatcttttgggtccatcatattcttttttcacatgtgttactccagtgaataggtgtctaatatttctcttgtagcacacttattaaagtacttaacaaatggtatatttaattatcacttttagacaaatactctgttaggggaagagattattctaaggtaattcaacctttatcaaatatgtcgcagtatgtttctaagatcctcccaagttacctatcttcaggaataaaccattatactatttttgctttaatctacatggttctcaataaccttctttaattcttaacatcatagccaaagatatcaactttgagattttacaagattagactgttccttcgtatgaaatccatacccccatttattgaataaatcatctccactgatagactattcttgcgacatatttgataaaggtaatttaacctttatcaaatattccgcagtatgtttctaatattctattgatcctcccaggttacctatcttcaaggaataaaccattatactatttttgctttaatctacatggttctcaataaccatatttaattctaaacatcatagccaaaaaaatcaactttgagatttcataagattagactattccttcatatgaactccattccctcatttattgaataaattgtatccactgatagacaacatattaactcggtatgtccaa

SEQ ID NO: 35856 - DNA, 1801 bp, Cannabis sativa
tttttgcgcagttaaaattttgcatagtatagtgcacaacacaagtcatcttatttattagattagattagatttttgatacagttctagggctttttctcttacgaatttttcgtccatagtaacaactaaagcaaaccagaggggaattaaccatccaaatatttttctcaaatctgacatttcaaccaccttaaatacttttggctttttaattttagtttatttagattaaaatattatttctaaactccagaattaaggaaaagaattttctcttgatttggttagtttattttgttttattttactcttaatttttgaattgcttttagttgatattgcatttatttagtgtaaaagtccttgtgggtacgaactttgttacttatcattgtattacttgtttgtgattgtgtacacttgcgcaattataaatcaaaataattttcacaaaaagtttttagcgctgttgccggggactttaaattctaaattctgttttatcaactaattgacacttaatttttgttatttttgatcttgctggtttgggttttgcaatctcaggtatctatagtgtatgatccagcaagaggactttgaacttgctcctattaatcacgagatcaaatgcacatttcgaagaaggagaagggttcaaaaggctagggccgagacatcatgcctgagaatcttgatgatgatgggaattccgaacagattgttaaccccattatattggcggatgatcgagcaagggctatacgggaatacgctgctcccatgtttaacgagctcaactcaggcattgtgagacctaaaatacaagcaccgcaattcgagctcaagccagtgatgtttcaaatgatccaaactgtggggctgttcagcgggatgccatctgaggatcctcatctccatctccattcattcttggaggtgagcgattcttttaagctccaaagagtgagtaaagagtgagtaaatactttcctcctactagaaatgcaaaattgagaagtgaaatcatgtcttttcaacaacttgaagatgaatctacctctgatgcgtaggaaaggtttaaggagcttttacaaaagtgtccacatcatggcatctcacattgtatacatatggagaccttttataatggcctcaatgtagcttctcaaatggtgttagatgcatcgaccaatggtgctattttttccaagtcttacaacaaagcatttgagattttggaaaccattgcaagtaacaactaccaatggtccaacacaagagctccaacaagtagaaaagtggcgggggtcgttgaagtagatgcaataacaactttgacagctcaaatggtttccatgacaaatgttttgaagaatatgagtatcaggaatccttataatattgagccagctgctgtaattcaaagtgcagacgtctcatgtgtgttttgtggagatggacatgtgtttgagaattgcccttctaatcctgagtcagtttgttacatagtaaatcagaatgctaacagaaacaatggggcattttcaaattcttacaatcaagagtggaataatcatcctaatctgtcttggggggtcaaggagcaagcttaagcaccgcaccaacacaaggaagacaagcatatccaccgggtttttcacaacagccgcgacattcacaacatgttccaaactcataaagtcctatatctacaccaactcataaagaatctgagatggtggttactctaggggtggaggagttattctagaagagtgttaaaactcatctataa

SEQ ID NO: 35857 - DNA, 983 bp, Cannabis sativa
attaaagatgtaggagaaggtttttacgaatgctactgccaagcaatggtaagttggttattttttttttttctaaattaaaagtgtaataatttattatttaaataaagtatgtggatatactgataatttttagaggtgcttaatataaaaataattttagaaataaagtggcttaaaataatgcagatgaaagagaagatacaatattatattattttagaatgatatagagattgttggctctttttaaatggagcattgctattaggcatcttaaagtacctagcattataccgatcgatatgacgtattgtgagtggttattagttttctatgttattttttaaatcaaaatgtgtttgacccgatattaaattgcactaatagcgacatatcacctcttgtggtacacatgcaactgccctagccctaaccaaattacaccatgtgacatgacagtgttttgaagtcaattacatttgattaagaagaaatccacagttaaaaaatattgttatatcactagctaggtgtaatgttttgttgtacagtttgtgtgtgcacttactattatgcgcttaaaatgcagaagcttaacattggttactcttgataatatatttacaaataattaattgggagggaaaaaccttcttaaataacagttggatttggttttcaatttaaaatcatttaattctaactcttttcttgtgttgttcataacagttccatataggactaatttttatgaagagttccttggcaaggaaaattaatcccaaatctagctaagataaaagcttcagtatttttcgttctttcctctttttctctctctataaatatatatatttatattcatgaaaattatataagttataacaactttgttccaaagggatgttagacacacactagctaggctatagcctcatcatctaattatcaaagtattcaactaataagttcaaatgagt

SEQ ID NO: 35858 - DNA, 2913 bp, Cannabis sativa
tttttttttttttttgcaaagaatgtatacgggtaccatatatgatatactttgttggttattttattaaagtttgcactctgtatctgtattgtgttttacattactcataatgaccaaggcacatcacctcaaatgagcttgtttgttcaatttactgtcctcaaaaacttgtaacatgtagtagttacaccaatgcttgtttgttcaatctactctcaaacaaaagcctgatttttttaggttgaagttatcataaaagcttatgaattcaatccaaaataaattctaccaaagcattcactctgtatatcccaccccacattgatatagcggtttaataacattcaaatagcaaagatcgtttactgtttatcttatgaggagtaattcgttttgccaagtaaaatatcatcacgtcaaatagtcaagatataccataatttctcaaactattaactgccattattaaacaaaaggtccacaatctcatcacaagacagataattatggaaaaggaaacgatagcaagaaacttataatcaaatcaaaccaacagggcaggaaaacgcatgcaatctgcactcactcataactcactctactagagtctagagctcatatagaaaatggtttttaagcattgccgtgtccagtgagctcaataagaagcttctcatagtctccaccggtgtctttggcaattgcagttgccaatggaacgctgttccttcggtggtattcctctttgatgcgacacagatcaacctctgctctggtagtgataaccctagtaagggcccattcgtctgtcccaaccttattgatggcttggcgcagaaccttctcaaagtacttctcagggatggtcaagcaagtaattactgctctaagtaatttgaggaattcatcttttgaaccatcagccttcaaatcctgcaaatgcatgtgttcaattattagtgagttaaaatataaaactaatacatatgcccctataaatggccaatgtgagaactgaaaaatctgtcataccttgttgatggagtttccatatgaattgttgtagtggttgagagtagcattgagctgtgctttactcctggtacagagaatcctgatgaaatcatcgtcattacaggccttatctgtgaccttttcacggagaatcttagcctctgccttcgccagtgttgtgttcacctcatctccctcatatctcaatgaactcacgagaggcagaagaagctgtactccaaaaatataataaatcaaatacaaataattgatgaagataaacgtttttaaatatcactttatcaaagtggcacacttgaaaatttccccagcaaattttatagccaacacgtttaattgaattggctggagaattcacactttatttgagaaattccacttgagtatcttcaagtacctctgtatgctcaattcgatttcatcatctctcagtacatatcaaatttatggatattttgatgataccaataaataaatttcaaaattagtcttaaggactgtacctttcggatgtctccatgtgtatgatgagcgacatcctcttcaatggatctcttgtaacgatcatgatatgccttcctcacgagaaaaagttcatgagtagtcctagtagtggcaatttcgaccagaacccattggttagaggtgaacctttttgtggattcataggccaaatacgcatcacgttcagcaggttccattgtccatagcagtaaagccctctaataaaaaaataaaataagataaaaatcaaaatacccttccagttaaagaatactcactcataagtgaaaatattattctgattaaaatatgtatatctacatacacactcaatgggagaaccaggcaaggataggacgagcggcagagcgatttttttatatatatattttctttataaaactatcatttagtatttaaaataaaaataggtatacatttgagaaaaacagcaaaaacatcatgtacacataaaccacaaaaaaataacacagaattaagtgacaagtcactattaaggactcatcttaactaaaataatttaaaattacttctcacatagtaggtgtgtcaagtttgtatgtgccgatataatcattaccctaatataaaaaataaaataaaatatcactacatagcctatataaaatatcacatagataagttattttttttttcttttctatttcataatgtacttcttagtataagaaatatcaacttttttttaataactaacttaatttagtttatatcaattatgtacgaaaaaaattccaaaaaaattaggggtagttccacctatgcactcatcaaaaactgacctcgaagtcacttgaaagctctttgtctagtgctttcagaaggtcttcaccatgagcatctgcatatgccttcctaatctgtgtgcgttgatgagcattcctgtgagccaatatggatatgatttgaccctcgtttgtcccccatcctgtaaaacgcccactaaaaaggttattcaaggtctactaaattttctctggaatcagcctaccgacagatccttttgatcaaatttctgaaatggaaaaatagattgctcatactcataatctatcttacaaaatcactttcaactttcaacatccattctagcatagctaaagtgaaaaaattaatgttgagctattaaaaatattgtcaatctatatcccaaatgtgttcaaatcttttggtgatatggttagcaaagtgaacttaaaactaaatcgaaatcaagcaacagtagcaacacaaaccatcgtaagatcgctataaaagttaaagtgcattattaaaatggttttgttccttaaatctggaaatgaattaacggaaaaaaaaaaaaaaaaa

SEQ ID NO: 35859 - DNA, 1637 bp, Cannabis sativa
taaagaaatttaaatttaaaatattataaatatttttaaccatatttttaattttattattatttattttatattttaaattgaattcacacaccatatttatcgtaaagtttggaaataaaatatctttatatcaaatttacaaatccaacttatatatagacacattcaaatttgattatgtgagttttggttaagaataagtaaattacaatatatgcattatccgatacgttatctaattaaaaaaattaaaagattttaaaaatacatatatatataatcacatttaaatgacacactaatgtagcaatagctacaaaaaaaaaaaatcttaaagatcaaaatctcaaactctatttcaaatatttaaaaaaaaaaaaacacattacctaattaaaaaaattaaacatacatgtattgcacttaacatcaccttattgaacttaattaaaaaaaattaattatacgtgcatagcacgtaacatcaacctagtatatatatatttatataatttggagaagaattcaaagtttgtcactttgtcttggtaggtcattttagcattttcatcatgtcttttggtatttattttgcttttttgttttagcatatatagtgtttaggagatatatatttatatatatatatatatatgtgtgtttaaggattaggaatggatgatattttagtatttttattaattaataatgttaaatttaaaaaaaagattagtagatattttagtattagtagattatttaatcgattaatatttatcaatctaataaaaaaattaaaaatatgagagaaataaggaagaaatagataaatctatttattgatgatatatatattgattgatagatgtatagattcaattaataaattaatgtttattatttttatttttattattaatattattttattatagatatttattgttagatattttttgttaagagaaaaaaatacaaaaatgagataaatttgaaaaaaaaaaaaaaatataacctaagtaaaatttaaccatgaataacacaacagtttaaaaaaaaagatatttgtagaataacaataagaaaaatttattaataaatttacttcaattatatagtctaactatatattaccatttcattttgacacataatcaagatattaatttaagtagcactattatattagaagatgtaaatcatatattctaaataatgttaaataatgtgagaatgttgaagaattacttcaaatataaatatgtatattttttttaaaaaaaaaatagaataatggtgaactctaattctttagaataatatatgtggcattggtgaaattttgaatcacaataaatagaatcataaaatttagagaaaatcttgagaatcatttagtgcaagtttttcttaagccttagtgataaaaaaaaaaaaacataaaacaaacaaataaatagatatataaatattattatcaacataattaaaggcaaacaattagcaattgttccttaaaaaaattaatgatgagtatggtagactataatgtagtgtatgtaatatagcatatacaaacgatatgaaatgcggaaaacaaactgtaatcatatcaataatatatgcaatgaaag

SEQ ID NO: 35860 - DNA, 2890 bp, Cannabis sativa
ttattattagatttttttacattttcttagtgcggtcttttctttctcgctatcccttaaaaaatcatcataacactctttaattagaatatattttccaatcaacacttttcaaacactactacaaaaagtataattcccgtcggtttttaagtgtcatttaaagaatttacgttggttaaaaaaccgacgtatataccgtaatcgcaaataattttttattagcgtcattttcaaaacgacgcaaaaaacaattttcaacatttataataaccgacataaaagatttacttttctattttatcttatgcgtcggtttcgaaatgacactaaatggtttatgacattttaaaactatcacaaaacatttattacgtcggttcaaaaataccatatcaattgccaaaatacttttttttttacttattgcgtcacttataaaatgaagcacaaatgtaggtaagaaaaaattgcaaattttcatacaatttttctcacttgcattatcaaattttaaaataattctatataatagtacatacataatacaaaaaaaaaagttaaaataacatttttaaaacttatataaaattaataatcaattctattaactaatcacttaatataaaaattacacatgattaggataatcaagtctcatggcttgattaacacaagggggaataatcccaattcaaatggcactaactttgaaagacaaagtaaattatgagctacaatactaacctcgagaaatacaaaggacaacccacccactcgattatgaactcctaaacttcatatttgatgtagtagtccatcttcatcattgtttgtatattatattgcaaggaaatttatgctcctgccactataattaatttttagaaatttcatgtcatttaaaagtgaaaatacaaaagcatagaaaatgtaaaacaatgaattatatatagaaagcataaataactaggacataacagtttctttgataaagaaatatcaactgcagtatcttcattattagaactattattaactgtaaaaatgaaatcaacatatactatagcagtgtacataaataataaatgtactcaaaacatagaaagagagaaattaagatcaatattggcttactatgctgcaaaatatatgtcaattaaatattaagatatgttattaagtgttaaacgaaacaataagaagattcttcaacaaaaatattattgagtgattttcacctcttgctcttcagtttaattcttggagttcgtaatattgaatcttgaactaagtaagcatttatagacagcattgcatccttaatcgtctccatgtcaagcatgaccgttacagatactgatcttgaagttatcacaacctttatactctttgcaatgtgcagaataagagaaaaatagtttgaaacatacttctgttgaagatatttgaatataataataataattctaccaacttaagaacatgaatatgtggaactggaaagaagctatgataaatgtcaaatagcaaaaatagtgatgtaggaaaaatgttacatacctggcccaaacttattttctccatctgacctcttactatcctcgctgcatttacattatcgtcacactctagcgctgaagtgataatgggagtactaattcttttggctccgttaatgatttctttgatacgaggaactccaagcgtaacatctaaagaacatacaacataaaaaagttaaattaacattgctgctgatcgtatagaaagatcaagtataacacatagactattttttttttattaagcattagataaattaacaattatcatattatttccccaataaaatagtaagcaataacaaataaacctacagaatctctaatcttaaatcactggttaagaacatatagcataaaaaagttaaggtaaataaattagactagcttgaaagggaaacatatagattttgagaattaaactacaaaaatatgattatacatcacgaaattaaaattatcaagtcataaatacaagggtgaacctgaaatgaaactaattatatgaaaaatcagtacaacaatacatttgtatagctagagccaccttaatagtagtactagtattcaagtattcaacaatactatcatgaatacctttttcttatttacaaaaaagaataagactaagcattcaaaattcaactctagatggtgtgaacaagagaggaaatgctcatagagaataattccttataaagaacacatgatacagaattattacaggaagggtttctcaagagcacaaaattataacagaaaatttttataagagggtcagaatattgaatactactcataccaatccatttcctttaacaaatttttaatactaagttccttaagaaaaaagtagaactttagatataaatgttgaaagactaaaaggtaaagtaaccagtttaccatttcaaacatattcatgacttatatgaactcctttaagaagacatatgacatatacatatacacatttatatacattacctcaactttcttgggcttggagtaaataaagaagaagagcccaataaagagaccaagaggcagtccaattccaaaaccaatgattccaaagacactgcccagaaatatattgttctaaaatttagaaagaaaccttagaacaccatcgaggaaaaatggaactgcatacaccagaccagagtatttgcatacaaaaccaaaagaaaaacaaagagcggcgatacaatataggactttgttttcttggaaacgtaacaaggtttgtatttatatgaatggaaaataaataagatagcagattgaacaaaaaacaaaaaacggagagagagagagagaga

SEQ ID NO: 35861 - DNA, 865 bp, Cannabis sativa
agagggaattgaaattaggtgtaattgaaggtgattacacaattttatatgtttatctgaccaactagttgcacaggtgtcaattacgctctcatctcatgaaattatgtataattacgtacactatataattactaaaaaaatttatttttaaaaaaaatattaaaaaattcatttatttatttatttgctaggatatcaaaaattaacttttgatttttaggatgttattatatggtaatccaaatagatatttttgcttttttgatgacactcatttgagagcaaagtcaagcttcctattttgagtttcttttatgatttcagaacaaattatattgtgtaatttttggagcatgttttcttccagtcagtcttaatatttataaatcgcatcataaattgaattaattatattttcttaggctaagcaataaatttatttcgatgaaaaaattcttccacttcttaataattttgtaattttgtttcgatcataatattttatcgatacatatatgcattcttctagaaaaaaaacatgaaacaaatataatacatacaaatcacttttaacctaaaaagatccattaaagtctaaattaataggcagtcaaaggtggcccaatagaaagattcaaccaacataatttttttggcaaggttcaactaacataaattgaattctatatagtcttattttttctctttgagagcaacataagttctactcgatctagtccaacatattataggtgagtattgctataagatattgtgcacaatgtcaaacatctcaaaaatagttagtaattttttaaaattattatcaaagtaaataaatcgatattaaattacacaaata

SEQ ID NO: 35862 - DNA, 1855 bp, Cannabis sativa
aattttatcagtacagactccgttttgaatttattaaaagaacatttagaagtaactgatactacatgattctgtttagacctaatgatcaagaatccgtaccttatatgtagcctgtttaagaaaataatagagcttgtactgacgaaattagagaaaaattacagttttataaacatttggtacttatgccgctaaaaataaacattaggattatatcacttacaaacttaaaactttaagtacttatgccactatttaccttaaaaaattatatgagaatttcttaaccattttataaagattacctatttaataaagaaagtatatttaattctatttttatttatataaatactttgacacttgataagaataaataatgataatttgattatttgtttaatttatagttttaaaacatacaaattttttccttatcatttttattctattattattacgaatactattacattccactaaattaaacatcactaaaaataaattaaaatttagtgttgtagggttcatgaagacgggtcccctgtctccacggctgtatctgatttgtcacttttgtggactcaaattttctcattcttttctattaaattgaggaatcaaagaaattaaaaagaaagaatagattcatttatcatctttaatgatttaagggaaacgttctttaaaaaaaatgaaaaaaagaagaatatatgggcttgatattttttttttaaaaccataaatataataaaaatatttatgaagaaaaagtcggtctggttatttatttaggtttataaatcacagccaagtaaacaggttgaggttagggttgaaccttagctttacgccgtttattcaaacgatatttattcccaattactgatttataatatatatatatatatataaacatttcccaacaattatatttatattattttctcttgcggaaggaagaggagaaagattagatagaaaccattctttgaagaacagataagaaaaactcaacaaggcctcttctatcctactttagccttggtgtgaggtagatcccactttatttcattctttgcgttgctgtaatttattttgttttcctatttttccaaataaaagctcgtttttatgttgtttttttcttttcaccttatatacttgtgtgtttgtgattgttatgattttcattctattgttgttttcttgtatgaaattaaaggaaaagttttttttttcttcaaatattataattatatattattgattcagagttctcattggataaaatggttagcttcttcattatcctattatgctcaaatttttggtgcattgaatattgttaatatggaaaattgtgaatgtgatcatcgagcttttgcccacatggcttttgttctttaattgggcgaattgtaacctttatctgttgattgtcaatctttgttgtgaggctaccgaatattgaacaaaaaaacttagtaagaatgctaaatcccagaattcatttgcagctgttgtcttaacattccaaattttcttaattggtttagtaaatttcacatttttgtttgttttgcgtgagggagagggagacagaaacaaagaaagtacatactaggaagcttaaaattttgaaacttcatgtaatcagaaaaaaaaaaaataataataaattaataatttgaaacttcaagtttggcctcttttaacttgaatctgtggtgtattaaaactatggaaaattttgaataaatcatggaatggtgatgttgtagtctcctttattgctgtcagtgattactgtgctcctaatcttgaatactactgcccagtctttatgatt

SEQ ID NO: 35863 - DNA, 1922 bp, Cannabis sativa
tggaaaactatggtatcgaccataatcagaggacatcgtcttgatggctttgtccaaggcacacgactgtgtccccccgagtttgtccctgctgcagctcaagaaggtcagactggttttggtgtgcaactcaatcccgattatgaactctggattgtgagtgaccaactcctcatgggttggttatatagttcgatgacggaaacgattgcaacggaggtcatggggtgcactacatcagctgctctttggaaagcactagagaatttatatggtgcacactccaaagctaaaatggatgatactcgtactgccattcagaccatcagaaaaggtaacacatctatgattgactatcttcgacaaaagaaagcgtggtctgatgttcttaccttagcaggggacccgtaccctgaggctcatttgatatctaatgtactatctggtcttgatgctagctacttacccattgtactgaaattgaggcaagaccaagtactacttggcaagaattggaggaacttctcttaagttttgatagtaaagtggagcgtctttactcactgaatgagaactcgaaacctcctgttgctcccactgcaaacttggccaacagatctgacaactcaggtcgtggtcgaggtcctaatacctctcacaatcccaatactggacgctcaaactcatctggaaacagccgtggaactggatatcaaggaagaggcagaggatgttcaaacaacaactctaaacccacttttcaagtgtgtgggaagttcaaacattcagctgccgtgtgctataacaggtacaatgaatcattcatgggttctgatcccaaccacaatcagtcacagccaaagaatcctccatctgccttcactgcttctccggaggttgttgacagtgacatgtggtatgttgacagcggagctagcagccatgtgacatctgatggaagcaatttgaaccaaaaatctgactatgtcggtaaggataagcttgttgtgggagatggtcatcaaataactatctctcacattggctcaagtcaattatctgttgctgattgttctaagtccctagctctaaaagatgtgttgcttgtacctgctattgcaaaaaatcttataagtgtgtccaaacttgtcacagataatgatattgttattgaatttgactctgattcttgttttgtgaaggacaaagccacaaagagggtgctgcttagagggatgcttaaggatggtctctaccaaatttctcctactttttccaactcttcctgttaccaaaattagagttcttgctcttcaagtggttcggtagggtctgctaatattgttcaacatagttctcttttaaattccaaaaatgatgtgtggcataggcgtctaggtcacccatctcatagagtgttaaagttggtcatagaatcaaacaatgtaactgttccatctgaattaaaaacaaacttttgcgatgcttgtcaatatggaaaagctcatgcattgccttttgaaaactccaacagtagagctagaaaaatgcttgaactaattcatactgacacatggggtcaagccccgattgcatctaataccaactttagattttacattcactttgttgacgattatagaagattcacttggctatatcccttgaaacacaaatctgatgctttaaatgctttcattcaattcaaagcatttgctgaaaatcaatttgacaccaagattaaatctttaaggtctgattatggtggagaatatcaggcttttgagaatttagtcaaggaacatggtattcactttcaacactcttgtccatacacctcagctcaaaatggtagagctgaaataaagcatcgtcacattgttgaaatggggctaaccttacttgctcaagcaagtatgcct

SEQ ID NO: 35864 - DNA, 1545 bp, Cannabis sativa
gtgaaaattaacgcttggtaaaaatcatcaatttttggacccaaaatcttcagaattacgatgtaggtgtaagatatgaatcttcaaaattacaatgtaggtgtgagacatgactttatagaaatttgaaatatcttcaaaatgcaagttgaattgcatcaatcgaattcatattgagtgagttatgactgattcattgaaggttatttagcaccctgcgaccaggttgacaatccagcacaaaggttgacacccagcgcctaggttgacatcttgacgtcaacctggatgctgggtgacgccaaaatgttccaaacttgtatttttgttatgcttaagggatgtgttgacacatcagattcaatgctttgatgaagttgttcactagttcttggagatgttgctattttgtaaaattgggaagactcgaaactccctgatttcgccaatatcccaccttgttgaaagggtaaaatatcaacatgtgaatttgacatgtcacaagttatagctctctattactatgaaaaaatagttaagtgctcgaaacagaattgaattctgataagtagaacccagcacaccaagccaggtgtcaacctttgccctaggtgcttctcagggcttgttttaatacttctatggaattcgagattacaaacaaggtctcctaccccattttttacaattttaagaagaatgctcggaggagaattcgtgtttgaggaacagaaacatgtgaaccaggttgcatgttaacctgggtgcaaagcccagtgccatgttaacttgcgcactggggccttatttaggctccctagaaatctcgttttctccccgagattacttgtatcttcgttattttttatgatggaaaaaatgaccggaacattttttgggaaaataattaaaaatagcctaggttgacatagcctagtgccatgtgtcaacttgggcgatgggtccagtttctggccaccagatgactccgtttgattcttggaaacatttttatcttaatctttaatgaaaatagagaatatgcccataagacttctaaaaaaaaactccttaaaaatggcctaggttgacaaagtattaacctggatgttgggcccaacaccaggtcaacctgggcatccatttgtttctcaaaagcactcaaatcttaattattgacgaaaacggagaatatgccaagaaaatttcatctgaaatactgatggaagtggcctgggtagtcaaagtgtcaacgtgggcactaggcccagctcttatgtcaacctgggcgttgggtccccatttcggccctcaagttgatctgtttctcccccaaaaagcacttatttctatgttttggatgaagacgaagaaaatgctcaggatagttctttagtattgtggttgaaagtgtcataggttgacaatatgtcaacttgggctatgggtgcttggggcacctggtgctcagaattaaaactgcttcgattctgattttgttacctcaaatatgttcgtgaaaggtcttattcatgtccaagtaca

SEQ ID NO: 35865 - DNA, 1320 bp, Cannabis sativa
tctttggttggtagacttggctattgggctcttgttgttgggcctgtgtttcaaataacaatattgtgagttttaaagaggaaattagattatatatcctttttatactgtcctcttctatttttatcttttttttttaaagcctaacatttttatctctttttttaaacactttaccgattttacccctgtcacctcaatatactctccatgtgactcgcttatgtcagggtattttgagtacaatacatataaaaagaggtatatgtcaattaaatataaaattagaggtaaatttagttaattgataaataaaagaggtatttttcaatatactccaattttaaacatatataacacctttctattgtggatgcataatagaaaaaagtttagaaaattactatttttgcatttgtattaattgtgtatttaagttgtgtttcaattaagaaaaagaagaagaaaagaaaaagaaaaagaaaaagaaagattttaatttattttttaaatattttaatttttatatttttaaatatatttttatattaggtggctcaataaaattttgctacgagtacatatgtgtatacagtgacaggtttatttggcacttaataacaaaaaattaacagaaggagcgctgaccaaaaccgattgtaaaagttggaaacttagccataatttttctaatatgggttattagatcatactaaacttaaaatttaaagagttttactgtaaattacccttgataatattataaatagtattaatatgaaattaattagacagttaccaattatggaaattaacattactaattaagttcgcatagcaaaattgaaagctgttgactttaggctgtaggtgtaggttagtgtggatcaatcaattatttgtaagtaattgttaggaattattatagaaatttatagagaaatgttaggtgtcaatcactaagacgttgcatattagtattagtgtaatttaatattagattttacactgtttatttaataataaataatataaaaaactaataaccactcacaatatatcatatcagtatggttttgaatactttaatatgcctcatagacatatacaagcctctcaaagattagatagtgggttaattttaagacaaactatttttgatttgtacaagcctttaagaattttgctagctttaagtttgaacaatattaaatcgtgattttaatagtgtggataggtgtttttttaaaaagattagatagtctttggtgatacttgtcttgagcgtctttgtatcaggttttgatgttttatgcttta

SEQ ID NO: 35866 - DNA, 2032 bp, Cannabis sativa
  modified_base (279)..(280): a, c, t, g, unknown or other
gtccgggtccaggattcggggtccgggtcgaggtctgggtttgggtcagggtccgggtccgggtctggggtttggggtccgagtccagggtccgggctgaggtccgggtctgggtcgaagattggtgttgacctcaaattctttgtaaatattataatacaagctaatacagaccatttattatgtattaaataataaaacatacattgtattaaaaaaaattggtcgtaataattaatacaatacattgcttaatccaaacatagtgttatttattanntaatacaatacgacccttatatggcgtaccaaacgagcctgaaggataatgactctcatggatagtatggaaagtatgtgtattttgtctttgatgctctacataaatactagattttagatttaatgattatagattattgttggttgatgcgtttgaatgctcataatctgtaattatttttcaacatattaaccaataaaatggaaactatttaactgaattctaaataaatatcataattaattatttatttgaattttaaattccattaataactatcttaattatttaataataaataataaaataattttattactttttaataattaagtcaaaaatatcaaagttttgtgggatatttattttttaaaatttatttttgaattaaactcaaacctaaaatcaaattaagacaaaagctttcttgacccaaaataaataataaataatattattttaagacaagactaaaatgataattatattatcttaaacaaaagggtttatttaagaataaattaattagaattattttaattaattaaaagggtttaagaggtagattaaattaaaagttaatttaagaataattaattaaaattagtttaattaattttgaggcttatgacgatcctacaaaattataaaaattctcttgctacaatggagattagttttgtaatttattttctaatttcaaagattgtaaaatcagaaatacataattattacccagttcatcattactatttatctattgcttttaaataaatattcattaatagttgattaataatatactcatgcattagtgaataacatgtcatacatagaaattctacacaattatattatcatccatctcttagtagaaacatgatatcttagaattgttctatgtgtttattgtttttaaatcccaaagtatgtaaactggctaagataaatttagaattaacttgataattcaaaattgacctattaatttaaaactaattttaaattatgaattaaagagttaattcagatttaatgattatgacaggaaatttatttataatttgagactttaattataaataaattaatcgtaattattaaagtggttaatataaattaattctgagaattaataaaataaacacattaacctaaaatagtgagcgggagaaggagtacatgtcaatgtaacctatgacctccattattggtcaacactgagggagtatagacgggcctcgagacagcttagatttcgtccccataagaaatgtatttgtctataatatttctcaagattgatctcttgacttagataagaggaagtgatatattttagtgtgataccgactcttaaggcggcacactaagttaagtcatgaaatttgaaataacgggttacactcacaaagtgcaactaaacttcacagtggttagttggtaaacttggtcaaaaagctgtactttatattttgaaaaacaaatatgagatatttaggttacaaatggcaattgtctcataggacagttttcgtgttttgttgacagttcaagaaaattttcatcagaatcatcaacatcaatctactttactcccattactagagctttagaactttgggcaatgagtttcttaatagtaggtgtttaatagcaggagaggaagaaaatgagtaatagtcattatatagaaatttatagaatgaaacaaaaaattgtaaaaatcgtggggatgcaattgagatg

SEQ ID NO: 35867 - DNA, 1758 bp, Cannabis sativa
  modified_base (1650)..(1667): a, c, t, g, unknown or other
  modified_base (1723)..(1731): a, c, t, g, unknown or other
aatagacaagtggtattatgatgatatgtgctaaaatcttgtcttatttttagtaatagacaagttgtattatgatgatatggcaatagaagttttatgtatcaactttgaggtttgtcccatataagttttattaataacgaactcctattttttctgttcttttacttcatttatcgaagaactatatctgtggtttgaatgaaatattatgatagacctcccgtgacgtatgtgtatgctcgtaggagtaggaagtctagcatggggtctgccacagggaataatgaggctgtgtaattctgtttgggtgttttgtttgggtgtagctaaggctcatgggagtctcatgaggattatatataaataatagaattttgtagtgagaaggcagagaggatttttctaaggaaggcttgtaaggagagaccaggctctccattttcctggggattaattacagcagagtttctttttttcattaattcttttcatctactttcttctctggtctgaattgataggataaacctatcaattggtatcagaattcctacttccatgggaccaaagaaggatgctatgtccgagattatcaaagaaaaagttggggctgaggtctccgacctacgtcaagatgtgcagagggttacacagggtatggagaagttacaagaagaaattcagaccaccattgagagtatcgtagccaaacagatggagtctgtagtgagccaaatttcccaaatactcgcaccgtcaattaaagtcactcttgaagcggcagccaccaacgcagatcgacaacgacgagccctcaacggtaatggatcttcgattggggaacccagctccattggaatttgtcttgaccaaaacacactgaaatttcaagcgaacatggcggtacctcccctgaacagcccgacaatacctccgatacagcttggttcgtttggaaactcattcccgaacggtctggactaccgcctcccacgaatggaaatttcgctatttagcggcgacaaccccgatggttggatttcccgtgtcgaacggtattttttacttacgaaaatggcagagtcgatgaaacttgatgcggccattgttggccttgacggtgatgcactatcatggttccagtgggagaaccaacgccggcttattacttctttggcgatgctcaagcaaatggttttcctttgattccgaacggtacctattgggtctctttcagaggaggagttgttattatcggtggtccaacaaacaggaggtggtacggtgaaggagtaccgtgtccagtgggagatgttggcctctcgggtacctgacgtacttgaccatattctggaagggggattcgtaaaaggattcaaagaagaaatcaaggccacattgcacatcctacagccccaaggattggcccatatcatggaaacgacccaaagaattgaagagggccatcaactaatgaactcgggcccattacttaaggccaatttgtccaagcattcttttgggtctagttcagcagcccattctaattactgaaatttcccttcacgaatcctaccaacaatttcacaacagccaccatattctcctttgtcagtcactgctggatatttattttaccaggatctnnnnnnnnnnnnnnnnnntgttgtttaacaccctaaatatttctataatgatgaattaaacacatataaagttnnnnnnnnnttacattgatgcagcggaattaatgtc

SEQ ID NO: 35868 - DNA, 1755 bp, Cannabis sativa
atatatatatatatattaatttaccttaaatcttattattctttttatgaatccctctccattctcttcctcactgtacaggtcaatttatgttttctattttttatataggaaaattgtttttcttgtgtattttttttttttaaaaaaataactttacgtagtattgattttgtatctacaattaagtatctttatatattgatttatgtttataatatacatattagagtataatcttgagactaacactctcttacttaaattcttataggtctggtggtatgtaaatagtagacatcaaaacacaaaattgagaccaggtgatattaacctaccctaaatcttattattttttttatgaatcactctcccttctatgcctctctctacattatcagtttattttttttttaatttatattttctattttttatatggggaaatcgtttttcttgtgtattttttttaagaaaataactttacatagtattgattttgtatctacaattaagtgtctttatgtattgatttatgtttataatatacatattagagtataatcttgagactaacactctcttgcttaaattcttacaggtctggtggtatgtaaatggtagacatcaaaacacaaaattgagaccaggtgatcttaatctaccctaaatcttataattttttttatgaatcactctcccttctatgcctctctctatattatcagtttattttttttttattttctttatatgggaaattgttttccaacttctatattttttttttaaaaaaatcacttaatatagtattgattttgtatctacaattaagtgttattatatattattgatttgtgtttaaaatatacatattagagtaggagctttgagactaatactctctttctatatttgcttaaatctttataagtttgtgctatgcaaaatcaatagtggatatcaaagcacaaaattaagactatgtcgactatgattaatgatattttatggagttgataaaattactgatgatattaatataatttataatatactataatagttgtagtatatttttctaaaaactataaatttactactttgatgatgtttgtggatgaagcatgtgtataaaggtatttttgagataattgatatgccatctctattttaatttttttgagttttaaaatatatataacaatattgataattatttttcttaaaaaaatcatatttattttaatatttgttctatatatttataatatttttttttgaatcaaatatatctataatattatttctttttaatcttatactaaaagaaatgaaagtttaacaagtgaatcaaatatatctataatattatttcttttaattataacctttaaaatatctcttttttagttttattttaagataaaaaattgtatagtgaatattagaacaattatttttattattaaaagaaattattatatcaaaaatattaaattttaaaatttgatatactattatgacttaataatcactaaacaaaatatcgcatgtcaagcacggtttgttttctaatttattataatactaaaaaaattaaattagtcgcgcgaaaaacgactatattgcttagttatataaatataactaaaattttaaaatatgcataatttagtaattctaaaagaaaaaaaaattgagtaaagcacaaatttaagtttggacataaaatacgggccgacacgaacaaat

SEQ ID NO: 35869 - DNA, 3258 bp, Cannabis sativa
atatgacatataaaatgcattctgaattcaaataaatcatcgtaaataaataattcaagtctaataacaagtttcataattcaacctaagtatctgctaatttccaaattaaaacgaagaggtctttacatttattcccccttaaaaggatttcgttctcgaaatctaacttgaacaactctagatattgagttctcatgtcggattctaactcctaggtggcttcctccaccttgccatttctccagagtactttgaccaaagctatggtcttgttccaaaggactttatcctttctgttaaggatctaaactactggttgttcctcatatgacatgtccggttgcagctcaagattttcataacttagtacatgagcagggtctaaaacgtacttccttaacataaagacatggaatacattgtgaactgctgaaagagatgaaggcaaagctaatcgataccacttgtccaacctcctcgagaatctcgaaaggtcctgtaaatttataacttgcctctttttctgaaatgcttgatccccttcattggagacactcgtaggaacatatgatcccctacttaaaactcaacatttctgcgtttcggatctgcataactcttttgcctgctttgagaggcaagcatcctggctttaattttctcaattgcttcattggtctgttgtactgattctggacccaagtatttcttctcccctgtttcatcccagtgaatgggagatcttcactttctaccatataataactcatagggagccatgtctattgtactttgataatttttattgtacgagaactctatcaacggtaggtacttactccaggagccttcgaaatccataacataggctcgtaacatatcttccagtatctaaattgtcctttcagactgtccatcagtctgaggatggaaagttgtacctgaacttcagtttggtactcatagcccattgcaaactttgccaaaatttagaggtaagcatcggatctctatctgaaactatggattttggtacaccaggcaatcttactatctctttaacgtacaaatctgaatactgatccagtgaaaaggttgtcttaactggtagaaaatatgcagactttttgaatcaatctaccacaacccaaattgaatcaaataaacccgtggttgtaggtaacccaaccacaaagaccattgtgatatcgtcccacttccactaaggtagggttaaaggctgtaacaaacctactggtctctggtgttcagccttgatctgctgacaggttagacatcgcgatacgaattctaccacattcttcttccttccgctccaccagaaattgggtttaagatcttgatacatcttggtggtgccgggatgtagggaatatggagtggtgtgagcctcttcaagaatttcatttctaagtttcgtactacttggaacacaaaccctggtcttgaataacagcatcccactatctgacactgtaaaatctttggcttgaccagttcagacatcttctctggtctttactaactctggatcagttagctgggcagctttacttcactcaaacagatcagattgcatcgtcaagttatgaagtttgcccacaacaaactcgatggttgatctgaccatgtcttctgctaattgaggtgaaatctgaaccatactagttacttgtccgggacccttcctgctcaaggcataagccactacattggccttccctggatggtaaaggattccacagtcgtaatccttaaccaactctaaccaacgcctctgtctcatattcaaatccttctaagtaaagaaagatttgaggcctttagggtcagtataaatttcacacttctctttgtagagataatgctaccaaattttcaaggcaaatactaccgtggcaagttttaagtcatgagtcgggtaccgctgctcataatctttcaagtgacaggagggataagcaataacccaatcatcctgcatcagtacacaccccagacctagtctggatgcatcacaatacaccataaacttctccttatctgaaggtagggctaacactggagctgtgatttacctctgtttcatctcctaaaagcttgctttgcacttatcagtgcatacaaaacgttgattctttttagtgagctcggttaagggtgttgaaattttggaaaacccttctacgaaccgacgataataactagccagacccaagaagcttctaacttctgttactgttttcaatctcggccaatccctaacggattttatctttcctggatccaccttgatctcgtctttgctaacaatgtgctcaaggaaggacacctgaggtagccaaaattcacacttcttgaattcggcatataacttatgttctcgaacttgttacaaaactattcggagatgttgctcatgctcctcttcagatttagagtacacaaggatgtcgttgataaatacaataacactaatatcgaggaaatccttgaacaccctattcatcaaatccatgaaagttgcgggagcattagtcagtccaaaagacataaccaaaaattcataatgtccatacctagtgcggaaagctgcctttggaatgtcctcctctcagattcttagctgatgatagcccgatcaaagatcaatctttagaaaattgtcttcccctgaagttgatcgaagagatcttcgatgattgttagcttattcaattccatgtagtcaatgcacattcgcaaagacccatctttctttttaacaaacagtactggagctccccagggggacacactaggttgtgaaaaccttatgtcaagcaacctctagagttgaattttcagttctttgagttctgctggagccattctgtaaggggccttagaaaccggttttgctccaggtgccaaatcgatgacaaaatcaatttgtctctgcgtagtaaacccagaagttcatcaggaaaaacatctaaaaattcccgaaccaccttaatgtttactggctgaatagagtcaggccaagtggtgtccaataccacggccagataccctagacatccctctcgtaacaattccctggctgttagtattgaaattaccagtatctcagatccccgaactgatccgacaaaaacaaacggttcttcgccttctggttggaagattaccatcttccttttacaatcaatactggctaagtacttgaacaagaaatccattcccaatata

SEQ ID NO: 35870 - DNA, 1934 bp, Cannabis sativa
taatataaggaaagatatgcacaaagattacgagatccaaaagagttatgaaaagacttgaaggcgcagagagaaggcactacacctagttcggggtgcacttgaaaattcatactcgaaattacctggttacttacacatgctaaagttgagaaatccaggtaccatcacgaattttgtggtagaggatggtcacctcaagtattgtttcttctctttgggtccttgtattcgtgggtttaggttttgccgacctgttgtatgcgttgatgggtctttcttgaagagtaagtatggtgggcaaatgttgtgcagaatgcaactgaatgcatgtagctatatttttctgatagctttcattgtagttgacagtgaaaaccacaattcttggacctattttatgagaaaattaaaaagaagcaattggtgatgttgagaaaattcttggagtaggcatcaaagcattgttcatcctttggagatcgtgttccctgatgcacaccacggtgcatgctaccaccacattattatgaacgtcaaccacaagttcaagactaatgtcttcccgaatcacatttacacatgtgcctacacgtattcaaaatcagagtttcacagagaatttgagaacattcgggcaatgaatgttgcagttgcacaatatcttgaggaaattggatttgaaaaatgagttcggtcgtactttccaggggtacgttacaatgtaatgaagagtagctgggctgagagcttcaacaacacaactaaggacgcaagaggaattccgatcattgccactgtagcattcctgaggtgcaaagtccaaccgtggtttgctacacgaaaagaaaaagctgacaagtggatgaagaccctagcaccataaatggaggaggacttggcattgcattttgaaaaatcttggtatttcaatgttgacacatgtgaaccttacatgttgtaggttcactctggaggatcaattgagaccggtggcgtagtggacttgcatgaacaaacttgcacttgcggcttgttccaaatcattgagtttccttgtccttatgcatgtgttgcatctcaacaacgaagtattagcatgtacgcactatgctcgccatattacacaacagatactggaagagcacatatgaaggtataattatgccagttggtgacgaggatgattgagaattgctagaagacataaagaacatgatagttggagtgcttgttgagaaacaaccagtagggcgacccaagaagcaaaatgttggaagaattaaggcaaaccaaattgcttgtaatggtgaaaagattgtgataaaataaaattgtggcaagtgtgttgtactattatgtattgttattgaattcatgttggacttcgttaaacattaaaatttgtggtattttattttttgataattattattatttgtggcatgaacatgttattttactaactacaaaaatccttttataaaaaaccactagttcgatgcagatccaatgctacttcgatgggtgtccgatgctagtataaatatagcagaacaaaacagtgatggaccgatggggcccgataggttccgatgttgtccaataccaccatcggacactatcggaccctatcgaactccatcatcccataactggaaggcctaaatttgttataaactaatacgccaacatcggacactatcggcttatgtatcatccattatcatccttttacaaaaacatatgtttaaaacaaaagaattcataaaatttaagttaaattggtatgaacataatcataccaattaaaaaaactagttacattgttatttatatacatggaggaggttccaatggttacattttaattgtaacgatcatggttatattttttttagtcattggatcactattaaatggttgtgattaat

SEQ ID NO: 35871 - DNA, 2193 bp, Cannabis sativa
tgcgtgatcaccttaacgttgttttcaaagcacgctcccacgcccctcgtgacgaggaagagccccgtgatccccaagtgggcgatcagggtataaatacttgcaccaacctgcctaatgcaccagctgggactactggggttaatatcccagcaaacctcgctgcaatagcaacagcccctgcagccacaccagtcactgctcccttaaccgggggtattgaccaaagcatgcttctgcaggctttgaaaatgctcgagtagcagagaaagcccatatacaagttgcatgggacctctcctttcaccacgaaagtgcgacaagctcgactccctaaaggattccggttatccgaatccctaaaatacaaaggtacctataatcccattgattatttagagaaattcaatactattttggaagtggatcaggtacctcagcttgtaaaatgtcgcattcttgcggcaacattggaggaaaacacccacgattggttcggccaattacctgaggcttctatctcaacatgggagacctttgtcgacctgttcatcacgtacttccaagccacgatgacctataggctgccctataccactttggctaacatcaaacaagagcctggtgagtctttacaggaatattttaagcgttttaatgctgaagtaacaaaagttgagaaggctcccgagtcttcgctagtttgtatgttaataacaggtgtcctgtcgagaaccgatttttggaaggagttgcaggctcgaagaacaaaatcgctcatcgtcttcttcgccatggcagaaccgcataagagaatcgagaattccttggcagagttggagaagggaaaagataagtgtaagtcaccagtgccacgatcacaatcccgcaatccccgagggaagaaatccagaggacgaagtccagaagacgcagtccacggagacagcaaagtctgaaactggccaagtgcccccccaagaaggaatcctcaccggaaaggaagggtggactgcgcttcgtgaactataccgagctcgcagtaccgcgagaccatatctacgacatcaaaaagaagaatggggtcttcaagaagcctcccccgatcaggggaaaccgcggcaagagagaccccaaaaaattcggtaagtaccataaagatattggtcacactactttggagtgttgggttttgcaggacgaaatcgaagagctaatcaggagaggaaagtttagtaaatacaaaaagaatgaggaaagtcatccccgagaggatgaaaaagaagaaaaccaggatgcgagtggttcaagaactcctcgcaatatcttgaccatcataggcggaccacatattgcaggtgactccaaaaagtcacaggagcgatatgcaaaagagagaagccactcaccaacgtgaacaacctaagcgagcgaccggagaagctgttcaaaagagaatgcgacgacattacgttcttggaaagtgatgcgagatgggttcaccacccacattctgacgcattagttatcatttccaatattggcggagataacttcgaccgtatactaatggacaatggaagttctatgaatctcttgaacttcgaagccttcaaacagatggggttgcatgagaaggatctgcaacctgtaacgtcgagtatataaggttttatcggcaatgtcattgcattgaaagggatgatcaatctcccggttactttaggaaccgaccctgtagcagccaagtcgatggctgacttcgcagtaatcgaccaatactcagcatacaatgccgtgattggtcggccaattttgaaagagattaagatcgtgacgtcaatctatcaatcatctcacaatgaagttccatattcccgctggagtaggttctgtgcgaggaatccaatcagactcgtaagaatgctacaacgcagcagttaagcttgcaaaaaagaagtcagtcaatgtcatctatctgctagaggcaccacctcctcgtcaggaggtcttcacgatagaagaagtgtcgcatgaagatggaccggattcggatcctaggatcctcaattatgccggaaacgcccaagctgtggaagacactattgaggtacctatcgatcctgtagataataataaagttttgaaaattagttctaaactaacttttcagcaacgagaaaaactaacgac

SEQ ID NO: 35872 - DNA, 3731 bp, Cannabis sativa
ctaccaaggttactgatgctatgttcccatcaagacatcccagaatgttacgatttattacgtatttaatacacatttatattgacctggtataagcggacccattatagctgtgtgattttcaaatgttaaccacatttattttacttggtatgatatcaaaccccacaatttcaggggataattattataagatatcagtcaactatttaattaactgccctatgatataattataaatagaggcatgttgtattgaaaagggggcgaatatttcataagagaaaacagtcctagagctataccagaaatctaataagattgactcgtggactatgaagaattttaactgtaaaaccacgtaaaaacctttgtgttcatatctttctttttctgctattattttttgtgaaaatctatcactgtctaggctcaaatacagttaacaaaaattggcattaacaactaagtatatttctaactcttctctgtcttggggttttgagagtacaggaggttttgcaagttgtctttttatttcttgaaaggcattctcgcattcctctgtcgattcaaatttcttattacgttgaacgatgttgaagaaaggaacacacttatttgttaactttgaaacaaatctattgagtggggctatccgaccatttaagctttggacttctttagtttttgttggtgatttcatatcgagaagggcttgaattttcttaggattggcttcaataccttgagcattaacaatataaccaaaacacttacccgagctgactccaaaggagcactttaagggattgagtttcatgttgtattttctgatgatttttaagcattctccatgtcatatatatgctctcgagccttcctagatttgatgagcatgtcatcgacgtttacttccatgttttgtccaatttggtctttaaaaatttaattcacaaacctttgataggtagcaccagcattctttagacaaaacaacatggctttataacaatacagacccatatctattcagaaacgtgtatgttcttgctctggtggatgcattctagtttgactataccccgaataggcatccataaagcttaggatttcgtgcctggttgttgcatccacaagttgatctattcttggaagtagaaaacagtctttggggcacgccttgttgagattagtaaaattaacacatacttgccattttttgttgggcttaggtaccagtaaggggttagctaccgaagcttgatagaaagcttcaatcatgaacttgttattgcgtagtttttctacctcttcttttaatgtctgtgcccgttctttgtctaataatcttgttttttgttgaacgagatagaagtaaggatcaatgtttaggatgtgagatattatagaaggattgataccgaccatgtcttcgcgcgaccaggcaaggtttgctcttagaaatcttattaaagcttattttacttcaagcaacgaacctttgccaatttaaagtttcctggtcgggacatttgggtcgatttctatctcttccaattcttctactaggcaaacatttgtatttggttccccaagttggggatccacatccttgtcccggccttgaatgacttcctattgggcaatacttttccccttgtccgaactctggctggaggaattttcttttttggccttggtcagggaaaggttatagcactcccgtgcaatttgttgattcccttttaggcaccctaccccattatttgttaggaacttgatgcacgaattgaaaattgatttgatagctttcgggtcatataaggcttgtcggcctaaaatgacgtttaaagctgatgggacatcaattatcaaaaattgtgccatcacagttgtgctcttcggagcttctctaatagtgagggatagacaaattttccccaaatgtgcaacactctggccagagaaaccatacaccggtttggcacaggggattagatctttgagttggagtcccatcttctcatatggtgtcttgaacagaatatttgcagaggctccattgtctatcatggtccaggccactgttttattttctatctgtacttccacgaccaagggatcgttgtgtgggaagcgaatgtggacaacatctgcttcagtgaaagttatagtgggttcccctaccagtggaatttttggctttctctcctctatgaccaaaactacttccttttgctcatagtgtaaggttcgggcatacctttctcgagctttgcccgagtgtccagctacatgtgggcccccaataatgacttgtaaatgcccgtcaactggtggaggcattagtagatcttgattattgtctgcttgggcagctcattgattctgatttgcgttgacgtacttctatagtgcaggttattctttctgattatgaattcaatttcctgcttcaagttgttgcactcattcgttccgtggccgtagtctccatgaagacaacaaaacttggacgtgtctctcttacttatgtccttcttcatgggggcaggttttttgtatgggaccataaactgagttgccgtgtagattgtctctatgtcgtcagttaggacagagaaggcagtgaacctggaggcattttctctaggggtgcgttctacttttcctgtgaactttcccttctttccgttgccttgcctgccattgttattagatctttttccacctggagttgagctacaaggatattgtgggctctgagcaggtgctcccaccgcggggacatgtggttggccctatttaggctccacatctcctccctaaatggcctcttcaagcttgataaactcatctgctcggtccagaaactctgccatagaccccacgcggccacatctgttagtgtccttccacagttccctgagtacctcgatgacccccagtatggcggccagcctcccctcttcaattaatcctgctactttcataacgtttgtcatgaacgagcttatgtaggctctgaggggccctcctggtctttgttttacttcaaccaggtcttctagatgtaatgggagttgacgagaagaggagaactgcgcatggaattctgaggaaaaagctttccatgaattaaatctccctgttggtagcttgaagtaccactggtgtacgactttcgaaagggtagcagggaataccctacaccgcacatcaccccgtacaccttcagatccatttgcagctcaaaattatttaagatgtgtcaagggatcctcttttccagtgtacatcttccaggtcaacatcttgaactttaggggtagctcaagaaccttgatctcaggggtgaaaggtgatacgcgtgctcggtccagctcgagaaaagtgagttttgggccagtcaggccttgaaacatattttttagttcatctaactgtgcttgcatagatgggtgaaccggttcagcctcttaaccgacctatgtcacgtcaggatctcttaaagttgggtcctggatgtggatgcctggctgagtggctttttgaacgtatttttcatccagcctcttcttctgttcaaattattcctaagatcatcgactgcacccaatctattgaacattgatgcaccgggtagcctcagtttttgactgatttggccggtgggttggccagaactgtcaatttggatgaagttattaggtataactccacccaaa

SEQ ID NO: 35873 - DNA, 1141 bp, Cannabis sativa
  modified_base (182)..(184): a, c, t, g, unknown or other
aagtcaattcttaattccacaattctagtattgtgagatggataatgtcatacccaaaattcggatggaggacacatgtcaagataaagggaatgtgaatcggtgcaatagctttttatggaataactcattaattacgtaagtatcaaggtatatctgtaacccgctgactgtaaggtctnnngcgaggaatcaatgtacaaacttgcacttagtgtattagcgagaaaccatatgttgctaaaggtgaatagcgaggcaccaaagaaaggtgacacataccttagcttgcaataagcaaagtaactgtaaaagtcagatcgactcgaagaacaagtaacaattatgctagatggccatctcgctatgagatgacttcctatagcttcatccaactaacaggagcgaggctcataaccctggcaagtcaaaagatttctttatacccgcgatcgatgtaagacatacattgtcgacctcgtaaagaagaatggtcctaactcgctactgggatcactataatgaagtttttgtcgagacatctccagattcaacaattaaagacgtgtttaatacaagatattttttgacctagtaaaagtgagaaaatcacagctatatgattttcaaaatcatacaccgcatttacatttcgttatatgtaatcaaatcccacgattttagggttaatggctgtaaacatattctggtcaactttgtaattaactgcccactatgtactggcaaatagtctcaaaaagggacgaaaaaactcatatgaaagaggccccaaaaaaatactcagaaatctaaataagaatgactcgtggactatgaagaattttaactgtaaaaccacgtcaaaaaccctgtgttcatattttatttttctatagcgtttattttttctgtgtggaattattaccgcgaggctcaaatttagttaacgaaaatctgcgttagcagtttggtgctttcattgagagcctttgtgaaaaagctcagaaaaaaccctcacttctttaaaagaaaaaccttttccttcatggctgaaaatcaagagaatattaacaccccacatgagaaaactaaccatcgtcctggaaaagagcccatcggctccagaagatctaccaatccg

SEQ ID NO: 35874 - DNA, 3172 bp, Cannabis sativa
gttgagtcactaccccccctaccataaccagaggtaggaggaccagtggctccacaaataatctgagtccatcggggctgctaaatacactcaactgcacccacagcttgcattgctttccccaccatataagcgtaagtggtggcatcatccgtcgtaatcatcaggtcgtgtctaatcttgggattcaacccatccaaacacttctctttcttactaaattcagttggcactattcctgaggccaacctagcgagtctgtcaaactgtgttgtatactctgtaactgacattttcttcttttgagtcaattgtgtgaactcctttctttttgccttaagaacagcctcaatgtagtattttgcattaaaaaactcttgaaattcttcctaggtaattatggtgatgtctagggtgaaggatactatgtccctccaaactaaggcatcctcctaaaactgaaacattgcacaagccactctatcattgttagtgactcccataaaattcaaagtcctggtaagaatagttagtcattgctcagctttcataatgtctggacctcgtagaaagactacaggtgcttgcttactgaacctttcataaagtggttttattcagttggcaatggaaactggccctacttgcataacaacaacaggagccatctacaccttaggagtaggcattgtaagagcaccctgctatctcaaacgtcaaatctcttcatcttgctcattaatcctagcttgcattttagcaaacctatgttcctaatcctgggcagcctgcggtgggttaacatcaccccgaatgcataccctacctcttgggcctatgcctcagccacaaacattaaaggaaactgaactccctaactaccattggattcgaccgaattaatctggcttctcgtgttctgcctagagtctattctattagaataacctgcaaaaccatgagctagccttgtcagatcgtgatcaaggttaaattttaattactgcttacttaagaaaataaaacatgcacctatttaactatcaggctactaacatgctccctaacaggctttcctcattacttactaatagaacaaactactaaagcataaaaggcttactgaaccgtgagttgagctttcctctgatgaagattgtacatatcctgacgatctttgaaagataacctggcagttgtgataccaaattgtaacaccttaccaaaataggcatgttatcataatttcttaatgttgttcacgcctttgctaatcaaagggtttatgggaaaacgtagataatttaatttttttttaattaaactttaaacttaattaattaaattttttacataatacaggatcccgtctttaaaatttacaattgctttacaaaatatttagttgcaaaagttgtcacttagggattaccaaaataaagcctattgccccaaagatcgaacactcaggtctaatcaaccctgatatgtacaatttttactagctcgagctcactgttgttcagttttagccttgcccttacctatacatgcaaacaatatatgtgagtcaacagactcagtagaaaaacataatcataacataacataaaccagattgtaattaggtgcccatacacctaattataaccctatctcgtgtcccatgcgcactgagtctaaagcgttcctacgacagtactatttaccataatatcagcctatactcggtactctagtcgtgccgatgtgttagcgtcaatcaatactttaccaaacatatatctatcagtattcaatgcaactctatgtacaataaaactaccattgctgatatgttatctaacaagcattcataaacatgaactctaaagatgtattcatatatgcatattgttatactaatcttaccttgatttcaaattcaggtgtgcagatcaacctaagtggaaactgttgtttgacgatttataggctcccaagtcttaacattcataaaaactgattaagtgatacgctaaattactttttggggacttaaaattaaaactagaagtttttacatcgatggatagcgtgacaataccctaaatatcactaaaacacaaaaaattagggttctaaaactactaaaattggtaaactggattcccaaaatgaaaatcggttcctagggttttgccaggggaaacagttatctagttctacaagaatgccataatcgattaatcagttctctataggaaaccctaaaaacttcatcaacaactcaatttaaccccaaatcgaaccaaaccttccaaaatacctaattaagccacaacaaatataatttaagcaataaaaataataataagcccctaaaatgaaattcactatcaaactttgtctaggctcaagaataacaaccaaaacagatcaaaatcaacataattaaccataaaacaacccaacaaataaaaccctaaacaattagctcgtatagaaatccaaaccctaaaatgaaagcatgaaaccttactttagctgtggaaaacaagaagaagaagattacttaagttagctagatcaattcctcaaatcttaagatgaaaagcctatgattttagactgaaatggaaggaaaatctccctggttgttgccctaagattggtcgagcaaataagaagaaagaaacaaagagtttgctgttgacaatgccaattccgataacttttctagagtttgctattggtgctgaaaaattcgcaggagtagctaccggtgtctaaaaagtcgccggacttgctgccggcactggaaaagtcgtcaaaattagtattgttaccataaaaatcactagaaaaatcacaattttttagttaattctcacacttcaaattacaggtcaggatatttttttttcaaattttgtttcatagcgatatttttttattgttacagtatcattcctgtaaatttttgaaattttttgaatagtttacaatgccaaaaacagagttcttgatattctagtttaccacgtgtgttcaaaaaacttcaaacgtattttcaacactgtgaactattcgaaaattttcaaaatttacagagatgatgttgtaagcataacgaacaccgccatctcgcaaactgcattggcaagtcctgagatgattaagcttttagcta

SEQ ID NO: 35875 - DNA, 1309 bp, Cannabis sativa
aaaagttataactcgcgtataaaattgaatactaacggttctcgcgagctaggaaagtactaaacgaggcatcacgacgccttgataaaattacttgaacctaaaaaagggatagataatataactattcatacaagcaaattaaaaaatatacaaagtgataaaatcattaaagtatatttaagttttcttaaggcggattataactgctatagcgaggtagaattgacaactgctcgaaaattgaaaagtttggtagataactaactacttaaatagaaagattggcagtagtggaaaaacccaaaagtagtttatatttgatcaaaatatagttgtttacattttgaataaaaatgcaagcaaacacaactgtattaagtttgaatgaaaatagtacaaggcagttaagataagaaaaaacccaagttgggttacaaacttgtcgttacaaaaatgccactaggggcaaaccattaagtcatcttcctaaacaaagaatgagagggagtcgataaacttgagaaagaccgtctacacatagcttggagaaagaccgactacacgtagctcgagaaacatcgtctgcatgtagagagccttgatctctgcacagaccccattctcatcatcagatcccatttcctgaagccaagacctctttcccagcctcaggaaattgctcgataccagagagaggttggcacaagggtcttctagtgcaggtttgggtcttggattggttggattctttgatagaaaccacgccaactttcctccaggattccttgtcagcctaaagatgaccttcaagattggtcacaagatctatgtcccttcctctggagacatagaaaaaaggtcagtcgagcaacaaaaaataataatccgactcagatcaccatttacaagggataatactcaccctcaagaatcacttgtgatgattgtccataatgatcaactgggttcccttggtttggattgatcggaagctcctcagccttggaatccatcatttctggttccaattgaggtttgaagttcttgggaacgaatggaaaatggttggtgcatcttggtattatgagtttgggaggatgaaattctggatccagaagggacattctagcaagaaagagatgatccattatcaaaatggatctcaccaaaaagccaaaagtttgtgaaatttgacaagcttaagccgcccttttatacacaaagtctagtgataagaaagctaaggattggaaaatctaacagttgggagtagggcagaatgtgaagagacgattcataatgaccc

SEQ ID NO: 35876 - DNA, 1623 bp, Cannabis sativa
aagagtatagtaataatataataattttatgaaattattatttttacaaagttgaataatattttataatcgtgaattatatatacaggtttgtgaaaaaataaacattattgtaataaagaacatagaacaaaaagttaatcgattatttattgaagttgaaattgaagaaacaatatagagtaaatatatagctggttttttttttttcttttaatatctacaaaaaaaaaatgaaatgtaatattgatatttatatgtacactaattaaaaaaataccaattttaatatgtacactattagagaattctaatacatacactattagagaattacactaataaaagataatttattatgtggttgtgttttttttaaaaaaaaatcataaatcacaatcaatgatactgggcaattaaaaaaaagagaaaaagaagcatatatcaatcgtccaagccaaacttacttaaatatagtcataagtctaagtttctaacagacataaaaaaataataagaacgttcctaaaattgtaaataaccgaagtcataactataaggataaatttaaaaacttagaaacaatagttgaaactgataagtcaatcttagtaagtgtatgtttacagaaaagttattcatgcaagcagaaacttgttgagagctgagacaattaaaaatagagcatcgcagtacattattatgtaaggtttaattaaaagatggtaataatctttttacactataaattctaatagaattttgacaaaataagctacagattgaaccaaatagaatatttctattattgttatgggtctcgttctatgtgtagtttatcacttgaatttgattttcatttagaacagcatttacttttcttacaaagtgtattctgttgctacatatccatgctatatttttttggcatatacataaacatagatattatagaggtaaaccacaaatcacagtcaatgacagtaggcagttaaaaagaagataaagagaaacatatattaattctaaaaacgaaacttatttaagtctactcatagtcctaaatctctagtagatataaagagaataagaaagttcataaagttttaaacaacttaagttataactgtaaggataaatttaaaaacttagaaataatagttgaaactggtaagtcaatgtatgtttatagaaaagtgagctattcaagttcaaacattttcagagctgagataattaaaagtagagcaccacattacattattatgtaagctttaagtgaaagatggtagtaatttttgtacattgtaaattctagcaaaattgagacaaaagaaggtggaggctgaacaaaataaaatatttgtatgattgttactaaaaacatgtgtgggataccaataaatatataatgtatatgcactcacccagtatacagcggaaggtgtaggacaaaaacagaaaaaaaaaaaataaatcacactaaaacaacagcaaaatagaaaaataaaattaaaaagaacccaccctttgaagaacaataaaaagagattgagagctagagaaaactcaagaaatgaacaataacagtgatttatgttgagtattactgctagtccttaa

SEQ ID NO: 35877 - DNA, 3350 bp, Cannabis sativa
agagagagcacaaataatcacaaaagaaatcacaaaagacaagctaccagacaagctacccgcgtgcatatcactatacactagactcctatctctcaataccaaaaactaacatcctaaactgggtagtcgcgcctgatagccaccataataccgaggctcaaatttaattcacttcctatacatattttaggtcttttcaccaacaggtgagtgcacacctgatccatctatgatgacacaatgactaggtcattaaacaacaaaatgcacaaatcatgatcaacatgactctcatcaatgtaaccaaaagtaggcaaacaagaataacaaaagaacatattctgctttaattttagaaaatttggcagcataacaggtttaatttgaataaacttaaaaattataacctgcataaataattatacaaaaatacatttgacactcagtgtcctagaacaatctagaaaaatatacagattaagtttttaatttttcaaacatttaaattataaaaattagaatgtgtctaatgttattcataacatataaaaacaagtccaataattaagttgactatctacctccttaggatcattaaaatttctgcaaaagagacgctcctaagtccgtgattcttaagttaaagagcttagtcactccataagtcactttgttctacattctcctatgaaataaaaaattattattattataatgtactcttcaaactatgtccaacaataccattcaaatatgatcaaagatctcaccttagccatgcacaattacagtatttggttttcaaaatggtgtttcgggaaaggtaacgaatcttgacatagcatatatcaaaatgactctcttgatgagtagatcatcgccctcgccaaaaaatgcttataaaggggaggatatcccaaaatcttaccacatacaaataatgagttgacaaagcaaacttagtgggtgatgttcttctcgtgaagctgattccaacagtaccaaccatttgtcaaatggtttccaaagtcagtcgtaatgtcgacatgaattcttgatgttcttctcaacgttcgtctcagctccaattgtcactaaatttcgcaccccaaattttcttccatataatgtcctgagtctttcatctttgtttgattgatgaatagtaggcaattttgacaataatcacatgtgggtctttccaaatcaacttgtctactctaccatcaggctagacaacatgctctagaccttcaaagagagcaggagtaaaccagtaacttaagacctgagaatcaaggttacctgaattgtcaaaacagttgctaaggttgaacaactttaggttgcaacatcttggattgaaggtagccacgcagttttcccattccatccaagatgtccatggggcagaccaaatgtcaatgaccattactagttaactagcaactttcacatcaaatgaaatcatgggtagccaagatacctcatgcccattttgaagctaaaagagggagggataaattccaaaaatatctggtttgcaatattttacattgaaacctggcaccaaagactttgagaattactcgcaagcattcaacccaatttagagataaaggccatattcagatctcgaattttttttattctgagaccacaatctaattttggcttgcaaataaagtcccagttgatgagggccagatactggtgtttgtttgaaacccccagccaccaaaatcgatgaacccgtttattcctctcatcacaaagggttttaggaagcataaaatttgacatagtatacagggggatactcgagatcacagacttaagaaagtagtacgaccctcttgtgaaagtaatttgcttctccaaccatcaagtctagctctaacatttcaagaacaaaattaaaatcacacacctttttttttttttgaaaagaaaatgggattcccaagaaatttatccaaacaattaagcatttaaaagtcaagaaaattgtcaatctcaacccttatcttctctctcgtattgttggagatcaccatggctaatttaggtatgttgatttaatggccagaccacgtacaataagtatccaagcaagtttttatccttgcgacttcaccaatccccactttgctaaacaagaaggtattgtctacgtacatgagataagtgggcatctaagagtggcatgaaatccatggattccactattgtcttcctcatgaaggatcagtctagatagcacttcactgccaataataaacaagtaaggggataggggatctctttgtcgaattccacaggttggaagaagtgtttaagcgggcctccatttaacaaaatagaaaaggaaactgaagagatgcatttggagattagttgccgaagtttttccccaaacccaaatgcttggagagttttagaaatgaaacttcaattaaaatggtcataggccttaatcatcacacttggcagcccatattctttttgggataagaaccaagaacgtttgtttgaggtcctttgagaaatcccctgtcctaaaaaactatgtaacagtgtcaacaacatcatcaccaacaatattccaataagctcggtagaagcaacccggcattccatccggaccaggggctgtcaattgacccatggaccaaaccactttctttatctcatctctagatgggattcgcaacaactccacattatcctaaattgaaattgcagatgaaatgagatcagagagtttgctgagagaagaacccagaagcatggtaaaatttagtatttatatccccatcgcgtaaccaagtctcacgagacttctgatgccaaatggcatcctgccaagacgaatcctcttcaagctcaaggaagatatcagcttctgattgagcattcttcggagacggcggttgattctgaatttcaagaaagaatttgtctagcataattattatttccttacagaaaccaaaatggttcctgatccaaattgtaagttttttctcgtatttgttaatcgagacacccactggaagctcttggctccattaaccacaaagaggcaagcttttctaaccacctccatacactccggatctaagctccaagcatccaggaacctaaaagttttatggaactcgttattatttcttatttgaatattctatttggcaaaagtgtccaaaccacacgttgtatctcgtaattagttactagttttctgtattatttattaaagggcttttttcataaacgtacaacaaaaacaacataattacaaaaaaatgtacaaaaaaaattattttaaaaacttatacattttg

SEQ ID NO: 35878 - DNA, 1377 bp, Cannabis sativa
  modified_base (1115)..(1115): a, c, t, g, unknown or other
cttatttattttcaatttaagaaaatatttaaattgcaatcataaatataaacattactaaagatatctttctaagtaataataataaaaaatttctctagctaaatctaataacaatttcaaaagaattaaaatatataattaataactaaattttctatccataaatatttattcttgttttcttttttattttttaaaagttagttttaattaataatttataatatgtgtaataaaattataatcttattaaatatatatttattatttatatatattatcaatttttacttattgtctttttttatattttatttatatttttggcgaataatttaaacaaccgctcgtgaagcgcggcatgtttcttagtttgtattataaatacgtgtgttagaacacacttatttctggtgtttgtatgtggcacacacgtaatttgttattgtcacaactattttaaattaaaaatcaacagtaagtcatttaaaataagaattaaaaaaaatataattaatagaagacgttacaacatccaagtagcggagctaatcaagcatattataatacctcatatttttagttaaaaaatatacttctatataatacctcatattttaattttctttaaaattaaatataatatttttatgttaattaaagtaataaaataatataaaaagtgagaaatgctaaaagatacctaacaccctttcatgtgtcaatatcgctattggtctaattaagtatcaagtctcataaagtttaatgtaataatttttagagagtatcgctagccaatcgcaagacgacagatcaaaaggtgctagacactaataatacccaataacaaaaagtaattaatcaaagagaaaaagagagaattttgagtaaatgaataaaaaatacacaatacagattttgctttccctatagaactatttgaaggagttaatggagtggattatatccatgattctcaatttttttttttagaagatgcccttttaaaagggagtgctcaataaatagtgttgagctaagtttattttatagaataatttgtggtataaatatttaaatttaacttagttgcaaataaatacttaagnttaatttttgacggtaataatacctaagttatatttctggaactctataggtacataaccgttaaatgttaagccattatatccacgtgtcattttcttattggtatatttgaactattttttttaaataataaaatttaataatttggaccaattaagaattgccacatggcaattaatttaaccaggtacctacaaaaattctaaaattataacttaggtattattaccgccaaaaattaaatttaggtatttatttaca

SEQ ID NO: 35879 - DNA, 955 bp, Cannabis sativa
tgttgggctcaaatactgattgaccatatcgcattagtatgactagagtcatgagtataggctcatattatggtcaatagtagtgtcgtaggaacattttagactcaatagtgtaggatgtggggataacattatgattgggtgtatgggcacctaattgtaatctgttttatatctatattatgattatgcttttcttactaagtctgtcaactcacagtcattgtttgcatgtgtaggtaagggcaaagctaaggctaaatagaagtgagtgtgagtgaatgaagattatacatgtcagggcgattagacctggagtgtacgatctttgggacaacaggctgtattttgtatagtcactaggcgacaacttttatactaaatattttaaacacgtgatctcagttatatacgagttatttactttgaaatttatgagtaattaagtaaagttttagataatcacgatttttaataaacccgttagttagtaacggattgcacaaataatataaaagcacgataaaacgcttaagctagtagggtgttatagactcagagcacgatagaggtctcatagatgttggccacgttagcgccatgcaaaaagtccctccataggcggttacacatttttttgacacataatcagatttcactacaagaaaatggattttttatcccactttttacacttggaaaaataaaaaatgggataaaagatatggtgtaacttttaatcccacttttatgtttggagcttgaaagaaataaaatttagaagttctaacaagggtctcgtttggcaaataaacaaaaaactgggttggaagggtcatttttatgtattttccaaacacagccttaacatttaaagagaaactttttatcccaatttatatgtaagaaccgggataaaaagttctaaaagaatgggcttaaaaaagatggaaga

SEQ ID NO: 35880 - DNA, 1874 bp, Cannabis sativa
ggcacaaaacccaacaaggtcttggtacccttctgcctctgtccctgaccaattgataatctcccgtcttcttgagtcccttcatcaataaggccagtgttgtcaacatcaggttccacctgaacctggtccccaggttccacctgaacctgttcttcctgattttattcaggtgtgttccctgtttgttccacctgaatagatccagttccttcctcagtattgctacctgcattgttagtcttttttgtacctgcagtagggttagatgtaataggcaaacatggaaaaacatcttccttaaatattacatccctgctattaatggttttaaaacctctttgttcccaaacccaaagcctataacctttaactccctcaggataccctagaaaaacacatttcataacactttggtgtgcatatgttgcacaaccaaatactctaagattagataagttaggaggtttaccagaccatttttctttaggagttttgaatccatttgcactggatggacttctgttgatcaaataaacagctgttaaagctgcttctccccagaatccttgggataaccctgattgtaacagcaagcatctcactttgttgagtattgttctgttcattctttctgcaactccattctgttggggtgttatcctaactgtcctgtgtctctgtatgccattttctttacaataatggttaaactcctcattacaaaattctaatccattgtcagtccttagagtttttaatttttcattggttaaattttcaacaagtgttctccactgtgtaaatttagaaaaagccttatttttatgttctccactgtgaacatactctaggattttcttagtgttgtgtgtgccagtggaaaatttcagtctatgatattttccaagaacacaacactcacaaaaatcaagtttactaaccttgtccttacctaggagtttctgttcactcattagttgcaagcccttctcactaatatgccctagccttctgtgccaagtcatagcattagagtcatcactgctattgtgagcagtatagttacagggtactactggtgtgccttttaggtagtataagcctccatctttgtgtcctttcatgatagttagggctcccctactaattttcatttgtccggcttcaatttttcttacaattccttggtcatctagaacacttagtgaaattaggttcctggctaggttaggaacatatctaacttcacttagggtcctgaccatgccatcatacatcttgaaactaatagaaccagatccttgtatgtcacaggtttgattgtttccaagtataactctaccaccattagatttcctgaaatcaaacataaaattcttattattagtcacgtggaaagtgcaacagagttaaggatccattcatctttgatggatggtccaacttggtacacttcaccactttcatatccattcgtcaagttagcatcatgcatatcaggtttattcttagagtttgagtgtttagaatctccctgtccatgtggtttgtgcctgttatttcttttcaagaagtaacagtctcttttaaaatgcccaggtttaccacaattgtaacaaccattagtttcatcagaatttctagtgttagaatttgatctgcctctttgttgtcctcctggtttacttgaatttcttccttggcttctacctctgttattccaaggctttcttggacttggtctgcccctactcaaattaacttcactatttgagtttcctcctttctctgctctcatctctaagtctttagattttagagcagagatcacctcctctagggttattgatgtccttccatacttaatagca

SEQ ID NO: 35881 - DNA, 952 bp, Cannabis sativa
  modified_base (864)..(865): a, c, t, g, unknown or other
tcatgtattttttttttcttatttataggtccaaattttaatttagtcaaatgctataaattgcatgtattaacacatttttatgaacataatatactttttatggtacattctaacatatatattcatttttaaaattatatatgtgttttttaatatatttatctgtttttttcaatgataaaaaaataaaattaaaataacaaagttcattaacttaaagcccccctcccccccaacaaaaaaaatagcctactaatatatacatacatacgacatttattaagctctttttttttttttctttttttttttttattataatttttttataaggcagccatcttttttaattaaaaaaaataatcatatatacgcacatactactataccatgtaacctctatttaattttcatcttattagccaaaataactaccccatgacaatgaggtacagattaatgctcctataataaaaatattatcctatattggaactcaaagattttattggtgatcatgaagatcttctaattaattgttaaaaatatattgtgttttgatgagttatccttttttgttaggttttgatgaattatcttaattaagtactacacatgcatgagatgagaatgaatatctatattcaattatgatctgctgaaaaaaacggtatattaattattcatgattataattctctagctttgtatatactgtatacaatgcatataagatcagttaaacttttaaaatgaatggtatgcaaacaaggtcaggtgcatgcaaactcttaattataaaataaacgtagaaaagcaataagtatcggtgccgtttccgtttggtaacacttttgtttnntaattttttaatcacaaaatgaaaagtaaaatttttgtttttaaaaattttatttttgaaaaataaaaatgcgttctgtaaccactt

SEQ ID NO: 35882 - DNA, 1671 bp, Cannabis sativa
gtctctttgtgtctctcctccatgtttggccattgttctttaccaggcattatcaactgcattgccatcaactcctccaccacctcaagtcgatccaaagcctcgtacttttcaaggtaaggctccgcctctgtctaaaaatgtttctccttctaagtctatttttgggtcatccaatgtgtcgaaacgtgtcactcgttcttccaaagaattggtgccacctacatcacctacatcgtcaccaaacccagttcccttagcttctccactcaactgtccaaaatcacaacctataggaccacctcgtcctccatcaaaagtttcggttaaatcaaaaggaaaagaaaaaatttattctccttccaaaaagggcactgtgcctgaaagaaaattctctgttgatcccacttatcaaccctctcctaaaaaggccaaaaacactcttgtgcctaaaataccagtttccactgttgatccatccactattcaatgttttgttgaagtctcaaaggcttctgtttatcaacattggtttggagttcgtgagttgttgtttgaacacatagttattttagaggactttccagagtttcacgtattcttaaagactaggaaatgggttcatattgtatccaacatgttggaccctcatcccattttgattcgatggttccatgccaacctagataggtctattttatgaacacatagttattttagaagactttcccgagtttcatgcatccttaaagactaggaaatgggttcatactgtgtccaacctattggctcctcattccattttgatttgatagttccatgccaacttagatgggtctgttttagatgaggggaacccagactatattagtgcttttgtaaggggcactcgtatcccgtttggtccttctactattgcccaggtcttaaaagtcaagtctatgaaaaattcaacctatgggaaaaagtttaatccaaatcaaattgtgatgagtagagtcttaactagaagggatgattacctatgggaaaggaaggatattttggctactcatttaaccccattttgtagggttcttcatctggttgctttgtatatctggtttcctaattcacgtgtgtcatatgttactcttgaaattaggaagttcttatatacttcttagtataaagagttgctactattttcagtgttaactaactttttcatcggagattctttaggtcaagcttcattgttttgtagtctatctttctctgttttacaggttaaagctcaaaactttgtggatgaagatccaaagttgttgatcaagatttgtagatgatgagtttagactgaagggattttagttgcatcctcaccatgtgatttgaaggaattcatatcgagactttcataagggagttcaatgatttgaagtaaggggatcttgcttgagctgccaagggttttggctgtttggggtaattacttctgtaaggatcttgcaagattgtacaaactagaaattgtaaatttataaattattttagtggagttatttaccctggttcgcggaacccaagcactactcgatcgaaatgtattttcgatacaggggaggcttgtaaatcttctgtctctatctgtttgaaattgatcaattgattcttgaattggttaaatga

SEQ ID NO: 35883 - DNA, 1490 bp, Cannabis sativa
cagacggcgtctcaggcggcgactttccgtttcataagttctttctcccatagattgggcacctccacggttgagctcttcatccctcatcccaggattctgaccattcccacgcagagttctcctcgagggcgttgtccgcatactagggccaacgcctggttgagttctctggggacgtgtggtccgagcactggggccatcctcaggttgagccctcctggaacgggtggtccttctagactgcggattggtagatcttctagatcccatgggctcttttctagaacgatggttagtttcctcatgtggggtgtcaatagtctctggatctgcaaccataaaggagaaggtttttcttttaaaagaagggagggctttttctgagcttttttacagaggctctcaatgaaagcaccaaactattaatgtatatttttcgttaaccaaatttgagcctcactatgattattcaacactgaataaataaaagctatagaaaagtaatgtatgaacacatggttttttaagtggttttgcagttaaaattccgcatagtccacgagtcaatcttattcagatttctgagtattttttaagggtctctttcataagaatttttttgtcctttttttgagattgtttgtcagtatttataattgcatagtggcaattaattacaaagctaaccaaaatatgattacagttattatccctaaaatcatgggatgtgattacgtatcacaaaatgtaaatgcgatgtataatttggaaaatcatatatctgtgattttcccgcttttagtgggtcaagaatatcgtgtattaaacatgtatttaattgttgaatctggagatatctcgacgaaaacttgattgcagtgatcctaatggcgagctggaaccattcttctttccgaggtcgacaagatatgtcttacgtcgatcgcggttatacataaatcttctgacttgccagggttatgagtctcgctcctgttagttggatgaaactataggaagtttcctcgtatctagatggtcatctcgcatttttgttcttcgagcctatccgacttttatacttagtttgcttattgcaagctaaggtatgtgttacttttcttcggtgcctcgctattcacctatagcgacatatagtttctcattcatacactaagtgccagtccgtacattgattcctcgcctaagacctttcagtcagccggttacaaatatactctaatacttgcacaattaatgagttattccacaaaaaaatattgcaccgattcacattccctttactttaacacgtattctccagccgaatttcgagtataacagtttattaattgaaaatttttctttgtaacgactgcatagtgtgatttatatcactaaaaaaaatatatatatatttcttgtaatatgaataaaataaatttaatgaagaaattttttgataatcataatacccacgttacttg

SEQ ID NO: 35884 - DNA, 1374 bp, Cannabis sativa
ccttatatatatacatgtgtttatacgtaaattaaatacaatataatcccaagtcagcataaaggaaaaaaatgaatttggaaaaatagaaaacactaaattgaaagaagtcgtgaaaatgatttcacataatcatatgagctttttgtggtatagatgttaaaaagtctctgcaaacgtcattttggaaaaattgttcactcgcagttgccaatcccagcaaaaagagttctgtggaatgatagtcaagtccaaaagggagttgtgagatgactatcacgtccactccgggtccagtcttcaggatagctatcctttctctagaagaagttccaactgactagttgtcactcttagaatagtagatccggatagtcgactacagcagactttatcctattcgaaagcgtcttcaacaagtatttttgttcgtgagtccggaagcttatatatatacccaaaggctttgacgcgtaagctaacgtggagacctcactcaaagacgagttggttaagttagttatttctaactagcttaataatctcatttcttgtagccaccgactttaggatcttgatcctaagcctatatataccaccttgacattgttatttcgaaaaaaaaaaaaaaagagtttaagaactcaaagggaagagaatgagagtttgagagagagaaaagattgagaggtagagagaggtgcatagaagaaagagagattgggcttaagttttataagaagaatctttcatagatgaagaagatttttgggtgtaagtgtgagagttaaaacactttgtgagaacaaaacagagaatctcgtctcaactgtattatacctattcttgctccatcaataaaagaatatttgtgtttcagaactggagtagagacatagatctcattgatctatagggcttgaaccagtatatatcttggtgttgatttctttattttttgcatttactgtatcctagttttcaatactctatttgcgcctattttttatacgattgttgttctcaatttgataatcttgttattgttaattgttttgtttgtttagtattttattgatttgattctacacatttagacgttattttcctacacttttattagtttcctagaaacaaggttaaagtttataaaataagagctttatatcttaatattttttgtggatggggttttacttccaatataatgcatcaacctaatagaagaattgttatggcttggaatctgagtagttttgatgtgaatattcggagtagcttgagtcaatatagtatagttaaagctatgactggagggaaatttgagattacctcaatttatgtttttaatgatttcaaatattaagaaagtct

SEQ ID NO: 35885 - DNA, 3208 bp, Cannabis sativa
  modified_base (37)..(37): a, c, t, g, unknown or other
  modified_base (3168)..(3182): a, c, t, g, unknown or other
acgacgctcttccgatctgagagagagagagagaganagagagagagagaagagagagaatagggctttcagacttagagcaatttggaggctagctgacttaggtttctaggctagggttaaggcctttatataggaggcctaaaaccctagattacagtttaaatccttagatatttgtatagtttgatagatacttacaaaagactaaagcgcccttgaatctagatattatttatccattatgttgggcttttagggcctaattcgcagctcatgacttgatgtccatgttataggctatacatagagtcatgccaggttaatcctggccccccatagacctataggggaggtctaagcacccaaggcctgcaggatttggcaggtcaaggcatacaggatctggcaagtcattatagctctaccaagagaaggctagtctttgggtctggaggcaagcttttttcaagttgaggatagctttgtacaacatttccttgtagagaccagattcccttggtcgaacggaagcctccttggtccaaaagtcacttcttggcctgccagcttgtgcacatatcctggccggcctataggctcaccctgaatggcttgtaggcttctcttggccagtcagggatgttggtacaactccttgagggctcgcttactctattcgattgttgcttgacaatttttttttatatcttgcatggaagctctgttctgctactaggagggctgtaccccacctgtactctatatttagcatacatggacatgccacgttaggtggaaaaaatgtgggataacattttccccctaagtccctgatcaaacatctggtcggaagggactttctagctcttgtcttgtttgtagtagtctctattgagcatccttgcctaggctggtgttggctttttgcatggcatgcttttggatctttgaccttctctctctacatatgtctcatattctcttctttgtcacctcttccttgtacctgccattaacaagtttcaagcttcttaagcttttggaaactttttaattctcatgttactttgtaatctctttggtatattgaccctcatgacagttttggaatgtgtaatgtgtgactttttgatagaatggatttgattttggcatttgctatgattcttgactctttgagtcataaagaatacaaggcacatattcaagttttgaaagaaattcacacattttgattcaaaacttacctgaacggcctaggaggtcttgcttgagacctggccggccctaaggcttaatcatgggagttggctagctttagggtcttaccctataaagcttacctgttcatacctgggtttggtgaccctggccaattcttggctgagtaatggtaccctggccgaccccttcaaggcttgagaaccttcgccagcatgggccttggttccaagtgggtagccaattttctatccacttgtgactttggcaagaatttggctttgtaggcacatacaaccttagcctcatacgtggtttccttagaaactttgtatgaagcttaatggtgagtctattatagttgaaagttcaacttaaaatcaacatgcttggatcgtgtaaggaacttcgccttagtcgtagccaagtacgtggctcctatgagagctctgttcagttcttttctggctatacggttctagcagggccttgcctcatgcatgcgaactgacttcatatctagcctcaaggctttcatgttcttgctttggcctatatgccctctatttttgaacactactattatttatccttaaagccatttatgacagacatatgatcgtcctggctatcttcttatggccttgacatgtaagggtttggatttactatgtcaagtcaaagtatacctgcacgacatagaggcaggtttagtagcttattctaagcgttagtctccataagtttgttgtggcagtttgatgcattatacggtatgggtacccctaggcgaccatgcaagcaagtctcttggtcccttgctattcaccaagtttcacagactttgcctgggttcttccttggggtgctatccatagatgcatgtggaattgaaagaataactttaagagattgatcttgtgagtaaggggtttagacatagttgatctcacgtgtaacaaaagcttacagcttagtgtctgcttttgaaatcacgtagtggctacccctacgcggcttagcaaagcaaaggccatcattgaagaacggtgggagaccacgccaagaaggacgtgagtactagagtttttatgggttcctgcacgatgaaacgttagaggaacttaattgataagttggctagtgaaagtacttaccgagatgttccctatttcagtgtttgggtagaagtcctgactccaagttctcgttgtactcgccagacttgtatgcgcctttattgttatattgtaacatggtgcagaccttctcagtttggtccgaacatgcttgttgtaggatctttgctgtcaaggaatatattttagggagtaattctttggcaaagttttttctttcctcgatctgtttgttgacgagcctagtaactctttataggcagcatgcttcttccagttggcttggtctcttcttctttcccttttgtcaagggatcttgcaagcaagatgttgtgtacctcttggtcactgtagactagaagtatgagagtagactgctggtggatcagaaaagccagggaaaaactaggtggccagccacattgaaggagcattgcctaggcggttggataaggccatgaccggccagcatgtggaggtaatggctgggtagattatggattctatggtcggctaacttgttgaggacatggttggccagccttctaaaggcccagtcgatgctgtagtttgatcccatatgcattcgattggctttgcccccgacataattgtcgtagagcctttatgcacttctgttaatagctatacaacttctttcttagaaatgctccttggtggtgttaagataccacttctgtgtgttatgctatgtagaattggacaccttgcagccgtccccctagtccctgctctctagcaagctctttgtttggaggcatgttgtaaagaccgcttagtttnnnnnnnnnnnnnnnagttaattatgtttaattatgaaatt

SEQ ID NO: 35886 - DNA, 1117 bp, Cannabis sativa
atggctcgcaccactacctacataaaatagcccctcaagaagctgaagaagaagcatccttaggtaataactttggatggtcaccaactgtacttagtactgaatgtacttcgttagttaagtttcaagatagcaagtataatttttatacacgggataacttctgtatagattgcataacacatagatttgatggttggtatcctatgtttcatgtccaacttagttgtaatagtttttactacggaattgccgagaaatatggtactaacttcgatagggcaagccatctagattcaagttaggacttatctccaataaatccccatgatatatacatggtcactaggtctagggagtttagtagttatcatagttcttcttcctcgccatctgatagttatggtaaatttctctaagtgatagtttattccccacatttttattatctatttttttcattttcttttctgtttgcagatatggattttgagaacctcctcaatacttcaagaaaaaagggaatgaagagagttgccgcctcggagacttcatcggaacaaacttagaacccgtgaagagatcgaggaaaataattgcccacaaaaaacgtgcctcatagtaaataattagagagtcagccgatgatcaggttcattcccagaccccagtcactttgggcattgaagagtaggccttaggttcaacccaccaaatcaaattcttgattctgaacctgagatggtcttattggaaccttcctgccccttgccttgagaagcaagaattacttgttcgcaagtctgctcgtagtatgctacctcaagttggtgtcatttcaaatctttttagtctagtgattgagacttggtcaacaacggcaacttcgaggagttatttgagaggagtttaagctttagtctctaagttagttcctttcttcattttctattttattatatgttattccttatccttgttctaaatttattattattgaaggcatctttattgtctcacgtggcacaataatggggccttcaaaaaatccaacaattagaattggagcttcggaaatccattgtacaacgcgaggttattgcaaagtagaggacta

SEQ ID NO: 35887 - DNA, 1420 bp, Cannabis sativa
  modified_base (390)..(391): a, c, t, g, unknown or other
aatacaatatgcaatatgacctaatacgacgttccaaacgagtcctatgtgtgtttggatatatttaatggtaattacttatgaattcttaatttcttgtttggaaaaatcttaaaattaatattttctggtacatactatttaaaatgaaaagtttttaataattacaccgaattatcatgtgaggcatgagaatttaagagtgtaattaagacctcccaattatttttaattacacaattataatataattacatgatgatcagacaaacacgtaaactgtataaattactttcaattacactcacttctaattcttttggtttccaaacacaccattagattgtgttagaatttgtgaataaggtgaatgaggttccatctcaaaannaattggcaatgagaggagtagctcattcctcttatatattctattatctttccacacattagtaatgtgggactctctaacatcccccctcaagatggtagctatttaatatgctcaccatcttggacaactcgatgataagcggctccctgatcacaagtggctttttttttttaacttttggctcttggatcaattttttttggatttttttgtggctcttttttttcggctctacttcgatcgttttattcttttggggttgaatagtcgctagagatttttttttgtttgtttgcttttgctctgatactatgttaggaatttgggaataagatgaatgagatttcatcttaaaaccaattagctatgggaggagtagctcattcctcttatatattctattatcttttcacacattagcaatgtgagactctctaacagattgcgaagtggtttggttatgtaatatttttcataatatatatttagattattttatgtatataaaattgattaataatttattaaagaaaattaagataggaaggagttatttcctaagaattaactatttgtggtattaattgcagctacatatccatatgcatgctatttatatacttattaattattagatattattacaatatttaagtataactatgacaaaatgtccctaaatttttacacatttatcgttgaatttcatcaccaacttcagtttactttttccttgccaatttctttaatattaattgtctcttcaagttgctctaatattattgaatttattaattaagtccagctaacgtaactaaagtataaatataaaatgttgattactataatttcttagaaaaaattaaaaaaaaaaaaaaaaaaacttatgtatcacttacaacatttttaccttttttatttataaattcctatatttcttttgtataaaagaaagtcaacgtaaaaaaaaaaaaaaaaaaaaaaaaaaaactaaagacctatacaaaaaaatgagaaaattacact

SEQ ID NO: 35888 - DNA, 2669 bp, Cannabis sativa
tttatctatgtattaattttttttttacaatttcggggccttgagcgttcgggggcttgaggcgcatgcctagcccgcctaccctcagggccggccttgttgaagtccttactttagaaatttaagtggaatatttatagtaggttagtatggtagtactaatttttattattagaaaattttctataatagactaaaaatttaaaaaagaaattacaaaaaatatatattttttatttttatgattaatttttttttatttacaaaaaaaaatgaacttcaataatgatattccttcattttggttattttatatatagttgttttatagttggggtgattgttgatttttggttcttcttttaagttaatttatagtttttgggagttttttttttcttttttttgattgtttttttagttgttctcttatttttataattttagaactttaaaatcgtagttttgtaataaaaatggtagttcttaaaattgtaaataaaaaaaattgaaaaaatcccccattttgttattattgcaatagatcaatccaagtataatttctatattattcagttacttatactgttttttttttcttatatacaatatagaattgtatgcaatgtagtatctggtgttaaaacaaaaaatttgttgttaatcgcagtggatcatcttgtgaacaatgctgggatcaattcagtttccttgtttgatgagataacaaatataacttctctcagaaatgttatggtacttaaaataatatatataagtgacttccttgaagtaattaggtaaagattacacaaagttatgactcaatatattatgtgtgttattgctttgttgtgttttttgcaggatacaaatttctggggttcagcttatacaactcattttgcaattccacaccttaaacaaagcaaagggaagatagtagtgctttcttcctctgcttcttggttaccaattccaagaatgagcttatataatgtatatatatagatacaataaattatggttttttattactttcccatttctattttttctttactgaatatttaatcacattggttttgaattaggcaagcaaagctgcattgtttgcattgtttgagacattgagagttgagctaggacaagacattaaaataacccttgtcactcctggtttcatagagtcagaactcacacaaggcaaattcctagacaaagaaggcaaaatgatctttgatcctgatttgagggatgtaagaatcttttcttttttttttttctcttatgtgggcattttattactctttatatcttaataataatgtaagttttggggtttatttttaggttcaagtaagtgctattccagttgggacatgtcaaggttgtgcaaaaggaatagtgaaaagtgctttaaagggtcaaagatacttgactgaaccatcttggtttaaggtcacttatatatggaaagtgttttgtcctgagattcttgagtggggatatagattgttttatctgaacaaaccaggaactgaggcctcagaaactccaagcaagaagatcttagatgtgagtggtgctaagaactttctctacccagatactctccaagctcctcaagaggttgataagattgattgaaaactttgctttgctttttgagtagtgtgtgagaagtggtttagttgtgtattttgtagtatatatttagcttgagaagatatgagttttctgtttataagagtcttttggcaaatttgagtgttgtctcttttgtttttgctactaattttgtgtatcaaaataatagacggaatgtacatttgtagattatagaccacatgttgttttcaatgctttgacaaaataaagaattttatatcattggctgagcactatttcaattaaatagaatacacaatgagaaagcataaaaattgcatttcattttatattttctgaaaggaatttcatgaaatattataaggcatatagccaaagcggagcaattttttaatacattttattggatgtgtttaatcattttttgtacttaaaaattattattggatttatttggtgtacaatttattagatgtattttgtttgattatttatttttacttagaaattattattattggaaaaaagtttagtataccctccaatcaaaaggaccaatatttttttagtatgacaaattaggtctttttttttattaacaaatagcgcttaattgtgtctagagttgttagttgtttcttatgaatacctaattctagattgatgtaaatactagtctttttatactattacacactactacaaaaatagtttttctcaacgtttttaaatagtcgtttaaagcattcttgtcagttatcgcaaaacaggtaaaataagcgatagttaaaaaccgtcgctaatatggacttctcgacggtttaaaaccatcgtttatactttggtataggcgacggtttttaatcgtgccctatattataaattggtattaatttatttttaggtgtaaaattaattattagataaatatttaaggatggttattgaaattttcttatttaaaaaatattattagatacataattaaatttaatataatagagatatattataaggtgcaccttataattttttcc

SEQ ID NO: 35889 - DNA, 1560 bp, Cannabis sativa
  modified_base (1510)..(1516): a, c, t, g, unknown or other
caagatcctaaacattcattaacaaaccaatacactcaaaatacattcaagtatgaatctttgtactcatacagaaacttacgtaaaaatacgtaacacataaatcaatttcacttcaatgacaccccaaacacaatcatttatcactataattcacaccaacacattgcatgtacccataggaatattttaacgtaaaacatgaactcatacaaacactttttacgtgaaattttactaaaatactttttatgaacaaaatattcaattatgtaattatttatcaaaatcagaagctagcatatttcttaaccatttatacagatcataaaacatattcaatctgcttaggaatatgtatgaaatactatccatgattatgtataagtttattgttaaaagtaaataaaaccctaaataattaaccaaaaatagcaagacatatcaacatagtctcaaattaattccaaacattgtaattatattttagtattatattgaaggttccccaaactgtgaacacaaattttttactatttattctatttaaaactcaactcaataatgaattagtcacaaataattataataaatacctacatcaaccaataaattataaaactcttttgtttcgtaccatagatagtaaatagcattacaaaaatatattttactattttagaatcacttaactatttttcataattattttcagtattcactaaataaatacatgaaaaatacaaaaatgataaaaaaaacaaaatctaaccattctaacacagtttatagtctgtactgagccctaactaattaactttcaattttctgaacaacctaggtattttttaataattaagtttagaaataacacaaataattgatgaaaaataaaaaattgactaaaattcaaatctatcaattttgtaacagtttttaattcataaataatcatataaaatacacccagatttttctgagtaatctaagtattttttctaattaatttaacacataaataaaataattaacaattaattaaataattgcaagaaaatgatgaaactttaccaaacaccctaaaataatatgtagaatcaaaatctacaaaaaaagatgggaaaaaaacctcggaactacccatatcgtggtcgcgagagttacgccggcgaacccctcttctttggcgacggctagccccaactccttatatagttgcgtttcacgcattattttgattggtgaagcttcctacagtgcttagaacctcaagccgaccataaatcaccaaagaatacgataaaaagttgttgtcttcttcattgccggtgtaccgttaaaaatggagtccaacaatggcgatttttgtttagggccttaaagctttcattctttatgtccaaacgtcttctaggagtcccttaagcttaacacaatcttatttcaaccaagaaattactctaacacgtttgaatccaagattgttcaatgttaattccatttttggcannnnnnnttgacaaaaatattttattatttcctattaatttcgactggtat

SEQ ID NO: 35890 - DNA, 2630 bp, Cannabis sativa
aaaataatttccaacagatacaccaccacaaaaacttatggcgctccagcactttactattccacaatctattctaaagggaaggagccacgaccgatggagaagcacgatacacagggcttggacttggtatggagacttactttagaacttgttggattgctctttggtccaaatccaccgatctttcccctgactactcggttttcctcctttaaaaatattacgaactatttcagagtcgtaaagggaatataatattaatgtcccaatcaccatcacctaacaatagatcagaaaccttttgcacatcattagggtgattggtagctggtcttggaatgaattcttttctatgggatacccacgggtcttcccaaatatttgtgtctttctcatcgtttataagcttgcaggcacctttctttaaaatatcttgagctttgacaacattcttccaaaactaagagtctaaattcttataggagcacttcaaaaagtgattacctttcatatatttggctctaagagccctacaacaaagcgattgattctcattgatcgtagccaaccccacttagatataaaaactctattcatctccaccactttctggaaacctagcccacctctagatttgggaaggcataatttatcccaagccttcagatataagcccctattacctttatcacctccccaccagaaatctctgatcatcccatcgaccttggacgccattcttttcgaaagttttgtcgtttgcatagtatatattgggagagcgagaccaactgtagaacaaatatatcataattgtcgttttgaatttaataattgtggttcaaaccgtaccatactatatattataaacttaccaatttttacaatatgatttttattatttttttatataagaacaaatatatgtaatatatgtatatattacattaatttttttaggcataatttaatataataacttgatgattagtatgtatgttaggatgttaaaactttgataagtttttttttgtattgttaaaactttatagattaatttttaaatttttattataattatcgataatgatgattgtataaaccgctcaaactgcactgtaccacaccgtatttttacggtgtgatttttgcaattttaagatctcgcagtgcgattgcgatttgagaaattacaaaaatcatatatgcggtttggtttgaaaaaaaaaagaagttacaacccgcactacctacaccgcgaacacccctaatatttaggtttttagaggtccattagaattggccttagagcacttcgagcttgcccaagagtttattttctctatcctttaaaatataaattttactttatctaataaattttaacattacagcatccattaacttctttattctttttatatttaatctttaatatattttatttattttcaatatataatattaatatatacacataaaaaataattaaaactaaaaatactaataaaataaatttaaagcaatgaatagtgctactccacatgtagaataacattatcattactctaaaatttatgtaaaatggagcatttattgtatgacgtcattttgataaatgtgtctattctcttctttattttagggaaaaacaaaatttagaacatctattgggagtgatctataagcaatcttaataatttctctactctatcatttaaaatatattaccaaaattctacaatctctattttacaacacacttttacagtactcctatttaccgaaattttcagaaatagattaaaataagagttaagagattaaataaagcaataaaaagtatagatgaagatttttatgtggttcgaatattaataaaccctagtccatgatttagttgtatttagctaagtagtcttgatgtattacaatagagttcttacaagcttaagaaccctaactttttgctatagtatttacacaatgaatttccaaccctttgcatgagggtataacgtagtatttataggtattgacctcgcttttagtcaataacagtgagttaaattaaagcgattaagaataattatacaataaatatatattatgattaagttaaaaaaaataccaaaatcatagaggtttggccccttgataatggtaatagcctattctcttttagtttgtgttgacttgacagtagagaagcaagaaggccttgatatctctcaaaagctcttacagtgatctatgagtattaccactcttgtatagagatttctctcatgtgttttctctgaatgaatttcatgtccttgaatagtgagatgattccactatttatagggattaattacattaattggtttcttaaaactaataagaaataaaatgaagaaattatttactttcccttattacaatgagcaaaatgggaaattaggcaagttgtctttctttcatgaaattaaggatatttttgtgtattgcaagcacgaggacatgtataatacatcctttgaaaatgtccaactcatattctccggtcaacttatgcgagttaccttcatgataaagctggtcgggtgttcagctcctacttactttgagcattagatctccat

SEQ ID NO: 35891 - DNA, 3162 bp, Cannabis sativa
atagaagacattattattaaatacttaaattgattattaccacaggaagtaaaactttatatgtaattagcgagactctatagtgatatattaaaggctaattaggaattttatctctcaaattttaacatgtgttaaattatacccttaaaattttttaggctgttaaaagttctctccaaattattaagatttttgatttaaagacttccgttcaattttactaacgtgacgattctccatgtacttcgaactttgacatttatcaaatcgtatccccaaactttgatatgtatcaaattataaccaaactttgacctatatcaaactgtgttcctgaaatttcattcacgtcaaacatctattagtaaaattagaagaaaatttttaaatccaacaatatcaatattattaaggaaaaattttgacgcaaaaatcctagttagacttttatcaaattaaaattatactgatataacacctattatatttgttaaaacaccatcttctaatgtttctcacttgaataatataacgagaattactaaaaggtaccattgatacctaacatcttccttgatgtcatatcgttattggtgtaattaaatatcgagtcttaggcaatattattaactaatcgtaaaacgccacctacaaaaaatgctaggcactactagtgtcaaatagtaatacccaatataacattaacacaacgatctcaattggaaaaatgtagcaactttcatttcacacgtgtgtagctggtgaaccatatttctcttaggctaataatcatattctgtagtcttaagtctctgtccattccttttattattatttaaaaataacagataaagattcgttagatgacacgtcgaataactttagtcttcctaaatgcaaatcctattcatacaaatgttaaaagagatcctaaccaaaaaaaattctccacaaattgactagacataaaattttgacgattctaacttttttctttctttctttctaaattggttagataaaggtttttttaaataataagcgtctatgaataaagaaaacttacaaatcctgatcattacaaaataatattcgccaacatttttgataccttaaccatgccaattaagttttaagcaaaaataaaaataaaaagtgaaattacaacccaaaaataaattagagtattacattgatacaagtaattaccaatactacaaacaaaacatgtccccttcaaaaaattaatagctgtatcataatagctctcaatcatcacaaaaaagtgtttaaggacaccattgtttccatagttagataaaggttaaataaaatactttatttctgagtttattcttcctattccactatatttcgtttggaaaaagcatgataatacttcaaattacatgttataaaaaatgcactgaaatgttttgcagtttccaacttgagctgtgaatgagaaaaggtcatgttacttaaaaaggaaataaaattctaaagcaaaaccgttccaaaactctctataaaaacaacaagacctaagaaatattatgttatgcttaaccaaatatattcttcctaaatttatccacaaaatatattatgattatgatcaaatttcaaatcccaaatcaatgcctagttgggggggcagagccagaagatgtatccttaacgaacccagttggcgaattgggtaacatcgttgcactacaaaagaatgttaaaatctgaaacaggtacaatagattcaacatcttctttggtcttacaaaaagatgagaaatatatggttaagacaggcaaaaaaaaaaaaaccataatactactactagtgtctactacagacacagagattgagagttcaattagaaaaataaataaacaaggaaaagataagaagaaaagaacctcaagccgaaaagtaaacaaaaaggctgttcatggtctgagtcaagttaatgaagacctcaaaatactaagctaactaatttatttgctgaaaggaaaagggcatagattaattttaatgttagccccaagttagacgatcacgtacgaatcccaccaaaaagacaagatgacctactatatagacaacaaagtggaccactacatatagacccactagttgagtcagaagcatatattcttttctaaccatcaaatgaaaaaagagaattagttcttgatatgttttcatatattaataatagatggcatagttttttagtctcaatgcaattcctgaattgaaagtattagttatgacaaagggtttcttccaatctagaaattaagtgaaatgaatatctgaatcgaacacaaagtaaagaagaaaaacgaaaaaagtatggctaaacatgcaaaagagataagaggcaatgaatgctctactaagttcaagtgtagagaaaataaaagaaaaggatatcattacatattgaattattagaaattattgcatcatgggtcctagaaaaagataatctatagtataatatgaatttcaaagtaaagttaccacacacacacacatacacatttctcatgtttaagtgatcccaaaaaaaaaccataaaagagagaagtttatgttcatacttgccttccataatgaatgatgacatacaaaccgttaaaaaacgaaatgctttatccaaaatctaaataggtaataaaactactttaatggaggaaaaatccaacacctaaatacaactagaaggaaaaattgacaaaacaacatgaaatgagatcaaaaaagagaagtttaagaactctttgaatttcaaatggcattgccattgccattgccatcatcatcatcatcatcatcatgaccatcatcaatgaaattttaacaaaaacaacattcttgattgacttaacgaaagaagcatacaactactagtttcatcaacaacagcattatcatcatcatttaactttgtaaactaaatccaacttaagaacaagaaagtaaaatttaaaagggcatttctttattactgtacaagcacaagccgacttcccatacctcctcggaaattattcccatttccagtgccatcgccccaaacctctccaccgccatctcctccgtgctccgagttctcaacgccctctcccttcggcaccgtcactatgagc

SEQ ID NO: 35892 - DNA, 1832 bp, Cannabis sativa
ccggtaccaatccaggttctagtcctagtcgaggttcagggctcggtcctagtctgtatctgggtcccagtcctgatctcggtccgggtctgattcttgggttcgagtctgagttctggtacgagtccgactcttggtctgggtctgggtccagttttcggtctgagtttgggtccaggtcttggtttgggtctgggtctgggtttatgcctaggttctagtacgggtctgggttctggtccaggtcttgggtcacgggtctagggttccaagttttgggttgtaggtcctggcgcaagtctcggttcgggtttgggtttgggtcttggtatcgatcctagtttgggtccgggttcatgttcggttctgcatctagatctgattttgggtctggttccaaggtcttcattccgattcttgttccaattttgggtccaaagtctgagtctggatttgggtcgtggtctagaaatggttccaggtttgggtcttggtacgattccaagatcaagaaactgactacaggttgggtcgaagcgtcgggtcgtgggtcaagattcagatcccaatcttgggtcccagtgtcattctgattccgatactgggtcctagtctgtgtctgtgtccgtgtccgtgtccgagaccgggtctaggtcgaggactgaaaacggggtcgggtcttgggtcccaatcacactcctgggtcccgttttggttctaatttcaagtttggttacccaatctaggtctgggacttgggtccaagtcagagtctccaatcccagtccgggttgtgcgtctgggtttgggtccaagtccgtgtctgggttcgggttcgtgtcctgagtcccgatctgagttataattcggcttcgtgtcccggtccgggtgagggtcttggtcctagtcagattctagttacgggaatgagactaggtcccagtccctcggtcttgttcctgggtcccaatacgcttacagtttcgcatccagtttcgggtcacggggtacgggtttaggtctgggttcaggtttaggtctgagtctgggtttgggtccgggtttaggtccaagtctgggtctagttttagtccgggtatgggttccagatccaaacattgactatgggttaggtttaagccccgggtctaaatcaggatcccgggctcaggtcctagtctagttccacttcgggttctaggtcttggtccttgtccgggtttaggatctaggtctggggttaggtcctaggtctcggtgctagtttctgaagcccgggtcctggatccaggtccccatcctggtccggttcctaggtcccagtccaagtctaggacccggttggggttcaagtcctagtctgaattcgggttcgagttttcgatcccggtctgggtctagatctaggttcgagtcctgggtttgactcttgattcaggtccgggtccgagtctcgggtttcgatctgggtctgtgttttgaggcctcgatcaaggtccccaatctaggtccgggtcctaggtcctagtccgggtccatgtttcggttcaggttctagtcccagttccaatttcgattccgtgaccggtatctggttttggtctcggtctctgtctagattggggtttgagtcctagttcgagtcaagggttgggtcttggtccaagtccagatcccggtctgcatctgggtttggctacaggtccgagtccaagccttgggcacgggtcaaggtttgggtcttggtctcggtccgaatctaactcccaagtttcgatcccagtgggtatgggtctgggttcaagtctaggttcgtatccagatccatgtct

SEQ ID NO: 35893 - DNA, 1766 bp, Cannabis sativa
agaatttaacacaaattggagaaattattgttcagtctcatacatatgaaagctgccatttttaatgattatttgttatttactcaggattatgaaagtgaggagaaattatgtatacctaatgaacgtattagtcacttgttgccgacatcttaccaagatctgatagtgagggtgtactccaaaaagcctgaattggtgtgtgtctcaatcaaactacctcacagccaatatgaacacaatctttcattctctaactatttttaattcttctatccttgtacattcattttgtgtaggtgggagctatctcggatgcttttgaaaatttccaattaaaaacatacggaatcaaaacgcaagtgcatgcgactccagagaaaaagaaacagcgtgcatgaggatgcttaaaaaaaagtctgaacaaaataaaataaaatgctacggtgcaccacaaattaatcaagctaaaataccttgggaccacacagaagcatatgatttttgcttgatggtgatttttctcaactgggattatcccaaaaaaattttgtatagacatgtgagtttgtgaactttacagttttactaaaatattgttttttttttcttgcttctgactttctcttattaaaagcaaagtgttacttctgttctgttttgaggctgatagttaggttacttggtcacttcttcttcttcctgtatgctactactacaatggtttgtctgtaataaagttggataattatgttgttgtcgggtgccagcttgaatggataaagcattaaacacccttttaaactttatttaagtagagatgttttcttttatcttttcttaagagagagagagagaaagagaaagagggaatattttgatttcagtagtaaaaaagataaaatgtggagtcttgggaaggaggcatataagattggcaggctacaaaaaaaaaaattcacgggaaatagaagctgcctctgtaatctgtatcatgatcatctcatcactactttgacaaaaaccggtgcagtgcaactctagctcccgtgaccaacacaccacaccacaccacacagctcagtcattgttattcaccctcttctttaataaatttgatgcttcattaagtcaaaaaggttaggtttcacgtgcatgttgatgtttgcagaagccaaaatagtattgatattattgttacaataatttgtgacataaatatttaagtttattaagtttaatttttgacgaaaataatatctaatttataagagtaacttcaaggagtcttcaaatttgaggttgcagtgactaatcttctccaacgtagtatcattttgaggtaatatatgccgtctttgctacagtgcactgcatatatgcagtagcactgtagcaactgcatcttttttttttattattattattaatatttaatagttgatttttgtttaatattaaaatatcttatattttattaatataataataaaatatattttttagtgtaaattttagcgttgtggttggagtgaaaatattttgacactaaatttagtaatagtgtaacactaaatttaatgtgtccttggtgatgctatacgtaagttaaatgtaagttaatgattacatgacaatttttaattagtacaaaagtgacacgtaaataataatttacacttaacgggtgtaatttagattataggccataaatactggtgtaatttcttacttgtcatatataactgtcggcaaaatcatcactt

SEQ ID NO: 35894 - DNA, 6891 bp, Cannabis sativa
ttatcaaaatcaatatctcagcaaaataattgattaatgtatatacttcaaccttcttcttcctttaacttttttaatcttgaaatataatttgaataaaatattcccactataaataaatacgaatgatttttttttgtttttttagtaatggtgcctatgcccatgccaaaataaattattatttaagttagaattttactttaatttgtattttgtagggttatattatggtagggtattaattataaatgcatagtagatgcaataatgttttgtatagctattccatcccattgatcgcggctcctaattatatagaatttagaaaaatgataaaagataccagtaatgtttagtacttttctacatattaatattattattaatctaattaagtattgagtctcacatagttcaatgtaaatatttttaaagagtatcgctaagtaatcgcaaaacgacacatctagaaagtgttaaacactgcctaatagcaatgctctaaaatttatgttgttcatttaggaataggttctatgaacacaatttttgaaacaaactataaacccttagattagaatcaatccaaccatgtatattaaaacaaatataaatactcaattaattaagaaaaaaaaatatatcaaaaaaattcattctttcctttctagtttcacctttgtaaatatattaatgactaacaatagacctatagttaattaaaaaaacaaaatacaaatcacctttaatttattaaaaaaatataatacatctttaaaaaataaaataaataagaaaaattcacaagatagaccaattttttttttttttaaaaaaaaatacataaatacttcaacacgaaattttttggatttttactcttgaaattttttatttagaaaaatacctattcagtaaaaaaataataaactatatttttttttgtaatatagttcatttataattgtattataattgtcatgaaattatttttctacagttgttttacaatttatttatagttgatttatagaaagagaaaagattgagaggttgagagagaaaggtatagagaaaagaaagagattaggtttgggttttgtacgtatgaagaatcttctgtagatgaaaaagattcttggagtgtgggagttgaaacactttaagagaactcattagagaatcgatctcgactgtattgtacatgttcttgctcaatcaataaagagaatttggtggtgttctagaactgaaatagagccataaatcacatcgatctatcggacttgaaccagtatatatctctgtgttgattttattatttcttgctttgttttcactttaggtttttacactctgttcatccatgttcttctctgattattgtacctgatttgtaaatcttgtcattgctaattgtctgattgtttaaagtctagttgatttgattttgcacctttagttgtaatttttctacaatacatatattatttatcgagtagaatcaacaaaaataggttaactaagccattgaaataaagtaggacaaaacccctaataatatcttcaactaaatagcccataaggtgccaattgtgaagtactaaaacagtatgaagaatactaaatttttatcgcgaatgaacatgtgacaggtaacacctatcaatgataaagagacaaagatcttccaacaaaaatttaaaaaagacaccctaattattcaaactagaataaaagagaataacaaactacactatgccaagaacaaatataataaaagattgattcataaagaaagaggttaataccaatccatggtcccccaaataaaattactgagcatagaaaccttacacagaataaaaactattactcccattagaccaatgggatagtgacaaaccaccattattagcaatataaaacaataaaataaacacctacaacaattaaaaataggaaaatagaaaagcaaaagaagatcaaagaaaaaaccaaatacccccacaaaagagatttaaaccacaacaaccatcaagaccacagactcaagggaaataccacgacctactagaaatccaccagaaacacagtcgatgaaggtcaaagctcccaacccatatccgcatcgtgagggctgagttaaccaatgaccagacaaaattgacgacaatcagctcagttctgcactgtgaggactgacaaaagtgacaaccgaacaacggaccacaagcccctatgactgatctcattatcctagtacaaagcccttcctacggaaccaaccttacaccaaaaactacgagatctgagcccgatggccacgaatggggtctctcaaaacctaaagacgaacaatgcccacaactaaaaaattcactattcacatcagttaacgcgctattcatcacggttgactgacgtgaatggtgccatattaaatggattcgttgttttgtaaatgggccaaagcctattctacaaacactaaaacaaaaccctacacttaaatatatcttattctctttctctttcttctatcacagatgcatgcatccatctctctttcttcttcttcttcttctcattctgtctttctctttttcattctctctttgccgtttctctttcccaccatagcccccaacagccacctaagtgcgatggatgccaatcccgatgatcaacccctatatgcgctccgactgtcagcctcctaggccatgtgagactcgaccatgagctctcttaggatctctcttttgccccgttccttaggtggttgccactgtcgaactcacgttgcaccaaatgtatagttctacctctctccctttctctctcgatctctctctatcactctctcttttttagacctggaaattttgtatttcttctgcaggttttgtcgttgatagtgagaccctaataatgttcgagcatttttttagatttttttttttgtaagaattgtattttggtttgttaatcgatatttgggtttgaaaattttttagacatgtttttggtttgttaataatgtttggttcagatggtatctcaaacataatttttttaaggtgtcagtacaaaattgacgaaaattgtataaaatatgatttttatacaattctcgtcggttataaaggaacgtgatcttttgataccgactgtccaaaatcaatgcaaaaatacatctgtttatgtttgctgtatatacgttggttatgaaaacttacatgaatagtataaatgtcagataaaaaccgataaaaattagcctttttatagtagcggccaacccccttcaaagaccttcttaaatattcttcctaagaaaatgaaattttgtctaatcttttttagaccaaagtatgtacatatatattatttggagtttttacataaaattaaactattgttaattatattattattatttatgtgtattgatttaaattgaattaccaaaaatgaagaaaaaaaatacagcgagcttctctaaagcacttttgtaaaatgggtgcaccgttacatctttatttgttttggtataaaacaaaattaatctaattttttatagtcatgtactttttaattattaattaaagacattccataaaattttaagaaatttagagtaatttacaatatagaaaataatgttcaaacagtctatttcatacgcgtataatataaaaacgtcacacgtgcaacaaataatttgaactttgtcaaacatgaaaaaattgaactaataaaacccttggaatgccaaaacagataaaagtgtatcagtgcaccatttttaaggaggtgcattgaattttttttcaaagatatatgtcaattagttataaatacgtaatttaattctataaattatactattcaataaatattgttattaatattgttattctataaaatatacattcgaatataattactcaatcgacataaatatttttgctgagtactttctagatgtgtaatttcataattaattaacgatattatttaaaagttattatatcaaattatataagactcgaaatttaattatatcaataacaataatattaatatgtaggagggtactagacaccccttatactttttaacattattttttttatatatatatatatatatatatatttacttagtataataattgttgaattatcaccaaccatggcccaattttaatgcactgaattattaatagcatttctaattaggatgctttaaaaaatatttgatgacataaatatattcttaatatttttatcattggagtcaaaaaaaaaaaagtcaaaaaaatattattgtatgatatctttatatcttttctttcttattttattattatttttttgtaataaagtaaaaaaaaaaattattatttaatatatattaaaaaaaataaaattattttaataaatttttagagctacttattattgaaatattttaaaaaagtgtcaaatataatgtgaaaaaaaataaaatattatatttttaaataatttgtaaatttttaaacaatttaagaatgtcactgttgaagatgttctaatcgtcgaactcatctaccaatcatatgtttaaaaacacgtgatcattacagtttacattaattatatttgtcagaacgaaaaaaaatttaattaattaatacaatagcaacatttaattgataagtcaatatacaataataacgtaaggcaatgtataacgtggacaattcctatcctttaattgatttctatagtgactatacattcgctgtattaattgttactcaaaatcaatatatatataaataccaatgttatacacaaatatatgaaactttgttttgcttaaatttcttgctttatatatatataaatatataatattatgaagatgaagtttgagaatatggtgaaaagtgaaggtgttgttagggttttaacagttttgattttgggtttgggagcttgtttggttggttctaattctcaaaccaaagtaattctcattaggaaaacagctactttcaaggacttggaagctctctagtaagtatttttatagaaaacaaaccctaattaatttgatctctttaattatcatcatgtagttcttcattagtaatgaaatgatccatatatatattaatttaatttaattattggattaattgatgatgttgttgtagtatttcactatacatatattgtattggggctgcatacaatctacttagggtttgtaataattgcttccatggcaacttcaaaggacccaacctccctttagcatgggctgctctcttcttcgatcaggtatataatatttatatatatatgcactaaatttacttaattaatttgagtatcatattaattataatagtaattacttttaattattaactataggtattttgatatttttgagtaagttttattattattattattattattattattatttaataaagaatacagatctacaaaaaatgattttatgctagttttaattataacaaaatttgtaataaaaaatgaaaaaaattgtgattaattataaatcatcatttctatgttgtgaataaaaatcagtggttaaaagtattttgtcacaaaaattataatttgttgtgattaaatttatttttaattataatactagttgagactaaaatgtaaattagtgacaacttgtatctaaatactatattttggtcacaagtaactttttgttgtgactaaaatcatatttagtcacaaaaaatttatactattactataatttgtcactagctatgttttttgtagtgatagttaaattgatccatataaacatataatatatatgtaataaattaaaaatagtaactaattaaaaataatggattaactctaattaaaaatcatggattaacgtatcaaaaaaactaattaaaaataatggaattttgcaatataatgttagtttctattaatcttttttttgacacatgcacttgattatatattcgatctacagcatatatatcacaaattcttagttaaaaaaaaaatgtaactattgtttggtaaaacaattaaattcataatttcttaagaaaagtaatattcaaaatttctattttcaaaaaatttctcataaaaaaaaaatcacaaaaaagaaaaaactaaattcaataaaaatacatgcatttgacctcttagcttaaaataaaactatttttatcactataccaaacaatattaaatatatatttttatattttattattttatttatatattaaaatattttttttttacaattttgagatcttgaacgtttggaggctagctcgaatgcatgtttggctcgtctaccctaagaattgagctaggccgggccaaccaattattaataaatatagttatatatatggcccttataatttattatgtatttaaatgtacagattatggtttatttaacgtacggagtaacaacagcagcgactcaagcatcaatcatagcgataacaggtcaaaataatttccaatggatgaaattatgtaacagatttacaagattttgtatccaaatgggtggagccatggtgtgtggttacttagcttgctttctcatgattttagtcacatctttctctgcttttaatttattttcccattattcaccaaaacaatttctcctcttaaagcccataatctcatcttcatgatctactcactaatccatcattattattattaattaattacatatttaatgtgtatgtacatgcaaattgcaaagactctcacatgatctattccatctatgtataattagaagatttgcttattaatttaatagcatatgatt

SEQ ID NO: 35895 - DNA, 856 bp, Cannabis sativa
catagattttactattttagtagtatgtgtgttgtaaaaagaatcgttatatatttttttaaaaaaatagaaaagtaaatatatttttaaaaaatattatatataattgttttcacttttttaatttaaaaagtaagaatcaaaatttagaaatttttaaacaaaaaaaaataactttcaaaaaaatgttaaatgtatttttttttttccttaattatagtttatttgtattttctttcattaatattttagactcgaaccctaaccaagacccaaaccccaaccaagctccaaaccccaaacttagacccccgcctcggccacaaactcgaaccctgaatcgagactaggactcaaacccgacccatacagggacccgaacccaaacctcaaaacgcgactgggaaccgaaccaggaccccagaccccgatcttgaaccttcgatgtcgaacccagacctgaccccaaacccagaccctagtggcgaccctgacctggaccgggattcttggactcggactcgaactcaaaccttggccctagagatgcacattttctccatagggatgggttccgcggggacccacccctaatggggcgagaattcccctgctaaatggggaacaaggtggggacagagattattttgtccccgaatgttaaacgggggacggggatgacactccccgccccgacggagacacgtttaatattttataatttatgtatgtttttttttagtatattagtatctttttatgaattttaagttatgttttagataataattagtatattgaataatattaaatgtgtaatattttgattttcatatagttaaatatttttatatat

SEQ ID NO: 35896 - DNA, 1578 bp, Cannabis sativa
tttttttgcacatattttgtgattaattgaaataatgtatacaagattgtaaaatgcccaaaaaaaaattaaaccatgagccacaataagtaggggtgtaacccttaaaaaattatatttacatgttattataatagtttttctttctaaattatactttttatttttcacaatttgtttttctattttgcaatttcttctattttatgtatacatggccactcaatttgcaagaaccagattaatttgaattcctgaaaccttaattaaaggcaatatatataaactataattagattgaagtacgtacgtacgcataggctaattcaataacaaattaagaaaaaaaaaattaatacgttaattatataaatatgtatatcctatattataatatgggactaaatattaatccaatttcattcaaaaaaaatatatatattaatccaattaatattaatattataattggctagctaaacgtgatgataagtactgtgactttaacaatggtttcttactttaaaaggtaaaagatttagaatagtacatgcatgtatatggaattgttcattattagataccagctaggttaaccaatgtcatgatcatagggtttattattcttctatatatatattaaagaaataatgaaaaaaagaaaaagaaaaaacagttaatttgcaaataatatttttttgacaatagtatatagtgctggtccctcgacatatgggtcagaaagtagtttgatatattttataataattgaattacataaaggttaattatttttgcaaattgcacaagctaatatccaaaaacagccacctaatattgtctgatttattgtattagattttgtttttgatgcatgtgtgttatgcttatccctaaattacctcctttttctttttattatccattatatattatttcattaattagttatatttcggatttttaattataacgacaaaacagctaggcaatcacattcacaactgtatgagctctctacctagctaatcataaacatgaatcgaagctagctaagcaaaactaatgattaattagagtatttatataaatgtttaataataaataaaaaattcaaaaaaaaaaaaaaaaatttcatcacatacatatataatctaaatctaaataatatgtacattgtaggtttgaatttcggcaaaaaaaaaaaaattaataaaaatatataaacaatatatatatgcattatttttaccaatatctctcattattagctttggagaaacatcaatgtttcaaaaaaaaaaaaaaaaaaaacaacgttggtgggaggaaaaataactttcgggtctatacgagagaataatattaataataataaaaatatttttagataataataataataataatgtcttaattattaatatgtctaatcaactaattcattccatgtttttattttgggcaagtcgattattcaaaaagttaattagaattttttttcttgaattttcacatgtattaaattatgttgaggaaattacactctataccctttttatattgtcctctattatt

SEQ ID NO: 35897 - DNA, 1418 bp, Cannabis sativa
tacctatgtcataaagattaccataaaagacgaaatcaaaagaagtaaaagtgttggattcaagtattttcgaataattccgttttactaacacaagcccaacatgttgattgcctattagtattttaaataaaagatgtatctaacaattttaatagttcggaaacttttgatggcactgaaaaatttaggggcaccatttggtacgtgtcgaaattgagggggaaaattctaattagcttctcagaaatacatacatttgtaattagttttgtaatgagtacctatgtcataaagattaccatcaaagacaaaatcaaaagaagtaaaagtgttgaattccacatattgtacttgttgttagtgaatttaccatatacatgattgatacatgagatattcttcttggtcagattaatgttgaagcttcacccttgattgaatttgattataggtccaggtagaacctcttcttgccagatcaaatttgctgattacaagggatatagagtgggcaaatcttgtccttggttttgagcaagtaatatttagtttgaattctcttgtcctagattgcatattctgattttttatccctttctaaaatttcatggttcctagcaatatctttacatttgactttcgcaggaaaatcggtatgccattgtcgatgtgtgctatccccaatcagtaagtgtttatttcttcttcattttactgtcatgtgttcttagacaatgttgtgagcttcaaaagaatgtatagtgttttgttcgaaagatttttgaagtttctaatacttattatgattgttttgcagcctgtcggtttgattcgcgaacaaagtaatgtccttgctagacaggtaaaatatgattttgatatgccatgcttgtgatttgtgtcaagttccgtatttgtttccttaactcgatatataggagttagaaaacatgatttgatccatgttttgtggagtcaatattcatggtgatgtatgtatcttcaacaatctatatgaaccgatatatccatctttgataatgtaactatctaatggatctttttcattttaaagtttcttcgcttgaggcgcccttttgttgctcatgtaactgatgcggcaggtaacgagcttttcaaggtgagtatccttttttacttattttgtttttgtatttggtaggaggggtttttgggaagcatttgatttgattttttggttcacactgtattaggtacgcaggccgttttggtggataaacagctcgatttatgcagaggtcaacggaaaggtaagcctatttgctagttgttcttacctaatatttccagtgtattgcggtattgttgctgatactgtcgatctttatgctaatttccaggaagttggtgtggttcatcgacgatggcatcta

SEQ ID NO: 35898 - DNA, 1289 bp, Cannabis sativa
  modified_base (342)..(377): a, c, t, g, unknown or other
ctaaccgcgtccttcatctcacctcagagtcagtcctgaatactatacaattgttagaaaaataaaaaaaataccttttaaaccaatacttttctgttacataacttttttttttttttgaaaaaactctttttatgaaaatatcattaatatccattttatatgaaaattgaagaaatagagaaatagcgggtgattctacaatgcatccccttaaaagagatgtacagatgcaccctctacttgtttcggcatacagaaaaaaaatttactctatttttttttttcatattcatgtacgttatagctatttaaggtatcttataaaattttgagaaattnnnnnnnnnnnnnnnnnnnnnnnnnnnnnnnnnnnnagtctattttatacgcgtataaaataaaagtcaggcgtgcaacacagtgcttgaacgtaattttcagcatgttaaattttttcgaatttttttaaattttgcaggattataatttacatgaccatgggaaaaaatttgactaaaaaattatttctaattataaatcagataaagacgtatcagtgtactcttttgaaagatgtccattcaaatatttaaaaccgacaaaaaatatatataaattgtaaaatcatatcaacaatttaccattgccagaagaaaatcaaatgccagtgttagggtcaccctgaaccagatagtcgtgtccttaatttcggacaaggacagagtattacttatctccaaacagaccgatactttaggtctcagccttgcccctttataagcctttcaaattctcaaactccacatccaataaaccctaaccctaattaccttcttcttcgcaatttctaatattttgtttttcatgattttgtaatttttttgggggattttattttgcatagatggatagagcatcagtgatgagtccataaaaatgttatccttgcactttgattgtcagtgaagaatctaatggggaattttttctctgaggtgctctcgctcactattctctcttttctttttttctttgtatacgcatattggatcaatgatgtttaaattactgcgttatctatctgcaatttcctatcacggaattgaagacgattatagttgactgagatctagttttcttatgattctttttcttttttcgattgcgttttttttttttttttttattttcttcatttttttgttacattatgttttctagatcatctttcagttatatgtgacattcgtttctcacttatctgtggaaatataaggaaagatgaa

SEQ ID NO: 35899 - DNA, 1709 bp, Cannabis sativa
aaaaagttacaaggcacttcaacaagcaagtcaaggacaagaaattcttcataggagacctggtgcttgaaagagtgttcttgaatacgaaagatccaacagtaggagtgttcagacccaagtgggaaggccccaaccaagttacagagataaaaagcaagagatcctacaagttgggaagatacaacgagaacatggagctggttctcctacaaagatattggaatgaggagcacctctgcaagtactaccagtgaccagtttacagaatgctactcttcagtagtagttcaccaactcattagtaagagctagtgtaaaagagctagtgcccatgtccttttggcatggtcgccatcgttcttcaatgatggcctctgcttggcatgtcaggcaaggatagccatttgatttttagaagcaaactttttattatgtaagcttgtagattcaatttatgtaagttgcagaacaacaaagaaaaattaatgaataaaaataatgtttcagttcaaatatgttgtgtctaaaccacttgataataagattaacttcttaaagttattcttttttagttctacatgcgtacaacaagtagcaccccaagaaagttcccaggctaagtctatgaaacttggtgaattacaagtgaccaagagaccgtaagtctacatgctcacttggggggcacccacaccgtactatgcatcgaactattacagagaatttatgcagataaatttaatgcttagtataagctactaaacatgcctctaagtcaagtgccgacatatttgagcttgacataaagaaaaataaatctggatactaacatgttaaggtaataagaagatagctaggattaaagactgccttgtctgtcaggtatccatgataaaaagctttagagctaaacaatagtaatattcaaaaatagagtgcctataggccaaaagtacaaacatgaaatccctaaggctgaaaataagtaatgtttaaaaataaaaggccaataggccatacaaaacatgaaatcaaaatgtctatgcaaataaaatcataagtctgatgtactaataaagtgaagctactcgtgtgcaggtgcaggtggagccgggttgtaagctgaagtgtccagattgctaaagagtgggctggccatggcctctgcaggctaactagccatctggtcaatgccctggccgaccacctccttagtgggtgtgctggccatggcctcatcaaactatcttgatgacaatccttctggatggatggtggtctgatttgtctccatcctactctcatacaactctttcccttgggccagtgtgctctcaaggaaagaatatcccatgtaggaaagatcaaccttgggattgcatagcttgatctccaaagataggccatcatactcctttctcatggcctgttggccatcaaggacaagctttagttcttctttgctaagcttaagttcttcgttgctcctcttgagttctgcctctagcctagagacgtcagcatcaagtgcgttattctcttgggtcatggtgttgagaatgcgctttaaaccaaaaatcatgtcctgcttttgttttataagagcctctgaattggtaagggcctcacccctccctagaagctcagcctccttggtctttgttgctctcggagagtacctgaggacctaacggtctccctatgcc

SEQ ID NO: 35900 - DNA, 2248 bp, Cannabis sativa
tatatatatatagttatttaactcaaagtcaattatgtagtttaatattacattaggtacttaaaatatcattatagaaaaatggctacatatttatagagaagtgctcaaagtataagtagtgctaaaagatataagtagggtttagctactttttaagatttttatattattcatcaaaaaaaaaaaaagatttttatattattattggtataaataaatatatcagatttaattaataaaaatataatgtaataatttttataaaataccgttaattaatctaaggcgcttgatattattggtatactaaaaatattatatttttaattcaaaaaaaatatatattatatttttagattatttttaaaaataagaatgtgaaaaataatatagaaaagaaataaaataaaataaaatacaatatatttaaataatatggaggccggtttttgtattaattaagcaccacaatgcttatattattaacaagttaatgtagaattttaattaacacatataaaaactaaaaagaacttcaaatactacagagtgaccaatatataatgtttcacatgtcatactattataatatattattaaatttctcaaatgtatattaatttaataaactaatacccaataatattaacactctatataatgacaaatattgaaactgacaccgtatataactaaataagcattagttagctacaatatataacaaattaacaatgtataattaattaatgactacatatatatgattatttattataattgacatataatatatatgtatatgtaggatgagactttgaaaggggatatgaattcagtggacatagcaacaccaaagaacttgaaagatcttgagaataagggtaaggccttgctacagaaaccagtctcatgcaagagcttagctactggccttcgtcaacctattgaaaatggtggaaccaatgacgaatcactcaaattgtacgtacctttaattactactaattattattgcaaattaattatattaaaataatatacatattatcattaagtatatatgaaccgagtgctagattctcaacctttagttgagaactaatgtctaaatcatctctcttagaagaaaacagtcagattcttgttagggcttaaaaaaattattttttctatgatccaacaaaacttgggactaaccctgatgcttgtaagctggttctagttttgtggaaatctaaacacatgtacatatttgattaaactgatgtcccatagtagtgaccaatttgatggttttgcatgcatgcatggcaggtttgcaaaaagtctttcagatgaaaagaaactgagaagaatcaattatgcgaaagctatggcagcagctacttctacaacatcagctacagtagttacagttacagaaacaactaccgttactgctaccttgtctacaaccacaacttaaaataattcttcgatcgcaagtttatgaataatattaattcaagccaacgaataatgtttgttaatttttctatgtacgatatatataattggtagttgatgattgttattatatatatgtactatcccagttataattagatagctcaaatagtactgaactagttgctcatatatatatttgaagtattgctattggccaaatctgcagctagcactttttataaggaattaaatatcttaacatttgttagcaatattttctaaaaattattttttcatttacatgggactcaatatttaatattacaccattatacactgaggagggtgctaggcattgtcttacttaccattttgataattaacagtctaattattattgttatataattataaaacatatagttttaaaaagaataatacactatatatcttcaagttgatatgtgttaaatcataattaattaactgatgtaatatgtattttttgtattcaatttttggcttttctctcttttgctatatgtattggacacgtacgtatactttctcttttactatttaactactgtaccagtccgaatattcaagaaatacaacattattttacccattccttctgatatggtaccagaaccataacagctgccaatgtcatcatctacagtgagtgtaggaaatttaagatagaaatttactatcttgtccctacaccaacaaaacaaacagatcagtaattaaggtcaatttcgacctttcactgttcaaagacttt

SEQ ID NO: 35901 - DNA, 2184 bp, Cannabis sativa
  modified_base (567)..(585): a, c, t, g, unknown or other
tatgccaaaaatagaattaacatttactaaagcgtaatcgttatcggaataaattaatggaagaaatgaaaaggaataaaatgttatgaaatcagaatcactattttaacatgttgtttactaaactgaccgaaaacagaattaaaatcatttattttgtttacatcaataaggaatggtagtcggaatgctttaaattaaccatattaaccttgacataaaaattatatttttcttctatttattaaataaattaatttatataaaaaataaataacttcataaataattacataaaaaaataacttaatactgctaacaaaatcatacttatattattcaatcaaacacatatgaccaaaccataaataaaatctccacatgacaatgttctaatgtgaaacataaacataactagaaacgcaactgtctagtaattataaaattatgcatcgttttgcaacatattaaggatatatatagtagtttcatctcatctgatattgcataaaatactcgcatcaatggaagttctttaactaatatgttggttgcttgaatacattnnnnnnnnnnnnnnnnnnnaatcttgcttatttctgtgaataaattggtttgcatctcagctgcatccttatcgcatattgcatcaattattccttgaaacttcgggacaatattagatatagaatctgctaatgcaccaacgtttgtagaaatatcatccataaccttagtttttttattcttaccatgttgttagttactagtagtactatcactagatctacgacgcatatttgttggtcgctaatattggctcaggtgttctccaaaaattctttctggcagcgaatcattgcttttaaacactcataaaagtattttcttatagttttgtttttcgtgatctattgaaactaaaaccaacaactcggttcttatgatggtgcgctaaaatatatagaaacattgctacaatctcctcgatagagatatttcgtgtctttcttagattttccctaatactgagtatgtgacataacctttgaaatgtttgtctatccattcttaattgtaaaacacaattgatatcacttgcatacaccaaatcatataagttttcaaactgtttgtagactcttattatagataatggtcgattgagacatcttttagaatttttccatgcataagcactcacaatagcacacactgctaaaataatatctaagattataattaaatcctgcactacaataattattttttactttcttgctaaacttaaacgagccattgatttacaaaaaaaatcaaagcaaaaaaataataaagaaactaaattatatgacaatattgacataatgaataatattttttcaattatatgtatgatcggcagacatatatatacatataatatatttttacttcagtgactaattataactatgtatatatagaagaagctttcctttcctgggaatttaaaaaagatcttaccgtgaggtatttaactgagtattatattattggtaaagcatacaatattataatagaatcgtatatctttttaattgtgggatcttttttgtcctcttctctgctaatttttttgtggcacaaatcaaaatttgccacctcagttaaaatatcagctcacaatgggtagtggggatgtatagatctctattttttaacttataattttatttatttattagcttataattttatttatacgcttgtgtttacaatagttgtttgaagaatttttatatttctttttaatgtttatgaagtatttttgatgatagagtcattctttgggtcataaaagtcactagttacttaagaaattttatgaaaactccattgaatcctaatgtacatacactgaggtattttttttcctttctttgcttctaccgtggatattgacactggtattatcaaactctttcactccgttgatcttttttttattttattgaagctttgtttcattgatttattagatttaaattttattgtgtcaaaagagaagggaaaatttatttattatacttaataaatatctctataataaaaaatatctcattaatttttttatgcaatattatcctaataatttctcattttacccataaaaaaactcttaccatttattttttttcaaaa

SEQ ID NO: 35902 - DNA, 2236 bp, Cannabis sativa
ccttctagaatgggccttcaagactgacagtaagctatctgggagtgtacctccatattgataacaagctatccgagagagacattaattccatacgcggtacaagcttatctggaagtaccttccagattccacaagcccttccgcacaaggctttctaaattcacattaagttttcagtatctactctccggattaagagtttccatcctagatgacaaaacttgaaaccataactaaaaaaattccaccttagtttcaactcgaaatcgcttgacaaatcattattttaaatgcttttgtcccctcatcccttctgggctcagttgacttcaatcagctccaggcaatgctcaaacttaataattggcactacctagttatcatatcagaaggattgtcttcagttggaaccttggcagtatgaaatgaagtttgatatcaaagtgcttagtacattcatggtgcacacaatttttgattaattgaattgcactctgattatcacaatgaacaataataactttttgattgagcttcagcccttccatcaacccagttaaccacagtgtttccttaatcgcctccgtcaaaaccatcaattctgcttaagttatcgacagcgccacaaacttttgaaggttcgctttccaactaatagatgttccaaataagggtgtacatcgatcaacttagttgggttatagtgtatttttaccaatccaatataaatatcgggttgcaaatatctaattgtaacctgtccaatgaaaaaatagaaaaagtgtaacttgctcaataattttcgtcggtttgatcagattaacccgtttaaatcgatctttattttttatttttctattattgttagttttcagtgttcaaataattcattagaaaaaataaatgtatagtatacgtctttcaagatttaaagagttatagtttaacttaatgttaaaaataaatatcataaattgaataaacattaaagtattaaataacattttttaaaaaatagaataaaaaaaatgctcatatgtaaattttaaatttcaatttcaatattcaaatacatataaaattatcaactataaattctaaattttaaattaaacagtataaaatacaaactttaaatgtaaaaatatagtttaactattaaacgtaatttatatattatattataaataattttaataaaaaatatgttaatcgatttattcaagttatttgagcaggttagaataatattcaacccgtccaatatatttactattcaggtcatggctcgtttttggtagaaaacaactttcagcaaaggcaatggtataaggggtgagcaacggtcagtttggtcgattttttattcaaaaaaaaatctaaaatttagttttcaattttcatgattataatccgaaaaccaacagaccattatataaatgtaaaaagaaatctccatagcccatgattctcttgcctgagcacaaccgactcaccatgagtgactgccattgcttctaagatgagaatagtaactaagactccaacaacgggaccatcggaggatgatgttgatggaccatgcatggctcactatgtgctgctgcgacactactactaccctcagcggtggggcttgtgatgacattgttaaagagattaattaacacaagctgtatatacatgaatccttattacataggaaagttatgtaatgaggattacaaatttccaatagcatactatatttctagacactctcggtatcaacatggttgtagcatttctaattttctaatttttgttaatcttcaatatctttttgtatttagaatgctaatttattttaataaagttgatatttcaattcaaaaaaaaaaaaaactcattgtatatgaaaaataaatgtaaaagttcactactacaaaaatgggttttcccgacgtttttaaacagtcgtttaaagtatttccgtcgatttttataaccgtcgcctatacgaccatcgtaaaacgagtagaatagacgacaattcaaaaccatcaataatgtgggtttcccgacagtttaaaactattgcctatcccttgttataggcgaaagttttaaaccgtcggggattaaaaaaaaaagagaaaaaaatatatggcaaaaaaatctgtattttctgcattaattttgtaattttacctaaattaaaataaaataactaattaattttgttacaataaca

SEQ ID NO: 35903 - DNA, 1402 bp, Cannabis sativa
aaagttcagggggcatgatttaagtacatgtcaaagttcgggaggaaaaattgctaattagtcttttttttagtccaaactctaaaattttgtttagtcatttcgtacttagattaattttattgggatgaaccctaattttattttgttcggtcaataattgtttgattaataattatatcaattttatgaataattattgttaagatatttagaatatatatatatatataaatatttaaaagaaaattaagagatattttgatttaattaatactcatcatggtaataaacttatgagattacttgaggaaatactttttttttagaaaaatatacataattgttatcggattttttttatactctatgttaacattttattgtctagatttaagagatatttctttatttttttatgagttatttttcttataaagaggtcaatcaattgatttgcatgctttacatttttcactataaaataagtttttggaatggaaatgatatcccattgttgtatttttttcatttcaattttcttgtgtttaatttgaattactatcaatttttatataaaaaaataaattaagtaagatatatactaacacatctctatattttttgataaaaaaattatcattaaatcagataaaatccattacatcatgatatatatggctaaaaaagtagaattaacacatccctatttctagctacttattctttttattgcttttgcaattagaataacttaagagttaatctaattttagccattataaatttgcaaagcaagtatatattcatcatcatgatgagttaagaataattattagaacttattactttagaattttctttttctttttatttttttttttaacaaactttatataatgaatatttcattaatatagtttgtaaacccaacaaattaatgtataatttattttatttcatcttttaacttatttgaataaatttattggtacacttcacattgatggaatattagtgttcggactatatatatatatataattgatagctcatagtaatttatttatttatgattatttttttatatatataagaattttcaaaggttgttttcattttcttatatgaatatatggattttagaaaggttcttaaaataataaataaatgtataaacacttcaaacaaatatgtcaacttattatacaatgatataacactctactacaagactaaatttggtgatgtaaactctttgaaaagaaaaaaagatgcacaattaatggtaatcctacacctctatcactatccttattacttttttcttttttatttgatttttattacatttttagaaagtatttattagctatcacaatgctcaaaaaaaaaaaaaaac

SEQ ID NO: 35904 - DNA, 991 bp, Cannabis sativa
ttaagtttagagcactcacaataatcttttataaatgaaattttttaatttattttagcaaaatgtaatgaaaaaagcttccatcagctcttttaaattatatatataataaaaatatactcaaattaatacaacttgctttacatgtaaagaatgaataagtgttttttctatgtttagtttaataatatataaataatatcaaaattattattattatttttgattcaaaattattattctattagtgtagaaaataaaaataatattaatttaatgatgtggataaaaatattaaaaaaaaatgtattaatgtataatgtattttaaaagtgtgttttaaaataaagagaataaaattttaataatgtattttaaaaaataaagtaggaaattgttgggacttagagtggtttaaaaacaagaaacgtcaggtgattcattcatatgtgatgcccaactaacgtgtagggtgcaggaccattgattcgttctattcataggcccagaagacagcccaatgtggattgggatccatgggctccattctcatatgggttatgagatcaaaaatcttttagaaaaatgtcaccaaattttgcataagggaacacataataagattgaatcacaacgtaatcttgcatgatgtataaaatgtaaatcatagcacgccgcatcatcacacacttgggatatgaatcatgatcgataagtaaaataatactctttcaaaaaaaaaaataaacaattctttggagatttatagctacatatatatagagaatggaatccttaatttaatttagatttatattgaaattgctttaatcatataaaacggttttatgatgaattagtgatggctaagtcgggttgtttgttggtataagtgttctgtatttggctgaagtagttagtataaaaaaagcgttaagctagattaaaacttaactacagcgaaaagtagagctggagtgagattgctttg

SEQ ID NO: 35905 - DNA, 4433 bp, Cannabis sativa
  modified_base (4388)..(4396): a, c, t, g, unknown or other
atatcgttttagaagttcatgattaggttgttaaagacatacttgttagtaaatctagatcgtggtaaaatatattccaacacttttatcataccatgaaggttccaactcttgaaactggattgatatcataaaaaaggagtacaaattgatgtgagattataaaattttggtattttttcttttattataaggtgtaaaaccaattgattataaataaatatttataatccagaggaatgcaaattgtaatgtggagagatgcacattatgttttgtatgtaaagaattactcataaagcatatattcattttaaataaactttcttttggtttaattgaaagattatttcaggacaagcatgacgctaactgctcattatggtcttgagttatatcaaatggattattaaagtgttatatatcaattaatattgatgacaaaagttatgtggtgcaaccaaaaaattttgtatccaaagatccaaagaatgtggtttccaaattaaggaaatacaagaaatgttacttttgccagtgcagttcgctactgtgctggtaaaagtaacttttacaagcgccagcgcatctcacaaactgcggtgacaagttttaccatcgcacatttgcagtggcaaaagtctaacttttaccaacgtatttacgtgctaaaaaaaattattttgtcagcgtttttcattttgtgctagcaaaagttctaataccaacgttgatttgccaaccccttttgccaatacatcaaaagtagattctattttgccagtgtaatactaaacttttgccagtgcaaaaatgtaccgataaaagtaacttttcttgtagtgtatgtgaaaataattacttaaaaacaaaagtcaaattaatacggaagcctatcgaaattaaaactttgacaactgaaattaaaaaaatattagattggtagctggaagtatgggtccgatctctctgattgctatttttctttttctttttttagaactcttttattgctacgtcatgtgccttttttttcagaaacttacaaaaatactgaaatttggggtattttttacaaaaatattatcatacggaaatcttttcaaaaatactgcattttcataaaacactagtaaaacacaaagtagaacaactcaaaagaatagtagaacaactaaaaaaaataacagtacaacaccagtgaaaacttaacacaaaatactgcagtatgaaacttattaaaaacacagtaaaaaagtaaaaaaaataccgcctgacagtatttttgtaaaaaaaattgcaaaagttaatatactatgtaattttcctttttttttttaaagttatatacatttctcaatctttattttctcacaacttcaaactattaattgtttatactacaaaaaaatatacatataccattgccacctatttttaagacaataattttaaaatgttagaagtatatatatttttttggtcttcactaacacaataaatatcataccaccgaaaaagtaatattttagtttcatttataatatattaagaaataaataactaaaatttaaatttaaaatttcaatatactactaattttatggattactataaataaaatggcagtggtaactattagattaattttaaaattacgtcctttagcgtaaatttttctattttttataagaataattacataaaatactattttttgtacaaaaaattacattttttatgtttaaagattttttttatatttttacggttttctatagaaacaacacaaaaataacaaaaaacctacataaaaataataggaaaataatatcaaaacaacaactataaataatatacagataacaaaaaatttaacaacaaataacaagagtacaacataaaaagattgtattttttttaaataaaatcacaaaaattgtaaaaaatatttaaaaattccatacaaccatatttttgtaatttttattattatttttgtgtatttgtaaaataatccttttttatttcacaagttttgaactactattagatggagttaagttgagtaagatgcaaagtttgtttggaattagttaaggggagagagagtaaaaaaaaatgtttgtttggttagaaggaaaagtgtggagaagaggatcagtggggagaaaaatttaaggtggaattttttttaaaaaaaataatccttcaatttggagaaaaaatagagagaagttttacaaaataaaattattgttaaaattaccaatttatttttgtaaaaatataattacatattttaactgtaactgcaacaaaacatttaaacattattttcataattaaaaactactccaaatgaacctatttatcacttttttataaggtggatacaacatactaatggccacatatgttaggaaaagttaaatgaacctatttatcacttctttctgaaaatgctttatgcaaatcaaggtcctaataatcttcataatcttcatataaaagaacaatgaattttctgtacaagaaaagtgaaaaatgtgcaactacttcttttaggggaaaacaagcaaatgtaaacttaaacctacctttatatctattgaaaggctcctctaagtgtctagaatcagtaaataattacaactgtggatggcagtagaatagatcataagcttcttcgagattccagtcactggccttcaaagcctacagcacaactttttcactgcacaaaataaaattttcaactttctatgaattaaaccgcaaattaaaactcacatatatattggaagtcattaaataagccagaaaaccaacaccattaatgccacaccagcaaatttggggtaataaataaaagataatgacaaaaaaaaacatgtacaatgatatgaccaaggaaattaaaacacataggaagaaacaacataagtatgcacaatcaaatcatatcgaaaataacaatatgacctccaagcaagagcaaactatacataattatttcttcatttttcatagaggagtatttgttccccgattggataacaaaataggtagaacttcaactcattttatctaagagtgtcaaatgaaaaaaataaaagtacattggcttgctaaaagaatttcgaaatagaagttgtcatgtgtgcgtttataaaacatgatctaaaatattatacacaagatatatattattaaaacatacgttaacaaataatatgtacccatgaaagaactttagctagctcaaaagaacttcaaaacagtaaccatcttgcctataaacctacacaataattttataatcatataatgcaatagaaaaaggatagtccacaagagtttctccagagaaaagttcaaagaagtccaagtcatctctaagttaatcataaaggataaaataataaaaacaatgacacccacaaagttatacatatagacacgcattgatgtatgcattcaatttcaccgaccaaaactagaaattggtgcagagaaagaaaaagaataaaactagagctcaatcagtaccgagaagagaacataaaaggcttaatgtatcacatataaaaactgacaatacaacatagccaaagtgtaaactttgtatatacctttgtcaatttaaagaaagtctattggatctccagctttctatctaatacaaagtgaatttaaaatgtaattcactcttgaaaaaatcacttccattgacactatgttgggaagagcttaacattttattcacaaacatagctgcaaatgaatagaaaaaggtaatatggtggagccgagggaaaaaattaccgtacaaatggcattgatttcacatgaaagaaacagaaacatttttattgggccaaaatcaacaaattagaacaaaacctcctataattcattattaacacatattcatactataaaactctaaacaaaacagagaataatttgataaaaactcaaacaactagaaaaaaaaaatttcatcgtaaacacaatacaatacaagtacctatcgtgagtgtaattgtttatccgaccaacgattgaaatggaattccaactctccgacctccgatcagtagtgaacgaacgagcttgataatatttctagggtaccgactaatgagactttggttttgtaactggctctgggcctcacctgggcttctcatattggcctaacacaaacaaaataaaaaaaaaaaatagaagaaattagattgtataaacactttatttcatttattttgatttttacctttatttttagggattatttcacaaatacacaaaataacacaaaaaattaaaaaatacagtttcacaaaatttaaacatttttactattttttttattttatttnnnnnnnnnacggtctttttatgttgtactcttgttaatttgttat

SEQ ID NO: 35906 - DNA, 1278 bp, Cannabis sativa
  modified_base (45)..(60): a, c, t, g, unknown or other
tctttgagtcatcactcgaggacgagtaatgttttaagtttgggnnnnnnnnnnnnnnnnaataaagagttatttgtcatgtttttgagtttaatttgtgtgtatattttacttatatttagttcttttcctttcattttgtgagaatatgtgttattttgtatttttatgttctcttgggtaatttagagttgttagtggagtttattacgttttatttgagttttagtgaagaaaagagcctaatagaaaacatgcaagttttgctgaagttttgcaggaattttgctgtagaaaaactagtaggaactaaatgttgagattaatatagaaaaaagataacgtggcaattcattaattgatgtggcaaaaaatagctaaggtgacataaatacatgtggattgtggctgatttgtgaggaagtctctagaaaattcccagggcacatgtgaaattgattttaatgaaagatatttttttttgaaaagggggagaagataacctagcctccattacaccatttagggggaacacaattcttggcagccaccattattgaaaataccaagaagaatgaagaaaaagaagaagaagaaaatgagtgcacaaggaagaaggaggagccatccacatagttttttctactcgtttaatcttttgtattttatttttatacttctttatttttattttgggtatttttgtatttttgagcatgaactaatttcttttagttaacactttcaatgaaccttggattgtgaattttgttgatattttatgaacatttttggtaatgaagttttgttcattcaaggatacttaatgtttgtctacctacttttgcttgatcacccattgtagattgttagctaatcttgattttggaaaaaataagattagtggaaatacttgaatgatgcaagattatcaccttagaaaagtgtgatttgtagctggtacgggaatatgatatttaccttgtatgacccatgggaaattggtacttaatttgtgttctctaagtctagatgttcataggaatatgttaatttaatcttaagagcccataacgtttggaaaaaatcatatgttcatttatatttcgggttgacaaaattaattactaatgcattcctctatgacatttacatttaatttgcattttaagtggatttaattattctagcttatcactttgctcattttcctttctcattttatttaatttcttgtttagtttttagcctagtttaaatcatcatcacttcttgttt

SEQ ID NO: 35907 - DNA, 4231 bp, Cannabis sativa
  modified_base (4182)..(4189): a, c, t, g, unknown or other
gtcttgggcagaggaagtggagcaagatctgcagcaatctgcagcaatctgcacagagtcattggaggaaatttttagcaagtaagttcccaaattttgatgctaaattgaaatatgaggagccgataatcaaggaaggcaagaaaatagctcaggttgatgtggatgaagttaatgctcaagctgcaaatcgggactcagctgttatatgtatggttttaagagcaaatcctcctatggctatgtttgaaggctttatcaaacgtatttggggcaaactggggatagagcaagttattagaatgacaggagggcttatgatggtaaagttctttgaaacttcaactcgtgatcaagttcttaaaaatggagtagtccaatttgataggaaaccagtgattgtgcgtccttggtctaaggacctaaactcaattcacctaatttgatttgtccccttataaatacgtctccatggccttggtctttagtattggggcaacaattgcctcactgctcttgtttgtacaattggaagccaatgatgatggataaatttactaaggaaagaacccgaattcagtttgcaagagttcttgtagagatggacatagctgataatcctcttcggtttattcagtatctaaatgagtatgggcaattggtcgagtaagaagttgactatgagtggctcctcgtgaaatgtaaaacatgttcgggttatggccatcttatggtggattgttagaaagttgagaatagtcaagacggtaaggagatgaaacaaaggaaggaggttacatggactgttaggaaagaaaaggaagttcctactgctattgtacagcaggtaggaaaaccagtggaaaaatcaacaactccagttgctgtgcagaacaaaaaagaagtgaaggataaatggattacccccgaagaaaatagcacacaagcagagagaattgggtggttcagatcttcaggtggataaaaacagtcacaacctgttcgacatccttgatgttcagacagaaaatttggtagcaggtcttaaagttcagatggaaggtaaaaaaattagatactagccctttacatacctgttaatggactgttgcaaaattttaagttggaatgtgagagggttaaatagtttgaataaacaggttgatgtttttaaatttttgtaatctgaataaatgtggtgttggagcttttttggagactaaaatgaaggagaataaaataaaagtcattatggaaatgaggtttcaaaactgggattactattccagctcagttactgaaggcagaattttagttgtgtggaggagtacatttgctcgagttatagtgactaaggagacaagtcaatttgttcactgttatgtcaaagtggtaggttttcctactgctattagcgtcacatttgtttatggcctgaatacaatagaagaaaggaaagtaatgtggtatgatcttgttgggctgactttgccagctaagtcttggcttatgcttggcgattttaattctatctttcatattgttataaacaaggtgggaacccgatttcttctggagatcttttagactccaataagtggttatctcttcagttaatggatactttgaaaagttcgggttcaacttatacctagaccaataagcaggaatgagggaagaaaatttattcaaagattgatcatgtttttgctaacgaagactgggttgatctttttctcaattcagctgctctgtttaaatgggattctttgtctgatgattgttcttgtttggtgtctaacaggaagcttgaaaacattggttacaaaccatttcggtattataaattctggtctgagcatgctgagtttaagaatgttgtcacagttggaggaagccttgttcaagcacgagtttacatggtatttttttgattatgatgagactaaaacacagcttgaatagatttaataacgagattgttggtgatattgggaagtcctatcttttggcaaaggagacataccatgaggctttatttgtagctcaagccaaccctgggaatttttctttttcaagaagctaaaaaaaaggcaggagagatctttgaactcaaggtaaaatgtatcatagcttccttatgtagtaaaatcacttggcttaggaaaggcgatgataataatacctattttcatgcttttcttaagaaaaggaagattaataatagaattgtttcttttattaatgaggaaggaaagcaggtggaaaatttccctgaggtggtggaccatttattagagcattttaaagggtttatggggagttcgagcactgcctagtcaatgcttaatcgggagtgcatggataggggaaaagctctctttagaccagcaagttggtctcttaaaaccctttactagaaaagaaattaagaaagtctttttagcatcccaaatactaagtctccgggtcccaataattatggttcaggcttctacaggaagttatggccagaaataggaggggaaatctgtacagctttgttgcaattctttgaaaatggtaagtctcctactggccttcatgaaactacaatttctttagtgccaaaaatagactgcccttctcgagcaatagactatcgtccaattacttgttgtaccaccatttataagggtatttctaagcttctatgtatgcagttagctactgtgttgtcgtggcttgttgaccaaaatcaaggggatttcattaaaggtcgttccattgctcataatataatgattccccaggatcttatcaaaaattatggaaggaaatctatcacccctcgttgtgctatcaaagttgacttgagtaaagcttatgatatagttgattgggagttcttggaggatattctggtagctctttgtttttcaactcagttcattggctggatcatgaactctgtgagaatcacaagctatcttttgatgcttaaaggcaggattcaaggaaagtttttaggaaagaaaggtctttgccaaggtgatccaatatcacctctcctgtttgttctggttatggagtatctcaccagaagacttcaccatggggcattggacaacaagtttagctatcacttgatgtgtagaagccttaagataatctctctttattttgcagatgatcttattatcttttgtaaaggagatgctcagtttacccaagttatcaaatctatttttgataattttagtgctttttcaggtctgaaagcaaatcttgaaaaatcactatgttcttttagaggtgttttgggagaggaaaaaaatgtgttgcttcaaactctatgtttggaagaaggatcttttccccttaagtatcttagggttcccatgaggcctacaaaatggaggaaagaagattgtggccttatcataaagaaaatcaagattatacttcatacttgggctagtaaacatcttttgtttgcagggagagttcagcttattcactctgttcttcttggtctccggaactcttggatgagtatcttcatcctgcctcagagtgttattaaagaagttgaaaggctttgtcgaggttttctttggggagttgaaggcaatagatgcaaatttcatatcctttcatgggaaaaagtttgccttccaaaaaaatatggtggtcttggttttcttgatggtcctacatgaaacagagttactatagcaaagtatatatgggccattttagaaaaacatgatgtgctttgggttcgctggattcattcaacttatctaaaaaaatgtgacttttgggaaactcctatgaagttggattcgagttggcattggaagaagttctgtgccttgagacaaagcttccccaaagctcaaattcttggtgctggctaaaagggtaaatttaaagcttccttactttataacagtaccattattcaacaaccagtgttacatacatatgcggtgtggaatagagttagcttgcctaaacatagatttatgttatcgaaaggtttaaattctcatttgcttactagggatcaactaactcagttttgcatcccctcggagactcttttttgagttgtttgtgggctctttaatgaaagtcatacccacctacttttctgttggaaattattttaacatgatcttagatctactcacaagnnnnnnnnttaacaccctaaatatgaacttgtaaaacgattatgaaataa

SEQ ID NO: 35908 - DNA, 914 bp, Cannabis sativa
  modified_base (646)..(648): a, c, t, g, unknown or other
ggatcacatctcaataaatgaataattgaatataaattttaaaataatgtaatcaaggaaataataattgagacacaatttaccttacacaacatgatgtattattaatttaatataatttaaataataatacgagcattactttaagaaaataacaaacaaaaaacaaaagtaaatgaattggtggaaaataggacagattgggatgggataagatcaaaagaatgagtaagtgaggtgaggttggcctcaaagtcttgtctacaaggtcccacttttatgtttatcttatctttaacaaatattttaagcaaaagttttcattaaagatttatttttctttaatatttcttcaacaagatagacttgttttcattaatttaatcaccgcttggacttttagaatctataatttttcgtcctattgtattatatgtgtttaactttttccaaatttataataatttattagggtttttttactttttacattttaaaataatttttttttttatatttttatgaaaataaatatagcaaaacacatagtaattaatagaataatttatgtaactaaaatttatataacaactcgcgtagaaaccaccaaagtaatctaatccgtaaatttaaaaaaaaattaaannnatagtatataaaataatttttttagtttaaattaaaatattaggtcataagattatttaagtaaatgataaatgaatatatttgttacgatattagatgtaccgatgcacctgtctatgctttagcttctaaatctttttggagaaaattctacaatgcactccttgaaaagagtgtactgatgtacccttatttatttcgatatctagaaaaatagttagtccaattttattatatgatcgtatatattatatttattttagata

SEQ ID NO: 35909 - DNA, 1621 bp, Cannabis sativa
ttatttgaaaaagaagaagtcgaagaggatgtatgcagagacggagccaaagagaatgaaaccctagaaatggttttggaatcaaatgtcaaatggaaaaatatggaagaagtcgaagaggatgaataagcagaagaaggataagaagttcaaaaggttaatagtaaaagagaaaaacacattcctatttatctttttcaggtatgtatctttcttttataatagtgattttttttttcttatttgaattttttggtatgtgatttttttctttcattttcttagttgtggacacatttgggctcactccttagagatctcctctcaattccctcttgcaggttaccttctaaatatatatatattttttcaaaataataaataatttaattttgaggactatatgcgactcaacaatacaatttgagattaatctcttcgtcagacgagcaatcggaggatgatgcataagtcatttatactcgtgttcgtatagccatggtggccatagttttttttttcaaaaacataatgaattgttgtattcacccttcagatttgtggatgaagttcaaaggtttcgactttagcggccccgtttgtgacattttttttcaaggaacctccatcaaaattgcagattatgggcatagttcaactcaattgcgtataaactatggaattgttgatgaggctaattctcatgactgcttggtgattgaggtataaaatgggcatagtccaactcaattgcatataaacagtggaattgttgatgcaggcttttagtatgtacaatcgtagtgtttaatgcagttcttgtagctgttttataatccttgtcaatatgatgccaccttggctcacatttacatatttcagctaccccaatgaagcttaaaactaatggtaagagaaagttcgagcttcctttacctacatacattaccaggtccaataaaataatattgttgtcttaatttcaataggatttaagtaatgaaatatgaagtattatttcatgtttctttgatattatggataaactgtcaatacccgtttcccatttactgtgatattacatgcaagtcaatttagagtccaataataatatttgaaccaagtttagcaggtgttaagtgaattcaggtattagagttgtatatacataatatcatatatggattaggtatcaaaaaggaaaaaaacaaaagaggtgaattttactttcagtttttcgtgtccatgaatgaaaagaaaataggatgaggatcgtctgtctaaatttcctgtcaatttttctgtccatctaataaaaaaatgccacatcaattaatgaattgacagccacgttaactccgttaactctatccgtgacatcaatttacacacttaacgttaaaatgtaatatgtattactgcgatccatcacatttctctaaacaaacttctatttatttttttttttttttttggctttatattttttacttactctattagacaaccatcacttttattattattattattattattataattaatatacatagtacaatattaacaattatatataaagtgaaaaaatattaacaattatatatgaaactaaataatt

SEQ ID NO: 35910 - DNA, 4655 bp, Cannabis sativa
agaagtttctccattagaaaacatcggtaaacaaatacaagggaattctggagaggatcatcgaggtagtaatgcctcaaatgaacccatctgcaccgaaagtttagagaatccttccaacttgcttgccagtgaaggttttcctagctatactcaagaagtttctccattagaaaacattgctcagcaaatacaagggaattctggagaggatcatagaggcagtaatgcctcaaatgatggtaaatttgaaactagcccgactagtggttctattccaaatgatgttgctctgcctagagttgtgttctgcctagctcataatggaagggttgtatgggatttgaaatggcggccttctaacgcaaatgatccctcttgcaagtatcgaatgggctttcttgctgtcttattaggaaatggatctttagaagtgtgggaggttcctcaccctaatactattaaagtactctatacttctttgcacagggagggcagtgatcctcgttttgtaaaattgaaacccgtattcaagggctcgattttgaaatctggtggcatacaaagcattcctcttacagtggaatggtcaacttcacctcctcatgaatacttacttgttggttgccacgatgggacggttgctatatggaaattctcagagaatgtttcctccaaagaaactaggcctttgctttgcttcagtgcagatacagctcctattagatcagttggctgggctccagtggagactgattcagagggttcaaatgttatattaactgcgggacatggaggcttaaaattctgggacattcgggatccattccgtcctctgtgggaaattcatccagcgccaaagaatatatatagtgcggattggcttgctgatccaagatgtattattttatcctctgatgatggaacaatgagaacactcagcttaacaaaagcttcttatgatgtacctgccaccgggaaaccatttactggtacgaaacagcaagggttgcacgcttatttttgtttatccttcgctatttggagcgttcatgtttcaagagaaacaagtattgttgcatattgcagtgcagatggaaatgttatttgttttcagcttacaacaaaagcggtagacagagatcattctcgtaaccgtgctccacatttcctgtgtggttcactgactgaggttgaatctattgttacaatcaacactgtggtacctgataatcctgtccatgtacttttgaagaagtcactcaacggggataatccactcgcattgcgagatgtcttaacaagggcgaatcaagcaaagcaagaagatgatgacaagatggaaaaccaaacttcagcactttgtttaggcaatgatttgagagtcgaatccgatcatgaggaagaaacatcagctttgctcaagaggaagaaacctacaaaacacgcagaagagaagctggcggtggtgtctatagatgatgaagcaagaagctcacagaaaaaagagatcgaaaaagttagtaaatctgaggttatgccttcgaaagctgttgccatgcatagagtgagatggaacatgaacaagggcagtgagaaatggttgtgctctggcggggctgctggaatcgttcgctgtcaagagattgttttatcagatatcgaaagaaatagggtcatgaaaaaataagattagcttgtggctttgcgcagaattttttaggataaggaagttgcagcagaggttttgtgggagaacgctaagttctgcgttgcaaaggattatctttcgttgatctgagaagagattaagttttttgtagtgaagtgttttaaatttctgctgttttatttgtacatagctgtatctggctattctgaggtttttttgtagatcatctctatatttataataatacaaagaagtttcttcatccaaaaatataataagaaaacataattcattcattctctagcacactgtatcatttttgatctggttttcttcctttttattattttatgaaactgttactttggtatgcattcaagtattttgttaagaaacaatgtagtggcaaaagaaaaggcaaaatatttctatttccctttaaattgtaatcattgttttgagaagtgattactactcatgtacatgtaccttatatgaatcctcattataattatggttttgataaaataaattcaaaatgacttctacttggctttatgctctcttttactattattttgaactatggatatttttatcaatacaccatttacatgcaaaaccaaacaaaagaatcaagttaggatgcttttgttattaactttgctgttctttgttcttatttctaccaaaaaaattaacattttctcttacaagtctctagacaagaatcaatgatcaccaaaatattattaaacaagaaacaataaatcattctttgatatacaaaatcaatgatcatcataaacatgatagaactagttcagtccctagaatcagttgtagaaaaacaaaaaacaatagagataaagtagtgaggccaaaatgagactcctttacaaaacttctttattatattgcatacaaatagaggagcaaaggagattttagaaacatgtcttcaaattacagcatcaatctcatattggtcattatagtttaaagattgaataagaaactgtttgttcaatatacaatgtcacataatgaacaaaatatcattagttcccttaagggaagggaggaagtgaatttggtgtgtaagattgtttatagtgcatcagtcgtcgtaggaggcatggggagcagctgtgcatccagggcttgagggatcttcagatccacaacaatgccaatattggaaaacctggcctgagtcgggagtatccattgtgcccccagaatacacgctctcgaacttcctcttcgtttctcctgtggcataccatagcatagcatagggccatcaaaacagaaattatgcaagtgagagtctgaactgaacacacagcaacttgtaataaaatggcacacaatgcagagttggagaaaatcagagcagttgttttcacttttcgctactcgctagttaaaacagtgagaggttaggtggcttagtcatactttacttttctaactatctgaactttgttcatccctgcattgattttcttaacttaaaatactaacccagaaacaataataagctaaataactgggaatctatgtttaaaccttctaattaaatgccttccaaagtagcaacttaagtctttcaaaaaaaaaaaaaaagaaaaagaaatcagatagaaatgaggctatgtaaataaaccatccaaagagtaaacaaaagacaattcaatcactaataacaagtattccatatagagtgaaagtgttaggttggctattggcattggaggagaagaatgttcatgagaacatacaacataggcccctgcaccaatcgttgtccccagggtcgcgtgtttgctgtaggtcgaatggggagactatcactcattcatttttggagtgcaaagtagttcagaagctatggtcataactgctcaaaagagtgacattttgctatcttttgggctgtatggcttcaaaggaatagcagaatgtttgaagacacaaaagaatcaacagaaaagctatttgggagaagattgaatattgggttgcaatcttggtttataaagtctttaagattttaaggagctatcttttctagaccttaatatagaatggtgaagtttttctagctaaaatgttacttcatctatgtttctggttgatgtggttgttgtgacttgtgagatcaattctgatctcctttccctttgtactcttttctcacattaatacaagcttgtttctttcccaattcaaaaagtgagaaatactcaaatatctttgcttttggtgaagtcaaaataggaacaaaaaggaaaaatctcaactttaacaatttgacaaactagtatccataaacaaagtataccccaaaaaaaaaaaaaaaaaaccattaatacaggaatctacttagcatgaaatttatagttattacccagatgatgatcaattcagaacccaacccatgattaactaaggcagacccttcaatcccaatgcagtttctatccaactaatttgaagagatagaagatagataagagtgaagagtgaaggaggaataccaccaaaatgagaagtatggaaacgacaagctcgagggtgattgagtgaaatgtcgaactgggttttgcaattcttgcaagttctaagggtggttgtcgtcttcttaattgggtcgatggagcatcggaattgaagaaatctcgaagtgggtgtcttctgattttgatggcgagtaagcaatcgaggaagatatgtagtttgatagagactcagagacacagccattataagtttcaaagctcacaacaacaacgccaatagcttattagcttttgattctctcctctcttttctacatgactaaaaaaaaactaatatttttacacaaacataagcttgggattccctcaaaagggatacaccgatacatttttatctgttttagtatttgaaataattttttagttaaatgttttctcatggtcatataaattat

SEQ ID NO: 35911 - DNA, 1167 bp, Cannabis sativa
  modified_base (630)..(633): a, c, t, g, unknown or other
ggtaaaatatttccaacaccttgtgtactctcaatcagaagaggagcatgagcaacatctccggattgttctacaaccactttgagtacacaagttatatgccaaattcaagaagtgcgaatttgggctatctcaggtgtcttttcttgggaacatttttagcaaagatgggatcaaagtgtatgcgggaaagatagaatccgtcagggattggccaagaccaaaaataatgacagaagttagaagcttcttaggtctggatggttactatcgtcggttcgtagaagggttttcaaaaatatcaacacccttaaccgaactcaccaaaaagaatcagcgttttgtatggacggatgagtgtgaatcaacctttcaggagctgaaataaaggttaatcatagctctagtgttagctctgccttctgataaagaaaaattcatagtttattgtgatgcatccagacagggtttggggtgtgtactgatgcaggcagatcgggttattgcctatgccttccattagttgaaagattatgaacagctgtacccaactaatgacctagaacttgctgctgtagtgtttgcttcgaagatatggcgcactatctctacggagagaaatgtgaaatnnnnactgaccataaaagcctcaaatatttctttactcagaaaaatttgaatatgaggcagagacgttgcttagattttgttaaggattatgattgtgagatcttttaccatcctagaaagccaatgtagtggctgatgcccttagtaggaagggtcccgaaagagtaactagtatggttcggatatcacctcaattagctgaggacatggtcagatcaagcatcgagtttgttgtaggcaaacttcagaacttgacgctgcaatctaatctgttagaacgtattaaaggtactcaattaactgatcaagaattagtaaagatcagagatgaggttttagctggtcaagccaaagactttacagtgtcagatagtgggatgttgttattcaagacaagggtttgtgttcctaatagtgtggaacttagaaatgaaattctcgaagaggcacataccactccatatttcgtgcatccttgcaccacgaagatgtatcaagatttgaaaccctacttctggtggagcggaatgaagaaga

SEQ ID NO: 35912 - DNA, 2497 bp, Cannabis sativa
  modified_base (2431)..(2432): a, c, t, g, unknown or other
aacagtactttggagggttttcccaccaaaatatgaggttggatggttttttgcaagtaaattgatagttgggaaagttttgctgcaaattactccataaataaatataaatagttttttttaatatatataaatgtaattaaattagatcgatttttaattggattttgagaatgacatccaataaccgattcaatccaattaaaattttacttttaacatccaatctaatcaaattataattaaattggattaaattgattaggttgagatatttgaaaacacgaggtaaatactcgtttgacttaccgtttttgttttctgtttttggtgtgtggttgggtgtggcctgtgggtccatacatagcttgaaaattttcaaattgtattgaatctccctataaattgagagttctccacctcattttaagacaccaaatccaaaatctacttaagtaccctcgtctcctgaagtactaggtttagagaagaaattaatatggaagtagctcgggtgcttcacatgaacaaggggtcaggggacactagttatgctaaaaattcaacagttcaggttaatttacatgaacccacccccaacaatctttaacttaattacatatatatatatatatatatatatatactttgttttgtttttctattttctatatataatgaaaaaatattgaatggatgttcagagcaaaatactgtcgatagcaaagccaatgatggatgaagccatactaaagattgttgagaaaagtcctgagagcatgggaatagcagacttggggtgctcagcaggaccaaactgtttgggtgtgattatggagattgtggatgttatacacgccagatgctgcaccctaagccagtcttcccctgagttaagattgttcttaaacgatctctttaacaatgatttcaacaacatttttgcttctttgccaactttctacaaccaaatcagaaaagagaagggctctcattttggaccctgttatatctctgccgttcctggttctttctacggcagattgttcccaacaaactctctccatttcattcactcttcctccagtcttcactggctttctcaggtactactactattactataccctacctatatacaaataaataacattttagcttccccaactatatatatgataattgtaggggtttgccttatatttataaatttgtccctttggttgtattttgttcatatttgcaagtaaattcttgatgtaagactcattcacggctaatatattataattataattcgagagtcaagctaaaaactaattgtatacataatactctaaaaacaaaatatggggctctgtatccctaattttaaaattaatgtttgaatatttaagttgaatatacttaatttaagtttacttataataattaataatgagctatcatattgtaattatacgtatggtttgtgaaaatatttttcaaacaaataatttagaaggcaaaaccctccatatgtcgtaattcatggtaaatatatatacataaaagacaaagcattttctatgttttaatatttgtgctttgtattatttattattaagctaataattagttataggttgattttgaaatccaaccacatatatattaactcttaaaatcttctctatattaatcttattcattaatttacagtgctgtctccctcattttcatgataataataaactttgtctatctaatgaattgggtgttatctattttcaaatattgtaactttattaattgtacaacttcttaccatcttttaactcatgatgtagatcacgaaaataataaatggttagggttcatgcttagttcagtatacccttaaactagatagtaaataaattatagttggatgtgagatctttttttttctattcatcaatcgtacggtacgtagttaaatacttttttaagcaacaatataataataataataattaatacatacttatgaaaatttattctcaaattttgaacatgtattaaaacaatggcaaaaaaaaaagacttgtaattagaacgttaacttatataaagttactatatgtaatatgctatatctaaactgtgtacaatataaagtatgaaaaagtacttagaattttattataataaaaaagtagtgatttacaaaaatattctcatccttgtcatgatgaagagagcaattatattcatagctatatatccaaatacatctttgaaaattctttcccgaagaataattaaacagaatttgcgaattctcgtgtgcgcgtagaaagcaagcacggtttgaaagattaattagtagagcattaattgttatatatattaggcaccttgtaattttagtaacgccccgtattattatgagcattgctattgggcaccnntggtgcctagcaccttctaaatgtgtcgacttgcaattggctagcgatactctataaaaattatt

SEQ ID NO: 35913 - DNA, 1275 bp, Cannabis sativa
  modified_base (27)..(59): a, c, t, g, unknown or other
gtacgctaaacatgtaaacacatatgnnnnnnnnnnnnnnnnnnnnnnnnnnnnnnnnnattcaggtgtgccggccaacctaaggagaacaggtgcttggcaatttactggtccctaagtcacattatttgaaaaatagatgagcgactcgctaaaaatcttttcggggaaataaaatggaaaataaaagtttccctatcgattgataacatggaaatacccttaatatcacaaaaacaggaaaaactagggtttccaaaactgccccaaccggcagaccggttccccaattggaagaccagttcggtggggttcctgcggagcaaccaaaattcctacatgtcccactaaactggtcgaccggttcagagcaggaaacactcaaaaccttctacattactcattttgatcccaaactagcttgagttcataaactcaaaccttgctcaatcaccacaacaaccaacaagaacaacttatgatagctcaaataacctcaatatatcatcaaaacacaaaagcaaacaaatcttaaaatcgtagaatcctaattcacaaaacatgcaagaaaagttatcttgaaacttaagaaatcacaaaaggatgagctaggaagcttacctaggattggaacctcaccaaagatgttagaattgctaaagaaaactctaacctcttgctggtttctagggagctcgagaaagagagagagcttggagagagaaatagtattttcttgattttttttccaattgaataaaatgatttattttttgataatatctaactaagataatgaattaaaaacagattgtttaacttatttaatctcactaaaaggtaaatatttctaatggcaaaaagtctattttacacacaccaaaaagtacatttatcacctaggggtaacttggtcatttttaaaagctcgaatatttctgacattcccaatatatatctaagttaccccactaaaactaaaatactaaaatataattctattagacaaacgttgcgttccaatgttgctggacacaaaatatgaaaaacataaaatttcatatatggcataaataatacacattgaatttaaataaatctccataaaattataaatcataattaataatctaatttcataattaagccctaattatatgctaattccaaattaaaactaagcggtctttataaagagtttgttagtgactggaaacttaagattttaagttgcgagtttgttagtgactgataacttgaaatgagttgtgtgtg

SEQ ID NO: 35914 - DNA, 1548 bp, Cannabis sativa
  modified_base (899)..(902): a, c, t, g, unknown or other
  modified_base (1502)..(1508): a, c, t, g, unknown or other
tttgtcattattgaattagctataagtttgtcatgcacgcttactacacaatatttatttaaaattagagtaaattaattgaaaaatgtaacaaaataaataaaaaataattagaattgatatttgtaatatgttattaataaaattatttagaaatagaataataataatttatctccttttattttagaaacatagttagaatgcttaaatttattaaattatcctttatagttaaattataattattttgtaagatatattttaaagaataaaattattattgtatattaattaataaataataaaataaaaataaataaaagttattacgcttaataacatttaaaaaaaatagggagagaagtattttcttttattccataattaataaagttccttttgatttttttcagctttaactaaaaaataacaaaattacaaaaatactttcaattggccaaataaataaatatacaatttaaataaaaaaaaattacacaaatacctcttacacactccttcaattcaggatccatgcttcatgggagtgaaaccttcgtctgatgcaaccttcgggcaaccacccagcaacccaacacaaccaaaatgaaatccaaccagaaagagaaccaccattaatttcggcgacttcaccaaagaaaacgaccggaatcaatcaaaacaggggctgttttgaattcatgaaaacaaagtgcagaaaaactactacgaagctaaaattcatcaagaaattcagtttaattcgcataaaactaatgtcctgatttcaatttttaaatccatgaaatgcatatctcaaaaagttgagctggtgttcccaaacaattcaactcaagtataatccaaaaataattacatcaatactatagtaaaannnntatcatggtgtatttttgttgtttttcaaatttctaatggtgaattgttcatattaaatcatgaagagacatgtagatagagttttgtacgtgaaaacactattttgattttaatatttcataacaattgcataaacattttactaacaattatttctccacatattactattaaggtacaagtaattattgatcagtgaccaaaaaaatactaacaaatagtttcttacatatgcacattcacattttatattttcagttgcaattaagttgcatgttagttggctcacaacagatataactgttgcattacagtttcaacagcaacccacgatccatgcttcctaggattgaaacattcgtctaatgcaaccttcggtcaaccacttagcaaacttcgtctgattgtgagtgtaagtgatagtgtaagaggtaagtaactaaaagcacttaaaaagtataaatattgttcacaccttatgaaggtgtttttataaataaagtgtcaatttatatttttcatgtaataattcctaattttaataaattaaggtggtgttttctgtttttaaaagtaaaaaagtgaaaatatttttcaannnnnnnttctataaaactatttttacttttcaattttataattaga

SEQ ID NO: 35915 - DNA, 2897 bp, Cannabis sativa
  modified_base (72)..(72): a, c, t, g, unknown or other
aaactttctacaactcttcttatacattatttgattggttgccgaaaacctcggtcaatattttggtgcttncattgagagctgaaggaagcatcttcaaacagacaacgatctgagaagttgaatcaacagtggtggaaactcgcaacaatacacgtcagccccatcctcctcaggatgctcaaaatctagaggacgaggaagtggcctcaagagtgaacgtggactccgaggaacgagatgaggctagtgacgacgagtacgagggaaattttgacgagtatgacgcttacgacgagggcagttatacagagttgctgctcttaagacaaaaggctgctaatcatgaagtcgagatcgcggcccaaaaaaaaaacaaaatagaaaaatgcaagaggtgatggtcgccatgcaaaaagccatggagatagcagggattcatatacaccctaaggccatcctagcaggactcgaggaaatgtcggaagagtcctcaccaagcactcagaacccaagaccaaggaaccaagtcctatacgatacccctctaaagaaaaccaaaggagaaaccccacttccatcctagggagaaagaaaaaggtgcaggatccgcgaaaggtcctctcagatttcccgaaagagaaaggtccgcagaggggcatgctcccaaaatggagccttggccctaaggatcgagaggatcgaaagagcgtgtctgtgcaccaagatcccggggagagaggaaggggaaactggagataccctcccgttgacttaagaaaaaaaatcaatgaaaaacacgctgatctgcgagatcacctggacaagaagaaacatataccagcggtttctgcggggacactgaatgaagaaattttggcagagttggcaacactgtgcaaagacattgctcgggtctcccagaagcaaaaaggggacgacccagattttgattgcgaggaccgagagccatgcaccctacacatattggaggcggagctccccaaaaattttaagatgcccgagatgggagcatacacaggagactcggaccccagcgaccatttatctcgttttaactgggtaatgacggttatgagggttagcaatgacgccaaatgtttatgctttccactaacactgagcagttccgcggaggaatggttcaaaaagttggacccaggatctgtggactgctggaacaagttacaagtcagcttttggagacagtttgtcgcagtgagaaagattaatctggaagtcagcgccttgactaacataaagatattacccacaaaaaccttgaagaattttataaagaggttcaaagaggaagcctcaaaaaccaagaaagtggatgacggacaacaacttgcacttcttcaagctaggatccgtacggggaccccattctggaatgaattacaacaggaaggagctgctaatctccaagacttccagaagagggtccaaaaatacatcaacttggaggaatcccaaatagtagcctatggaggatactatccaactggagtatcacgatatgtacccggagcccagctctcgggagccctaccttcggccactccttaaatgagcggcatacagttctccgctacaccaggatataattagagcctagccttggctcttgcatcatcgcattttgggaatcccctaagtaacccctcagggatgagcggacaagccccgtctcactctgctcctaccgcaagcctgacagtacctcctcaaagctcccggagcaagaggtcctcaaaaggtagcaaccgaacggaagacaagcgacaacgaagggggtatacccctcaatatacctaatacacggagctaacgggtacgcaagagcaagtgtatttcgccacgaggcaaaatacacactaccgaaagcctcctccctatacagggacagtttgcgaagggatcccaacaagagatgcgaataacacaacaatattagtcacagtaccaatgaatgcaagaatttgaaagttgagatcgaaaacttgattcgattgggtcatttgtatgagtggattaagaaccggctaccccatcttaatcaagttccggcagaaggcccgttgcctcagggagaaccagggggtgcacctggagcacacgttgtaccccccaggggagcaatccctcattaggtccctgggctcccgccaaaacccaacgagagagtggccatgatctctggtggaccccatgtaggggggagcaccagaaaagaattaaaacgctacgttggggccataaaacacgatgaagtgtgggaagtcacccaacttccagcacaaaggacccgactcatggatcagcccattaccttcacggaagaagatgcaaaactggtgtgtttcgctcatcatgagcccctggtcatagagactcccattgccaataaaattgtggctagaatattgatcgataatgggagttccttgaacttattattcaaagaagccttcacagccataggcctcacggactgggatttatcgcccagcggttcccaactcacatgattcaatggaaccacgcttatcccaatgggaaaagtaatattgccagtcagcctgtgcccggatacaccttagagtacttttaagtactgcacctttgtggtggtagactgcccaactgcatacaacgcaatccttggccgaccggccttggttgattttggcgcaattacatccatccaacacttgtgcctaaaattccccactcagaagccggagtgggaaccgtaaggggtaaccagggagaggccatgcattgttataatgtcgcagcccacttgctggtgctgatggtccgtgagaatattgagccaaagttggtagaagaagatgagttggatcccc

SEQ ID NO: 35916 - DNA, 1616 bp, Cannabis sativa
  modified_base (37)..(46): a, c, t, g, unknown or other
cgctcttccgatcttgatctatattaataagtaaatnnnnnnnnnntgaaatgagttttatttagtgcataaaacccaacatgtaaatcacgtaatacgcctatgctagttagggtgttacagaaacactatcttgagatttcactaactcaggatctttcaattgcgcttctctgattcgctctaaaagagtagattgcagggtaatattatctaagtgccgtacaaccaacttgattttagctcaggtcatttcatttgctaatttctgggagatttgtttcattgtatttatctgtatctagccctttctactcaaggcatcggtaacaacgttggcctttccacggtgataaaggatctcacaatcataatcctttaccaactctagccagcatctctgtctcatgttcaggtctctctgggggaagaagtatttcaaactttcatgatcagtgtatatctcacatttctcaccatataagtaatgccaccaaatctttagcgcaaatactattgcagtgagttctaggtcgtgagtagggtacctctgctcgtactcctttaactgctgagaagcataggctattaccttttcagcttccataagaacacagcctacaccttgtctcgaggcatcacagtaaacaataaacttttccttatttgaaggaagagttaacattgtagcggtaatcaaccgttactttaactctagtttaattttctcacaccgatcagtccaaagaaacttaagttctttcgagtcagctccgttaagcgtacatcaatctttgagaaaccctcagcgaaccaatgataataaccagctaaacccagatagcttctaacttcagtggccgatttttgtgttgtccaatcccaaacaacttcaatattggtcggatccaccatgatcccatctttatctactctatgtccaaagaaagagacacgagataatgtgaattcacactttctgaatttagcatacagcttgtgctcttgtaatcattgtagtacctatccgagatgcaactcatgttcctcttctaattcagaatacaccaagatgtcatcaataaacacaatcacacatctatccaaaagacatcacaaggaattcataatgtctataccgagtacggaaagcaattttcgggacatcttcctctcgcattgtcagctgatgatagcctgagcgaagatcgatcttggagaagactatcttccccttcagttgatcaaaacaatcatcaattcgaggtaaaggatacttatttttaatggtaaccttgttcaactcccgataatcaatacacattcacagtgacacatctttgttcttcacaaataatctcggagcaccccaaggggagtaggtcagtctaatgaatcccagattcagtaactcttgcaattgtatctttagttctttcaattccactggagccattcgatacggtgcttttgataccggttctgctcctggaactaactaaattacaaattcgatctcccgggtaggtggcaatcctggtaaatcttttggaaagacatcaaggaactcgcacacaaatcttgtgttctcaggtccagacgtcatatgttggcta

SEQ ID NO: 35917 - DNA, 1424 bp, Cannabis sativa
  modified_base (43)..(50): a, c, t, g, unknown or other
  modified_base (410)..(417): a, c, t, g, unknown or other
  modified_base (537)..(537): a, c, t, g, unknown or other
gggacaacgctagattctcatcttaatcgaataaaaggttgcnnnnnnnnttgtcattttagatgagctgactactctatccaatgaatgatatctttgattctcgcccaatacgaagaactggtatcggtttgttgaaaaatttggaaattatttaggattgtatggtttttgtattttcactagtcattcctacttgctaagtgctaataatttcttaatgtgtatgattttgtgttaaaccttacttgatttctatttattgatacttgtagtacacactatgactatgaacaaccccatggtgtcactgttgactgataacaagctctctggagctaactttgtgaaatggagagagaacattaatattgctctcattggtaaaaataccctgtttgtgttaactnnnnnnnntcctgagcagccaggtgagaatgcgaccaaggcagtcaaggaaaagttagagcgttggccaaatgccaacaacaaagcttgatactttatgctgtctagcatggttgacaccttgaaaanaaggtttgccaatactctcacggttgcacatatcatgaaccagttcactgaactgtttaggatggtgtcaattcaagctcattttggggcgaccaagaatttcattaatgcacggatgaaacctcaacagaacatgcgtgatcacctactccaaatgactagttacttccaagaggctgagaatcatggagctattatcgatcagacaactcaagtgagtttgatattgaatagtttgactccagattttctacccttcacataaaattatgtcatgaacaagttggagcttgacttccacgagttaatcaacaaccttcagacatttaaaaatttggttggaggtccacagaaatgaggaactaaagctcctagttctggcaatgctaatggtatgcccaaggctgaggcaaacattgtcgttgcttcgaaacccaaaaagaagaattggaagaatagcaagaagcctcttaatgctgttaaaacagctaataagaaaaaggctgctaatcctaatgcaaagcaaaaaggaaagtgcttctattgcaacgaaaagggttatggaaacccgagtgtcctaagtttctagcaaggaaacaaagtatttctctttatgctataaactcatgtgttttagagaattattatcccattgggttattaattctagatctaataaccaagttcattttcttattatttcagctcaagctgcttaaacttggattgctatcctagcgagttgagtctgatggttggacagaatggtagattgtccctgtgaagatgaagctcgaaatcttcttaatttttgaattaattgttttaatttatgagcaatttagtttaaattattggtttaggattttaatccctatttcatattt

SEQ ID NO: 35918 - DNA, 1549 bp, Cannabis sativa
  modified_base (69)..(75): a, c, t, g, unknown or other
aacataaaaagaccgtatttaatgtaaataaaatcaaaaaaatcttaaaaatgtttaaaattccgtgannnnnnntttttgttgtttttgtgcatttctgaaattaactctaaaaagtaggcccctaacaaaaaaaattataatttgtagataatatttttaaatattatcatattacgaaaatatattttacataattaagcacccaaaaacttaaacaattttattaaaattgttgttatttctaatacaacttcaagctaatatcaaatattgtgaaaaaagaaattgaaacacattaaataaggaaaaacttttttttttttatttgaaataaccaattagtggaagattgagttaaaaaaatcttaaaatgtcatattgagcctttttaatatgtgggccctgtgcattagcacgggttaatggccggccctggcccacactatttaaagtagtactcaaatatttgtagaaggttgtaaagattttttgcttatcagtttaatgaaaaaattaaggttcatcgcttaccctgatatagaaaggaaataaatggtttcggaatgagtcactaattttcgctgcaattaatgtaagaaatttgaagctttatatgtatttattattcattttattatttcatattttaagatgttagattatatttataatcaaacatatgatagtaaatatatcctaataaaacaagctgttttttttttttttgagatattattgtgactgtaaatatatgaaattattctgtaaaagtctaaaaattaaagagaaaaatagtaaaaagaattacatttttccccatcatatatcagagtattaaactggaatcaacgctattaaatgtgataagcatcggtttcagttaaacacttataaacgaccatcaggaattgacaagaaaaggccttagcgactatgtagaacggtcacttatactcttctattttgtcatcagttacaaacagtcaaaaatgcttattattgaatatctgtaatctatgcctattatgaattgacgataataatttatttagctgtatacttaaaacagtcatctaaaccctaagtcttctttcaaattagttttatattagaagtattttgaccaaaactattatatgaatataccatctttctctcgaagctcttttttaaaagttatttttttctttttgtatccttctttttctagtattctccaggccatttaaaaatctttatgtaaataattcatattatgtactacactttattttttaccgaacactaacacttacacaatgttagtgatatgtaatcaatgaattgaatgcaaagctccaggccctgatggtatgtcggttctgttctttaaacactactgggaatcggtggggtctgacttctgtgaagcagtttccaacttcttcaactctgggcgtatgcacaaaggaattaatgccactaatatcgtcctgatccccaaggtgcagaacccgaaaagaccaaaccacttccgcccaatttctctgtgcaatgtggtctacaa

SEQ ID NO: 35919 - DNA, 1659 bp, Cannabis sativa
caagcgggttggggtctaccaacgatgagttttgtaattctattttgccgcttaggtcggctagtggaaacggactcgtaatagtattgtgtaaaaaaattttgggatcccgatacatgtagcttttggtttgtaaagttaaaattattacaagtttattttcatttaattaatatttaaagtttaatttttgcgcttattttataagtaatctcgtctaggggattagggtttcttaattatcttgggtaacgtgcctattagttagggcgttacagttgagtgtgtatgggagctcacatgcaagtggtgtgtgtgtgtgtaatgtgtgtgtgtgtgggggggctcacatgtgaatcgtgtttgtgtaatgtggggcatgttgtgtgtgtattgagtgttgggggctcgcatgtgagcccatgggaggtctcgcatgcgagccattgcgtgtgttgtgtaagtatgttccgaggattataaatataaggttagaggtgaacgcacatcgacaaggtgtgcaaggagaaagcgcacaaccatgccttttgagaattttgaaagcaaggaggtacgagtagcggcaacaacagacctatgaggtttgaggacccaaccaagggtatgttgcaatgactctattgcaacctataatcggggaccgcccccctgcaaccagagaccacatgcctacaaccgaggatcactcctgcagccagggaccacctgacaccaagtaagggtatgaggtaccaaaccacctccagaacctgcgacatgcaacgtgaaagtggcattttgttcctatgggaccactttgtacattaggccattagagcctataaatactcccatttcaaatgtgagaggggttggaaaatatcttggtgtaacttaggctttgaatgcaatagagagaaaataactttcatacatcttttcatcttcatcttcatcttcatctttatcatcatttaatttttgggttactttgtattttttttgccactagattagttgacaagttctcaccgttaacaatactgtattattttctgtcttgttgggccttggctcacgagtgctctattgtgcagacaaagataaagcaatgtcaggtcagccatgagattaaggactttgagaatgatctgtacatgttttagccaagctagatcatgagggtcgggtataacaagaaattgcttagaaattctattttgccgcttaggtcggcttgtgctaaataacttgtaatattttgtaaataaattttacaggattccaaatatagaactttaaattattttggtttataataaaatatcgatgtttattgcaagttatttatttaactaattttattatttgttttaaatcacttgacttatggacctcaatttacaagaatagtattttgtaatcacaacacgtggtatttctttgagtaggacgttacaattattatatataactattatttgtttatgtatatatattacacatgggcaattttcgattttgaccctaataaaatactgcatatcaaaatttagatccctttattttttgtacgaattgattccactaatttaaaaagattcctaaaatacccctaaaataaactttccctcactctctttgactttccctctctct

SEQ ID NO: 35920 - DNA, 985 bp, Cannabis sativa
atagggagatgagtgagtccactatttatagagtttaattacataaaattagtttccctaaatatataataaataaaatgggaaactagtttattttcataattacaataagcaaagtaagaaacttaggctagttgtctttcttctctaaagatacaaattcatcactgaatgtagggattatgctgtgacttgcaagcttggagatatacaagatatatctctgaacttaccaactcacatcacttggtcagtgcatgcgagccacctgcttgagaagatggtttgatgtctatacatgatctgtttggacatcccatcctctatttacgacttcaagtatcataattgtctatacgactcatttggaggagtatcgctcattcaggtgatgaaatgtgctctacgtgtcatccagatagatgtcacgtcattgtgcaaaaatttgaatacattatatattagagtaatttcataaaaaaatttactaaatataatatttgctcaaaaatattatattcttatgtcatataaataaataaacaatataaaccctggataagctctacaaatttaaattaatctctaactatgtacatattaattcttatatgtatgtaaaacacttaaatttttaaaataaccaaaaaggaactaagtacagaactaaacccaacacttcaaggttcccagtattttcatgctctcttactttccacttgttgaactaaaatgtatatattatatattttttttgtatatatattaattttaatattttggggcctccaaattggtggggcttggggcctaggctctggccgccccaccctctggctagccttgaatacaattgtatacacaatacatgtcctctggttggcctttattaaattgtatacttggttactactacggtcacactcttagggattgtttggttgtatttttagtattcaatttttcacaatatttttttcaaaag

SEQ ID NO: 35921 - DNA, 2687 bp, Cannabis sativa
tttacggaattctacatagaaacgtccctattgcaactagcgctgcaatctaaattgcaactagcgctgcaatctaaattgcaacaaaaaatcatatagagactcctatcgcaactagttttgcaactattttagaaatccaaattataaatttaaatatatatatataataattcccctaattaaatttagtttggaagttctacataaaacacttaaaattgtatttttttttcacatatatcttttacagatacaatgaacaaaaaccgtctatatttttataaaaaaaattataaatccgtaattcttttgttattttcagatatatttacaaaattatcccatttatttattttttgtaataaaattatccatgtagttaattaatttattgtgcgtattaattaaaagcaagattattatatttataatattacccgttgttgcgagtggcaggaaaaccagaagggcagaaatggatgacgaaatcagaagactgacatgtgcttccgctactcttatcataaacagaagcttgagcttgagggcaccatttcttgaacaattcagagttactattagaattacaattccccgctcccgacgcgccgccgcacgcgctcttaatagccaacgtagtagtatcgttaccgttaccggtaccggtacttgacgacgtaactcggagctccttcggaaaatactccgaattcgagtccatgacgcatccaactgtcccgcaatttccggttccggcggccccaccttggggcaccaccatcaacggcaggttgtaaccgtcggccaggcttataagatacttagcgggtccggcgccgtcggttaaagcgaactccactgtggttgccgggggagataagtttccgccgccgcactccacggaggatgtgccgcagtctccggtgaggcatgtgaattttccgttgatatcggcggcgcagtgggttcgcccccataagcggcccgaccaattaggcggtaccgggatggcctcagaatcggtggggccgagggcgaagccggtcggagtaatcagaggggaaccggagtttgatagaatggccggccatacgttgtagttacaattgtttgtgattgtgaacgtggcagaatgagtcccttcatgcatgtaaaaattaataagtttaaaaagaaactacacaatttattgatcatatactatttaaaactatatatatatatctatatgtatatatatacctgataaaaattgaagaagaagaagagatatgagaagtgtaggagtagtagtagtgaaagccatattatttggtatatgagaatatgatcactaattaattggcataagctacacactactatacctatcttctaatctaaagctatggaaaggcttttcacgatttatgcttatatattcaagcttatatataatgaacattattcatgcacatagtgatattagttattatatacttttaggccgcaatatatgtttccacaactaaacgatagagagggagccactacatgtagtagtagtcaaatatgaagaaaggaataaattaatatgtatataattatttaattcatatcgacttttgttgactcgccactcttctcattttagggtatttttacagtacacttcctcactaatcaactttcaatcaattttgatactgggaaaaaaaatatttacttttttttttatagtagtatatattataatttttaaaaatatcttataaaattttaaaaaattaaaaataatttataatacaaaataaaataatatttaaatagtttaagtaaaaaataaaaaaatcaacaacatattatttaaaatttattttcaacatattaaattttttttatttttttaaaattttaaataattacaatgtacatgattataaaaaaaattagattaaatatttttttaaaataccaaaaatgatagagggacatctgtgcactatttaaagtgttccattagtctattattatatatatttatattgaatctttcaatttcatgcatgtgtatattgtagcgcagaaacttcgtgtctcaagctatatatagtttcaacaccgcttagaaagtttatatgaaagtcagattaatataaattgatctagcgcttgtatggcgttggagaattatttcatcagagtcttcttcttcttttaattatatttttttatgtaataataataataatattccgttgactagaccaactcgtgattataatattataatatgtggtagctaaagaaattcacacaaaagtaatgacaacttggaaatatgaggaaccggcagatcgatatgcaatgatttgtgttcacatgcatgaagagtacaagtaaattatgtattttgtttttctaatttacctaaatattttattgttattttttgtgctgttcattactaattattccttttattcagtcattatataattagaggcttaggcgctatttatatatgagaaatacttcaaggcgctaatattaatttaattaaatattgaattttatatagtttaatataataaattttagattatatcattaactaatcacagggccagatatctaaaagtattaaccactattaataccaataacaatactcctatttttatatatatatatgcttgataatt

SEQ ID NO: 35922 - DNA, 1662 bp, Cannabis sativa
aagacctcccgaagcctttggttggcaaattttgtcacaagatttcagcgctagaaaccaatctttactcacatttcctagccaccagtacttgcgaataatagcatccaattccctacaggtggagataggaattttgtttgttgacatcatgtacaccggcatagaagctgctacagacttgatcagagttaatcttccggcataggagagtaacttcatcttccatccgtcaagtttcttcatcatactttcttttaactttaggtaggtttccttttaacaatactaaaaataaagtttaaacaactgattaccacacatataagagaaaaaagtatgagtgcaacaaaatattttaatcttctttatagcaatgtaatttgaatttttaattttttttttcagatgtccctaaataattacaaacgtacactacataaaaataaatagaataaaaaaatttctttgatataccaaaatagataatgatataccaaaacaaccatttaagaggtgtactatatgttaaataaaatatttttatatttattagttattacatgttacacaaattattggataattctatattacatcttctaaactgttttagtatactcttaatttgtttttgtctccaagagaatttttaagtccaaattattttcataattatttaggttatatttaattagaatcatctgtaaattcttaaaaaactctgaattatttatagtgcagaaaataaagttaaaaaattttgttacacacttgactatttttctaatttgtgtggtagtaattatttaaactttatttttcggtatcgtaaactatacaaaaattttgaaaaattacgagtagtacgagaaaactacaaagtatgagattatgaaaagaaaaatggactaaaagacttttttagatgtcaaaatagataaatccttttaaataaaaattaatagttggcccccctagtaattagggtctggctccgcccctgttggcaacccaagattttccttttcgcataattaataattacccaaaaagaaattacaactttacaaatatagataaataaataatttgagtcaaactccaacaatctccaccttgactcaaattctctaaactcactactaaaaccatcaataagagtatatatgcactacattcattctctcattgaacttcacttgagcacttgtcttcacattcttcaatctttcactgatgtcttctttcttcaaataacttttaactaaaattggagtcttcttcactttgtcacattccttcgcactaactaaattccttttgtgacttgactccaccttctcagctccacctaaaatagtcttcccgattaatttatacaaattctactctttcttacccttcacaactaccaaaccacctttcttgattgtgaaaatagacacaacctcgagtatctaaagctcccaaagagattaagctcctccttaatgttggaacatgtctcacatcagttagtgttctcacaataccatcaaacatcttcaccttaatagtttttattccaacaactttagagttagaatcattacccatcaaaatagtacatccatcatatgtcttataagtgccaaagcactccttatacgggcacatgtg

SEQ ID NO: 35923 - DNA, 1400 bp, Cannabis sativa
gttgccagctacttcaataaataagtcaaggaaaggaaatttatcataggagacttagtactttaaagaaaattccctaataccaaggctcctgcagaaagtatgtttggaccaaactgaaaaggtccacaccaagttacaagataacaagtaaaggtgcatgcaagcttggtgagtataataagaacatggagttagttctcctaccaagatactagaatagaaaacatctcggtaagaactactagtagcccacttatacaaaacactactcttcagtagtggttcctgtaacgcttcactatacatgaattcagaaaagagctaagtttccatcactctttattgatggactttgctcaggatgtcgtgcagaggtagccaaaaactaaagagctatatgaccatcactcttcagtgatggcccttgtgcgatatgctgcccaactaaacttaagcaaaatttaaagcattattaagccaaaaaaattgaaagataattaagtgagaatggcatatttcagattacacgtaagctgcccagacagctgcttgtcagcaaaagaagttaaagccaagaataaagaccgcaaggccgatcgcctattcaaaagtaaaaggccctaaggacaaacacgaaaaaaaattatcatatgttcaaaagtaacgagcctaaaggccatacaaggacaaaagatgaagtatgtgaaataaaagcataaaaataaacaaaaagtcctcaaatgtcttcagaataataattggagttggtgagttcaaagttgtattagaaggactagttgtctagaatgataagtcttcattaatctggttttcacctccccaaatttcatgcaggtccatccctaaaaagggcaaagggaggtgaacaatcggagaacataaaaaaacatagacaaaagataagttaattggccaaaacctaagggtattacccagacagccttgaaatacaaagttttaatcagaaaagtataaaatcaagaatcatgaattggatagcctatgaaaggtcattgacaggttaggaagatttggcctgagacataccatatagagctcctaaaaaggagctaagtaccgaacgaggctatatgggatctaagtcattcacagagttcctatataggatctaagtcatggagagagttcctatacaggatctaagtcatggacagagttcctaaacaagatctaagagtcaaacagggtctctaacaagataccaatccaagactcaatcttgtttataaaaaagtcaaacattatgcattctaaagctatcaagtgaattataatgtgagaagactactttaaaatgtgagaattaaaaattttctaaaagctttcaaaagcttgaaactcatcattggtagatt

SEQ ID NO: 35924 - DNA, 1896 bp, Cannabis sativa
  modified_base (1260)..(1262): a, c, t, g, unknown or other
ttaaaaaactgtaaaatatttagtaaaatatttaaatttctacacaaccatatttttaaccatatttttataactttttttttttttgaaatataattattcctataaattattaataaatgggtacattcaaaaaaataattgatatatatatacttttaatattattactctcgtttcttgataaaaaaattattactcccccttttaattgattattgttgttattcttattatacatagtcaccagcctaatagttctgctattaaactgtttgttgagaccaactgttttgggcttcattccatgcatcaatgtacatcgatctctcattgactagtccaaaggtaaaacaattaataataagggaattaacagtatccatataaaatttagaaaatttctgatctttataacatcgttttggtagattttttatctgtttcgatatttaggagagtgctttcatttttgttttcatgatcgcatacgtttatttaagatcacttttaaatttttaaaaaatttcaaaaaatttacagtataaaaaataagatttaaaaaattacttactacacatataaaaaaaaaatctacctttactccttgttcatctgtggatagtttcaatgttatgctcataggagtattggtatgtttggcattctcaagactaaattttttcatcaaattcttcgcacttactttgagagacaaaagtaccctcatcaaattatttcaattggagacctagaaaataagtaagttcacctaccatgctcatttcaaactcttgttgcatttgaaaaacaaaaacttgtacttcaaagttagaagtagaaccaaacacaagatcatcaatatatatattaagtaacaataacatcagtattaatgttcttgatgaaaagtgttttatcaacattttcccttctgtaatcataagatagtaaaaactcagttaggcgctcataccaagcacgagatgcttgttttgtctaatctataaacatgatcaagaaaatgaggatcctcaaaccctttgggttgttcaacatacacttcttctttatgaaaaccattcaaaaaagcagatttaacatccatttgatacaatttaaatccaagaatgcaagctatggaaagaactaacctgatggattctaatcttgctactggagtaaaggtttcatcaaagtcaatactctcgactggagtatatccttggccaaccaaccttgccttgttttgaatgatannnccaaactcatcactcttatttttaaaaatccacttcgttctaatgatattcacaaatggcggtcttcgaatcattgtccataccttgttattttgaatgaacttatgtagctcatcttgcattgctaggaacgtcaatcttcatccattgaggcttctttcactgttttaggctttaaagaagaaacaaaacacaagaattgaattatattagcaaattttcttccttttatcatgctttcatccaagttttcaaggatgagatcagaaggatgattctttttaacccttgaggatggttccctctgaattagatcagtggtcatatttgaaggattctccaattcttttgttgatgaagattctggaagaacaacatctgtagttatagagtcttgcaatgtagtctcatctgcagcttctgtggctctgtaatttaacttgccacaatagaaggcttttcaagcaatttatcaatatgttcttctgttgaaatcgcagagaaatcctttagatcatcaacaacaacattagtagatttcattacggtttgggttctcatattatacacacaataagccctactattaacggaatatcccaaaaaaatatatatttataacttcttgcatcaa

SEQ ID NO: 35925 - DNA, 1376 bp, Cannabis sativa
  modified_base (251)..(255): a, c, t, g, unknown or other
aaaacaaccaagtttgggtatttgagtatttcgagcttgactttttttttttttgtttgagggtatttgggctatgattgcaacccaagtttgggtcgtggctatacaggcgtggtggtggtggtggtttggggtaaggggtcgacggcttttggcagtgagaagaagaagacgaagaagaagaaacaaaagaaaaagaaaaagaaaaagaaaaggaaaaaaaattatattaatttatttatttttatttnnnnnaattaaaataataatttggaccaaaaatattttgacgcgtggcaattttaaaaaaaataaacggagcaattaacattaggactaacagacaaataaaaattatgagcttgaggactatcaccgctattttttgaagttggggacttatctgtatcaaactgaactttttgaagacttttactacaaattttctagaaaataatgataataggccttatgttgcacctaaatttggctcataatccagctttttattgttgtttccaggcaactaggttaaacatcagttcttatagctttttcattggaaattgggtaagtccacgtcaagggtgtttagcattataggttgcccctagcaatgttcattccaaaagagttcaaaaatagcttctttttgccatgtttccacacacattcttcccacattgtagatccaattgtgttgccacattaataattattatatatgccgtgccgtccaacacaaatacacttgtgttatgaatttaaaactgaacattgcttattataattaaaaatatagtgctgagtatcatcaaccttgaacatgttgttcacttgcttttcacgatgaattagattcttgtttatgagggtttcactttattcggagcaaattttatgtgataaaaacttgaactatgtattaagctgtagttgaaactcaagtctacagacccatgttgctaagaaaacatacatgaaataatttttgttaccaaaggtgaaaagtaggttatgaaaaagaaaatgtaaaacttcaaaccaccagccaaaaaaaagctcgagagaagattttgtctacaatattccgatgtttgaggtatattacaagtcaaaccgagttacctattgagctggtggttgatcttcatcagaagaatcatccttctggcccttcctttccttccaccttgccaaaacccatttcaaaacaagaaaacctccaagtgcataaacctgagaacatacaatgttattttacaattacacataaaatttcagtgatctcataaccaaacttatctttgttgggagatgttagccataaatcaatatgaccctacaccgaatgtgtatatatgtggatgtggtta

SEQ ID NO: 35926 - DNA, 1269 bp, Cannabis sativa
ggcttgaagacctgactaaggatacactgcaatgactctcctacaacctgttctcagggaccaccccgcatgcaaccggggaccatgtgcatgtacccggggaccatccgcatgcaaccagggaccacacacatgtaaccggggaccacatgtctgcaactaggaatcaacctcctgcaatcgggaatcaaccttctacaaccggggaccacctgacaccagacaagggtacgacgtgtaaagccacctccagcacttgcaacatgccacgtgaaaatgacgctttgtccccttgggaccactttgtactccaggccattagagcctataaatacctccttctcatatatgagaaggggttggaaaatcatgcttgtaacaccatattgagagcaatagtaatttctctattattctctccattttaagtagcaatttgagtttacattttatctttttcttcatctcatttcgatcttgaagcataagttgattttcaggccacaagttagtcgatgagttctcactgtcaacatatgcaatcttaaattctaatatggtattagagctaaattagactctaacgagtatcctatctaaatttaaaattttgtccaaaagacgagcctaaaagagtcacttgtgatcgagccgtgtaatattagtgagtaaaaaatagccaccatcttgagaggatgttagagggtctcacattggctacttctcttattgtcaattggttttgaaacagaatgacatgcaccttaacactcacctattcctacttcctcaaccatacacttccacattctaacaagaaatatatttttttatttcgattgaacgataaaagcttgttaatgatgagagtcattattaaatgatcttataactttatttagttaatgatatttttgactctcacctaccggaacaaaaatattatagattggttaaaaatcttagaaatacaaaatatatatatatgtatatatatgttagttcctaccgatactataccaattgttgcagaaaaacatgaagttatcataactttatcctctaagaccaacttcaagaagaagtttaaatcagcaacgaaaacaacgaatcatgttttagctaaaaagaagaaagataagaaagttaaaagtacatttgttttttgtaaagagaaagaacattgaaaacaagaatgtcctaagtttcttactacaaagaatcaaggtaaatagtgtttagtattcatcgcatcataattgggctttt

SEQ ID NO: 35927 - DNA, 2399 bp, Cannabis sativa
  modified_base (49)..(72): a, c, t, g, unknown or other
atgcaacattaaatgttatttctgctctatattaataagtaaatctgannnnnnnnnnnnnnnnnnnnnnnngggcataaaacccaacaccaccttcaagagagcaacaagaagctgaagcaggatgcaaattctaaggacaaagatctcgagaacctccagaagtccaaagagcaggcggaacttcaagccaagctctcagtcaaaggtcgaggaattggcccgcaacttggagaccgagaaggaaaatgggaagaagcagtatgaccaagctgtttccgactatatatacacgactttatccaaggtgccagactttgacttctctattcttggagcagaagcgactgagatggttgaagcttttcgtcctatgtcgcctactcagacccaagagtgcggaggtaatctcttccctgaggaggcagaaactgcagatgctgaagaaggtcgctgatggagctgccagcaaggtcgcggctggttctactgctccaactgtttaatttatctaagtttttatttccttagttattgaactcttttagcggtacataggtacctgcgttttgtactttgaacaaatttcagctttttcctctttcgaacaataggtatcctttcaaggatattttcttttgtctttaagcggtatagaggtactcgcataattataactggtcttatttaatctgtttgcaatgtttttttactattacagcttggtgtaataacttacaaatgttaaacttgcaaaaaatttaaagtttcgagaattcgagaatctttattatagtaataatcaatagtacaaaggtaggttataccccctatacttacgacatttatcaaaataaattggctaagtataattacattgcgagtactattgataataatacttgagactttcgccattccgagcccttcggatcgttgtaccatcgagttctgcaagccgataggtcgcatggccaattttctcagcgataaggtatggtccttcccaattgtcaccaaaaactccatgcgttgggttttttgtgtttcgcatgactttttgcagaaccaaatcccctactcacagagtttgctctttcaccttcaaattgaaatagtgagctgctgataggccgcgttcttcagatgggcctgatcgcgcttttcttctaaaagatcaagttgaagcaactgtttatctgcatttctgctcaggttgaatacatctcttcgtagggatcctgccccaacctcgactggtaccatgggttcgcacccataggagagtgagaagggggtttcaccagtcgtggatcggggagttgtattatacgaccataaaacttttggaagttcttctggccatacccctttacgctcttcgagctttcccttgatggtatgcttaattatcttattaactgcctctgtttgaccattactttgtggataaacaactgctgaaaatgcttttttaattcccaactcatcacgtagctggcgcatctccttatagtcaaactgttttccattatctgagatcaacttgtagggtatgctgaatctatagatgatggaactgtacacaaactctcacaatttaacagctgtaatagtcgcaagggcttttgcttcggcccacttggtgaagtagtcgactgcgactacggcgtattttactctccccttctcttttggtaattctccaattagatctatgccccagacttcgaaaggccatgaggcgtctactcgcaatgttgaccagtagtacccttgccacattatttttagagcaagggaattaccccctgtacggttgccgcagatgccaccatgcactttgcggagtatgtagtcacactcaatcccatctatacatttgagcaacggttggcaaaaacttctgcgaaagagcttaccatcataaatgacatatcgagcggctcgatatcgcagttttttagcctccatcttatcttcagggaggattcctttttctaagcaatccattatttgggtcatccaggtgacttctttgactgtatctacctccattacctcgtttcgactaactgttagatgagttagcacatcaacaggaattacatcgagtaattctgcttctcttgtcgaggctaaacgggctaaagcgtctgcatgagagttatgagcacgaggtattctggagacaatcactttcttaaatttttgtagcaactcacaagttagggcgagatatccagccaaacgacctcctctagccaggtattctccatttacctgatagacaacgatctgggaatcgccaaaggcttgtaaatattcgatcttcatctcaacagcgagtttcaatcctacaatcaaagtctcatactcgacttcattgttagatgcag

SEQ ID NO: 35928 - DNA, 1630 bp, Cannabis sativa
  modified_base (1526)..(1533): a, c, t, g, unknown or other
attatttttaatttatttaattttctctattttttcatgttatttgctaatgaaagataattaattatttgttacattttaattcttaaaatttaatatttgtgttaatcattcattattagtgactttttatttttataactcttactattattattattattgttattattgttgtaacatatttacttaataactaatctcatacatataaatatatctcatacatataaatatatatataagagcttttattattttatatatgtgacgatatatttattttttaaactatttctctaaatttattttacttattagattttgtgtttttatttttcaatgctccttatatataaaatacaaattataaaaatgatgagttgactctctaaaatttgtcaattttagattatttattttgtggtttatttagtttaaagtaattttgtttttaaaaaaaaaaaattaaatctttcacatattttaacatattaaaattataaatttaattttttttatagaatattaacatattaattaattaatattttttttcttttaatatattaaatttagattttattttttacaacataaataaatagtttctaaacaaccgcgcgaggcgcggtatcgttgcctagtataatataagttattttttgacaaagtgattagaagcactcatgaatttacgacgcaaacgtccgctaccggcactggaatctctttgaaccaggatagctcatcgtctaaccacagaacatgctttgccaaaccatgagtcgctaaattctcaaagcgagctacatgggacaaaactaccccgaaaatttaaacaataaagctataacataatataatataatttttaattaaaaaaaaataagaaaagaaacgccacacgttttttactaatgtaatcgatgccctaaatattgtccctacccataggaacattttttggttcattgattaaaaatagaacggtgattaagcaataagttgcacgatagtaatataaatgttgatgtatatgataatttatatattttatattattttaataatatatttttactattaatatttcttttacaacaatatgattggtcaataattttaactttcatatattataattttctctcatactaaaatctctctttttgatatatatcgagaagatgaaactttatttgcaatacaaataaaatattgttgggaaataattaaaaaatcgagatcaaactaaaacaaagtcaagagtattgagttttattatttgatattacgcacaaaattatgaactctaagttttaccagtccaaaactttttgtcattctcgtctaatctctacttaattagtagcttcgaagtaacggcggtgtcattttttagttggattaaaatcctattgtgggcacatatgtataatgtatatgctattataaagtgtgatacaaaattaagtgaacaattatgttatgggtatcaaaaggatattaaattgtcatggaannnnnnnntagataccataaattaatttataatttgttgagaggccaaattataaatacccaaaactcattctaagatgttgtggtcagataaaatactttagaa

SEQ ID NO: 35929 - DNA, 1498 bp, Cannabis sativa
gacaactacaataaagcataaaaatttgaaaaaaaaaaaaacaaaaaaatagtagtttcttaataagggtatacttgttaataaaaatatcacccctatacctctttaataggataatttatatttttactctttaaattttaacatgtatcaaatcatgtctcttgaatttttcaggtcgttaaaaattcttttcgaactattaagattgttagatttaaagacttttatctaattttacaaaagaaagtgtgacgtggatgaaaatttaaggggcacaataaaattcaaggacatgattttataaatatcaaaattcgagggacatgatttagtatatggacaattaccgtgttagcaaaattgaatgaaactagacaaaaattcttaaatttaacaatctcaatagttagagaaaatttttaacgacctctcaatagttagagaaaatttaatgagcacaataaaattcaaggacatgattttataaatatcaaaattcgagggacacgatttagtatatggacaattactgtgttagcaaaattgaatgaaactagacaaaaattcttaaatctaacaatcttaatagttagagaaaatttttaacgacccgtaaaattcacgagtatattttattacatatcaaagttcggaataaaaaatatttttttaaaatattaagatatattaagcaacactttcatttttctccctctttttctttctcaatttcaagaatacttaattatatagttaaataaatatacactcttgtataaataactaagacaacacttttgtagtatgagttcggtaataacatcataaccagattttggcgccaaaatctgttaatatcaaacactaaccaactactatatatataccataccataccatacattgaaattgagatagaaaaagagggacaaaaatggttgagtgtgagaagaagcatgagttaagaatattgggaatttggagagatgaatgaaaaccaattaaattcaattcatgtagtgcagcaaagtaaaaccaggaatcactagtaataacaagtatcaaaacacacaagaattaacgaggttcgaacaagataatggtaaattaccttgcctacatcctcggccagaaacagccacaattatgactttgagagactttattgatcgagtttaagagattacaacttataccaactgcacaaccaggaagcttaacttctgcaattgtttactatgatggtgatgaacacaaacacagtgtcaccccaattacaacactcaaggctactcactttctctctctctttctttaaactctctctctctctccctgtctatctctctatctgttcagaagtctatgtatcaatgaatgtaaggccctttaaatactgatgttgcagctgagttcaaagtgctcgatcaccaactgtcataacagacagttggttaatatggttaagtttggtaagggcactttaggaatttga

SEQ ID NO: 35930 - DNA, 1021 bp, Cannabis sativa
gagatcgattcctccattacaatgtatcacaacaacacttggtaagaatatatatatatatatatatatatatacatgtttttgtttatatactatatatatattgatgatattaattaaccactttaattatatatgattaggaatgcaaagaagaacgagtgaaggaattagttgaagttgtaaggaaagagataatgatatcattattatcatcatgtgataataataataataatgatattgatgagttaatgaagttaattgatagtgttcaacgtttgggattatcacaccattttgagactcaaatagaacaaatgttggaaagtgtttaccaatattattattattctactacaaaacatgatctaaactactacaaacatgatctacatcatgattctattatgtttagactattaagacaacatgggtttaaggtttcatcaagtaagtatatatatatatatatctaacattttcatatatatactatatataactagtgtatgggtataagtgatgcatgtgtattattattgcaaaaatgtattatatatatatatttttttttgaataaaaaatgtattatatatatatatatatttttttttgaataaaaaatgtattatatatttattattaaagaatgtttctttttcttgttttttttgttagttatcactcttgtatatgttttattaatttattactattattattattgtaagttgtgtcccaagacaaaaagaataatattccttacttgggagcaatctataattaatatttttatggcattatagtgctcaacaacactataagtaatgccttataaatgcttaacagtttttttttaatcattattaaattaaaataaataaaatttaatatatattaaattgcactaataataatatatgatattttatagtagtataaaatacttaaaaatatattgctacataggttgaggtttttttattcctttttttgtaataattttaatagtgtttta

SEQ ID NO: 35931 - DNA, 3825 bp, Cannabis sativa
  modified_base (2812)..(2820): a, c, t, g, unknown or other
aattctcaataattaccctaagcaagatcataatcttactacgttaccaaaataaatacatatttaataaaatatgtctatttatatattatttattttccgggatattacagagatttggttcatattaatagtatattcttaggaatttttattttaagtcaagaggaagagacaaagagatatataaattgtgtattgttcataccatctaattttattttttttattttttttttatttttagtttatcttggattgatgtataactgatatgagtttctatctgtttgatagaatctgatttgggggtttctatttattttatactattgtatgttattatgtgattattttgtaatttttagtaaatttatgaagaaaatttaaaattgattacaaaatatttattttgaggtaattatgtaaaataagttttataaaaatgaaaagcataattaaaatataaaagtagaaaaaaaatggtaatctcctataattggtaaattccctaatatatatgaaacaaatccatcatatttttaaatagaggcatccacactagtacagaaatatcacacactcacactctaacttcaatacaaatctggagtgtcttacgttcttaaccagaatgtagtaccaatgtccagtgcacccttacgtacaataccccacttaccacatcacaataaatgtgtgatttctaaccacgtcgaagtacttagaacatgatcaaacagccatatacaatctatcgataaaatactatttcaccgaaactatcacattttacaatttcaatacaatttattcaacaagtctcactaggtactcaaacaatataaaaagcacaagtataaagtataattatttttccttacctcaactctgctataatttactcttacaatatcttctaggccacataaccaattaaaggacccttagaccaccgataaactcaatataattgtaattcatactatacatcaagtttaacccagaatttgactcttaaaacatttgaattaagaatactgttgttcacaaagtttttagacaatcgaaagacctttctaacggtatagagaccatcaaaatcagagttattcatactaggatttatgcatattttattaaaacagtttctttaaaatcttcgatcgtgccaatttctggatacagcccaaaaataataattttaaaaatagttacaccccgatccagacagcacttccttcaaaaaaaatatagctcttttcttaatatttaaaacaagataaagatcttttgaaatggatcaaaattgagacagatgatgagttttttctaaggacacttttttctggaacaaaacttaaaatgagataacctaaccgagtaaagataccaatttttgacaggtaagaactccgaattagggaaaggttttttcaaggaaaatatggattctcgaattatatttctaacggtacctgaatcactagaaaataatagatatcaagagaaatatcgcacttttactatggcaatatcagaaagaaatctggaaaaactataactcgacaaccagtacaaaaacatgaattgttgacatcgaaagattcagaactagggaaaacactcttcagaaaatatttagatctttaaaaccgtacctagatcactgaaaacggatctaggatgagagagagatatgatagttttacaaaacactatttctttaaaaaaacaaaaaatcgtacttgacaaaaattatacatcaaattccgaaattaaaagacaaggaaaaatttcttaccttacaaatcgaacactgtgatagaggcctcaatcaacaattttaatgactcaaaacctcgattactcttattcctttgacttggtgctctacccgtacctctagtcttagtttgattctatgttgaaagatttataattattggctatgagagttttaggaattatatatggtttagaaaggatcttaaaagtacagagtgaaatttgtattcagcatttaattaaattgtgaaaaactattagtaagagaataatatgactaactaattacatattatctaggaacctaaattttaaatcctgccatgccactatttctaaatactaatgctattcggttagtaacattaataacaatttatattatatatattattcgtacacgtgcatatacatatttatatcttatggtatatcctaaaaacaaacctatattatatatatgatttattgtaacacttatcgttacatttttcttttacctataatatcaataggtaaaatatcctttttagaatctattatttataattaattattttcttaaaataattaattaaatacttaacaagatcttttttagcaattaataataataaataatttttttacataaatctctattatatttattttaacagttaagctatttcattataatttttacgatgaaactttaatttttttttacaaaaattagacttcttcttacacaaatttgaattctcttcttgtataataaatttttaaataattaattattttaaatgatattaaattatttttttataactagaagaactaagtacgagtttttctattcgagtttaaggttgcttcattttctgggggagtttgactttgtttttcgactctggtttagttttttgagtaattgactccttatcaaaaaaaagatagaggagtttaggttttttttagaaaatacattcgacatatttcactttttaacttttaaaaatttaaataaaaaaattaaataatnnnnnnnnntaattttaaattaaagttataagtataataaaattttaattatgaaattatatgtgtattattttaaattataaagagttttgctatagaaaatttaataatttaaaggcaaaaaaattgctaaaagatccttattcaataataaattacaaaaaattaattaataattataattaatttaattttaaaatataattaatcttcattaaagttttataagaaaatatattataaggtgattattaggttataagttaattattatttattatttatttaatttctaaattaattacaatcattcaataataataatctaatggctaaaaaaatgtaatcatgatggttacatatttgatgtaaccattgaaacttcattctatatatatctgaatatactacaaaataaatatatataaataatgtatgttatcacacttaattgagagcgtattatatattatctatataccattaacttatttattatgcattatgtaaagctttcatatattatattacctcaatttcaataattaatcacattaacaatttactaacataaatcattattgctacaaataatatctcaattaataacatgcttaaactaggtaccacaaagagaaggcatatgtggcccaagtccaagctttgtaagctgttcaatcttctaaagctccggttgttgaggattctagcaaatgaagatgcttctattaaagtcgatcctacccaacttccgttagataaggcttaattctaaaatttctaacatctttctctcttcctttttatatattatttcttattcgggggccattggtccccttttggtatttacagagacaatctaaatgacttaagcgcgaggtaatttttaataacttgtatcttcttcttcacatcttttgctttaattcttttacatcactttgcctttgacaaatgctcgttgtttgtattgggttttgtgccctaaataaaaccctttacaatctgatt

SEQ ID NO: 35932 - DNA, 1600 bp, Cannabis sativa
  modified_base (50)..(58): a, c, t, g, unknown or other
  modified_base (496)..(506): a, c, t, g, unknown or other
ttgttgttgttgttgttgctgttactgttgttgttgttgttattgttgtnnnnnnnnntgttgttgttgttgttgttatattttgttggtattaaatgttattggagaacattgtcccacatgaattaaatataaaaataatgagttcatttataagaacaagacatactctactcatcacctatgtaacgccctgatacttaggcacgctacagtgattttttcaattacagtaccatctttgctaatcaaagaaattttcttgaaaatcgtgtcaaattaaaacttttgatttaatttttaaactttataaacttttacacatttatttacaaaagtcgggatcctgtttttaaagtttttacatactttcaaaatatatttagtcaggtcgcacaacgactacaaaataaacatcagatatcccgagaccgaacaccccgtcagacatgtacaacatcatcctagctctaagctcactcctgttcagccttcnnnnnnnnnnnacctacacatgaaagtagaactattagtcgatagacctagtaagaaaagcatataacaaataatataatatcgacttgtatatataggcgcccatgcacctatctacaagggttaacaaatgagcaagaacgttctttactagggtacaatcattgtaccacatacactacgtaccgacatcgtaagagtgttggtagggtttgtttcgtaccctgagtatcactaagtgatataccacacacaccctgtacctttctggacttgtgctggtaataccgtaatatactcttaaacattgtacactataccaatgcactctgtactacttccgtacaaatgtttgtagtgtactaagcataataagcatgaatatatatctatatttcacacatacatacattcgcataaatacatcacatggtctacactattcttacctcgtttccaaattcaagtgagttggccgacctgaacataaaacctcgtgttggatggatgtcgtaatcacataacataattgggtaaataacacgctcaaaactctaattcgggaaacccaacctttaactaaaggttctgccatagacaactgaaactataataccctaagaaacagggaatcacccaaccaaggctctgaaatgaacacaaatcgacgaaatgaattgttcggaaaaccagtcctagaaccggttaactggttttacaggacctagcaaactggttaatcggtttgcactgagtttctccaaacaatccaaaacctactcaaaacatgtccaaatctcaccaaaccttccagaacacctacaataacatcaaccaacataatccaagcaacagaacccaaaaaaactcacaaaatcaaaaagtgccatggatgaaccaagcttgagttttcaaactcaaacttgtgcatccatcacaccaaactcccaaaaaagcagcaagaactcaaactaaactcaaattaaacataaaaatcgaattccaactcatacaaaccctaacagcccctatacttcaaaattgcatatttaaactaaacttcaagcttaaagaaactaaagaattatggtgctaggcttacctc

SEQ ID NO: 35933 - DNA, 1422 bp, Cannabis sativa
  modified_base (325)..(325): a, c, t, g, unknown or other
cggtgggggatggttcatgggaacgaaatgagtctttaattgaattagaaagtagtatattttattggggtactataatattgaaaaattctacaatacaccattttaaaatgagtgtactgatgcaactcctaactgtttcgatatttataagaattttttagtgtaaactttttcatagtcgtatacgttatagttatttaaaccatcctgcaaaattttaagaaataaatttaacacataaaaaatagtggtcaaagagtttgttatacgcgtgactttttttcttttataggagtgtgaaataaacggtttaaacattganttgtatattgtaaattattctgaatttctcaaaattttataggatgttttaaataactataatgtacacgactatgaaaaaatttagactaaaaaattcttatagataccgaaacagttaagggttgcattcgtacacccatttaataagaacttaaatgatactttaaattctgtgttttcaaaatagtattttgagctaaatttttatgaaattaaaatttaatactaatctgaactgagtgcgttataaaactacaatttttttttttatttttagtcataaattaaaagtaaaaaagttgtaactaattataaatcattcttatgactaaagtgtccgtgactaaagatattagttataaaagttacaatttgttgtgactaaatatatttttagtaacagtataatagttgttgtgactaaaagtaaattagtgacaacttgtgtctaaatattatgttttagtcacaagtaaccttttatcgtcactaaaagttacatttgtcacaaaaaaattatgttgtggactaaaagattgtcaataaagatagttgttttgtgtagtgtgatcagaatggttatattttttatatctgttcgtgctagaaattagcttcaggttacttatattaaaaaaaattgagctcaggttattattttatactattctataaaatatagggtacactttgtataatttaataaaatagaagatccagttaataactttgcaaactgcaaggtccaaaataattttttttttttttagaaattccgaaaagtttattgaactcaaacaacactgccaagataaagttacttacaaagctttagttaaggcttccacccattcactatctattttactcaaattcttagttttcaaagagttcactttagcacaaacactattagcaatacaattaaaagtgaccttaatagtaggaagttattgctctcaaagcacattgtttctatatagtatgccaaataaaataaattgtggctgtaatgatgctcaaaagaacttttcttttacctctagaaacttttgccttccgaatccactttaggacatcatggagctctttttt

SEQ ID NO: 35934 - DNA, 1786 bp, Cannabis sativa
cacttggtctatagttcccgtggatcgaacctgcattacaattctcaattcttaaatagaaatctcgaaaagatacacccaacttatcctatgtttggtatggtggaaaaataaaaggaaagaaaagttagaagagaaggtaaaaagttttccatcccttcaaatttctttccttcttaccaaacattcagttagagatgaaaacaattagttcattttattcaaatgcaaatattgaaaaggagaacaaacaaaacaacattttcaattactccctaatgtttcataacataacaaatattaccatcaatgataaaattgtataaaatttcagctgatataaatatgtatatagttcttataggtagagtttgtagtgttgcacacctgaaatttatcggagaccatgtgtcgtaatcgttgataatagacaggaccgataaagatgttacattcgagttcttcaccataaaccccactgtataatacctcagtaccatggaaattgaatcccttctcttttaacttttcaccaagttcatcaacaagtgtcttgacgggtttcgattcagttccatcatcagcctttttaaccgaactagaaaatggagtcgcgttgacaaatttcccttccaagctacctccctatgacaagaataatctattctttagattattcaaaaacaaaaataatgacagaaggaaatgcaaaacaaacctttgcagcgattgattccataagcatgcctattgtcattcgagaaggaaatgcatgaggatttataataagatccggacgcattcctgtaatttcagaaaatggcatatcgatatcaggccacaactgcgagcagacacctttctgcccatgtcggctgctaaatttatcaccgataatgggattccttggttgtcgaaaacgtatactggcctgtttgaattaaacaacttaatatcatgatttataacttaatttggtaatatacaatagtcaagattactacataccttatgaacatttttcttggtcttcatgtcaacagaaacatagtcaacaaaagcaggttctgcaccttttcgcttgctggttcttgtatgacctgtcacctcattgtaaatggaacaaaagggttcgttcggatttatcatctgaacacgaaacgaaagagggagagaaaaaaaaagaggtcagcctaacaaccattttcgcataaacattgtatccgaaatgtaatgtgtatactacactcatattctactcttgcctaaacacgcttaaccacgggactctgataagatccaaaggcattactaatatgatttcacattgctattaaatctggtgcttaagcttattgcttgcaagttactaagtctcaattatctgttctaaaggagaaatacactctttatttatactggaacagaattacatatgggaggaggagtttcttccaaccagaaaagctcatcgtctagccaaagatactttctttgaattaaaattgcacaagaacagattatactatgtataagtaaggatataaagtcaccttctttctatgtcaagagataaaactaacctgaccaacataagggaggccatctgaatcaatcaaagaatgcattgatttatcaacattacttcttctaaacattgtttgattcctttcagacctgcttccttgatcagataaatcaattgtctctgtctgccatatataagcgtaaaattagtattcataaacaatcaactgtaattgaagaacaatttaatactgtctag

SEQ ID NO: 35935 - DNA, 2293 bp, Cannabis sativa
  modified_base (180)..(210): a, c, t, g, unknown or other
accctatgtggcatgctataagtagatagtgatggcttcaggaaaaagtgactttcacatcttgtttccttcagagaaaaacctgagcctttcactctaacctatccgccaccttcctctcttcttattcattgaaaatttcgaacctcttagtaatagaatagtgcccacacacagcannnnnnnnnnnnnnnnnnnnnnnnnnnnnnntgaagaaagacattcaacaagaatgacattcgggctcagatcttgataatactctgcgacggaataagcgttcgtgtctttccacacgacctctgtcaatatgggctctttttcttcctccccttcttaagctacccgcagctaagtattcatttaaaaagatttcatcgaaatcgtcattacattccgaaattacgatatcagtaacactcatattctcaaaaggatctggagaatttgctgaatctattgcctaaaaatatttttactagattataattgagaatgttagatgaatgagagtgtaaagtaatgtataaaatggagaagtgaaagaaaaaatagaacttggtgagtactttgatatgttaaaatatagtcgttaaaatataaccgttaaaatataatcgttaaaatatagccgttaaaatataaccgttaaaatataaccgtgaaaatataattgttaaaatatagccgttaaaatgtagccgtaaaaatatagccgttaaaagagagtggttaaaatatagaggttataatatagccgttaaaatatagtcgttaaatataaccgttaaaatatagctgctaaaatatagccattgtaatataactattaaaatatagccgttaaaatatagccgttataacatagccgttaaaatatagtcattaaaatagaaccgttaaaatatagtcgttataatatagccattacaatatagccgttaacagtcaaaatgtggttgctgaaataaaataagttcaataaaagataattcatttaataaaaatatagttgttacaattagataagaacaatacatagaaattacaaatttaaaataatacataacaattagataaaaatacataggaattacaaaatttaaaatattagtcttaatatgagctaccaaattttcatgatctttttttttgctcaggagtcatatttgacgtgtccaagaatagataatccatgtattttgccattacttgtttttattgtaccgccaccaatttctccaacgcatttgctttttgttgattaatatcattatatgtagcaagttgctcatcttgctatccctttctctttgccgccttttggccaatagggcgctcttcacaaacttcatgatcactgatgtctgcattgtatgatgaagtatatgcccctgatcttggcacctttgctctcttaacaccttctgattggtacattgcattccatttcgactcatcttttaacattctccaacagtctataattaagttaaaaatttgaattgttattttcagacttgtacatctcatgtgcattctcaataatttggtcatcagaccaaccactgtgatgtgtttgttgtactcgcttgtaacacccattgaaacgtgtcaccatttgattcatcttgtttcaatggtctttgcattgctttccagttcttcgttgatcatctttgtagtgggtgttgaagtaatttgcgatccaacctcaaaaatttgcagaagtttggtcagttcccacgacagcatccttagatgtattaagtcatgcacttatcagaagtatatttacttccttttccatttaagtttttttttttttggctttcctcttctttatgtagaactacttttgctaacccttcaacaccatgtgttgaatgagttttaaagacgaattgtgttgacgattcaacattcaaatcaatactttacttattaatgtttgaaaccatttcgggttggtttagaaaaggtgagggaaacacatgtgggagtaaatgtctttgtgtgaagattggaccatgttggggagtctcaaaagagttgaaattttggtaagggaaaaaggagattggataatttgggttgaagtgagaatattattaattaaaattttaggggttgttaaatggagcattatggttaaattgagaaaatagaaaaattggattttgagagttggtaaatggaaaattttggttaattagaaaatattacaaatttgaattttgtgggttggtttgtggagaattttgataattttggttggattgagaagattgaa

SEQ ID NO: 35936 - DNA, 1334 bp, Cannabis sativa
cataaaatgcagtttctgatatttattaattactaaatctgattatattgaaatgggtttcatttagggcacaaaacccaacagctgttctcaggacgcaggggtcattctccattgttcccggcgagattctcgctgatggaacttggtgggcactttccatctcttcatcaggttgctcttgagatctttgggttaacacgattttttccagtgaaattgcttcaagactttggctaaagctctcaatgaatgcaccaaaacgttgactggatttttagcaaaccgaagcggagtcgtaataagtgagatttaaacaaaaataaaagtcataaatgcagttaataacaccaaaatttgcaataaatgtaaataaaagacactggaattttaagaggtttggctccagatgtcggcagtagcctactccccttaagttttattgatctgagttagaaaagtcaagaacaaactcttgattgcaatgaatgagaagtatttattttactaagtgtttcagattgtggatccaactcccaggtcatgggtgagcccttatataggggaggggggtcgatgcttctcgctttaggagacgcgaccaacgcggaactatctataccgtctccttgatttttggaggtagttgaactttgatttttatgataatatcccaatattttcatgggttgacaagtgtctttgagccttttgtgggatttgaacatttgaaggagctactgatgatgagggtcccttatgagtgtgacatggtcgtcaaccacctttggggatgaagtccatacttagggacaacacccccgggaccctcgttgaggtgggtgacaaccatcctttttggctgacccccccaagacccaacttgaggggggatgacaaccaccatcgttgggtgaccaccccaagacccaacttgaagggggtgggccacaaccgccatcggttggtgccctacgagacccaaattgagggggtgacaaccaccatcgttgggtgaccccccgagacccaacttgaggggggtgacaaccaccatcgttgggtgaccccccgagacccaacttgggtggggggtgacaaccaccatcgttgggtgacctcccgggacctaacttgctcgtttttagtagttatggtgtaatatggatgtccccatatacctcagagaatgtcattatatttatgataaaatacatcacttgtatcatgacggcgtaggtggtaaaggtatacccgtagaccaaccctttaggaggtaaggggtagtagtatataccccctagactaacttggcatgtgggtgcgtggtgatt

SEQ ID NO: 35937 - DNA, 4256 bp, Cannabis sativa
ttttgcagaagctttgaatgtcgacttaccttaaatttatgaacaaattttaataaagaaaagaaagttggaggaatatgagacagtgatacttaccgataaatgcagtttactatgtcacttgagggcaagtatattaatagtggctctataaatacaaatatatacactgtagttaattttatcagatttatattctcataaatcataatgacatgacaatagattaaaaattttttgttataatatagtagaagaaccttgaattagtcttaattgaaacaagggtagcagccacagaatgaaagcaaaggtgaggagaggaccttccttggaatattcccacgccctctcctcaatcctcgtgcctttagtttcaatttaaattctattctattcctctcgaatattcccttattgccgcgtttttagcctttcccttaacctaatattaatacgtttcaacgcatggtcaaccttttcaaactcaaaaacagtcctcaaatctcacgattttctacaattatttatacgaacattgttggaacgtgacattaattaattattcatacaatatcgtattaattccaaaatacacattacacccaatttcctgactatataaaccagtttcctcctcctctgtttctcactcccatcccaacactaagtaaaaatatttagcttctataatataagttttcttgttcgtcgtttatcggcaaactaagtcgttttctcaaaagaaattaattaatggctggaaataccattgtgatttttgactttgacaagaccataatcgaatgtgacagtgataattgggtggtcgatgaattgggtgccactgatctattcaatcagcttctccctacaatgccatggaactctctcatggtaattacatgtttcttttctattgttggatctatttttcttctctttttggtttctgatccgtacgttgaaaatgaaaaatttcaggataggatgatgaaggagcttcatgatcaaggaaaaaccattgatgagattgctgaagttcttaatcggatcccgatacatcccagagttgtccctgccattaaggccgcttatgctcttgggtatgtatataaatataacacttgtttttttttttcctttttcttgaagcttttcatgaatttgttttcttataattatcttttttgtgctgtatttcagatgtgaattgaggattgttagtgatgcgaatctgttctttattgaaacaatgttgaagcatcttgggttgagggagtacttttcagagattaacaccaatctcagctttgttgatgaacaaggaagacttaggattcaaccttttcatgatttcaaaaactcctcacatggatgcactactggcacttgccctcctaacatgtgcaaggtatatatatatttatatatatactgttgtttttgtctattctttttctgatcttattccttcttcagtattaaaatccaaaaaaataaaatatattacattaagtccacaagaacatacacatagtcacatactctttaatttttaactatgacactatgaccccacataatatatatatataatagtactatgcatatgtttttccatatcataattaattaatggtatttattatttttggaatttgcagggtttgattatagaaagaatacaagctactgagggaaacaaaagaataatttatttgggtgatggagctggtgactattgcccaagcttgaagctgaaagagagtgattttatgatgccaaggaagaatttcccagtttgggacttgatttccaataacccacttctcatcaaggccaaaatccatgaatggagtgatggtgaggagtttgagaaggttctgctcagccttattgacactatttccactgatgagaaatctgctttcacttcaacttacttaaaaatgccaagtaatattgatgtttctgccatacccaaagtcctcccagttcagcagtagatcaaataccgtatggggatttagagatagagactagattggctaattaagcttataattaactaagcattaaataagtaaaaattttgacttatttttattgtttaaattattattggataaaaaataattataatattattttattgtctaaacccctctaaagaaaaagactgttttaactttggaagttaagaaatagcttcacatcatatacttactgagatctgtgctcggatttttatttattccaataagtgtttgtgtttttagacttctaagaattctgtcttaattttatgtgtatgtatgctctttcatctaataaactaataacaactcaaaggaagaaaaaaaagattccaatgaagttgaccatgatttaattcacgcccatgatcgtttgtttgccttctacgtaagtaacttcgtgttttttttactatcgaaaacaaaaaattaaaaaacaattcaatatttttttcgaacctaattacctatattatatcaattggctagtaagaatcatagatttcaattctacaattgagaccttgtgttttatacatatattaagaaaatattgatataacgtaaattattggtttttggtgatattgggtgaattttaattcaactaatatgatttttggtgctttttgggtgaattttcaaagatgggtatatgccattagtctgcctacgtcttttcgatacgtgaatagttatagtcttaatttttcataatatgaaagtgtgtatattatagttattaatttaatatattataaaatatttgatcagaaatttaaaatgatttaagatatagaaagtatgttttaaagtatttatttaacacgaataaaataaaaaaaaaaatatgtgcaatatgccttttgaattttgtttttgataagttaaattattttgaatttttaaaaaatttaaaggatattttaaataaataattaaatataatatacaatattgtataaaaatataaagattaaaattatttggatatcagtagcccatatagttattaattttgtggagttatgtcaaatatttaaagtaaacggaataagtgatgatactatccgcttgagactatttccattctcgctgagggaacgagccaaaagttggttggtattcttgccacccaactccattgctacatggattgatttggcgacaaagttcttgttaaagtgttttcctccaactaaagctgccaagccgttaggagaaattaataatttttgtcaaatggacaatgaatctctctatgaggcgtgggagaggttcaaggatctcatcagaaaatgtccacatcacgagatcgaaaagtgaatgttggttcacaatttttacaatgggttgattggtaataccagaacagttatagatgttgcagcttttatgcaaaaaagtgcaaacgaggtgtatgtactgctcgaagaaatagctatgaacaaccaacaatgaccaactgaaagaagtcaaacgaagaagtttgcttgtatgcacgaggtagatgtcatcaccaagttgacagcccaagaagaggccctgacgaaattgatgactgctcaagcgaaacagggctcaagttacttatgagctatgtgggggccctcacacatatggcacatgcccggtagatgtgaatagtttgccaatggatcaagcaaaagccatttgggaactattttcaaaacaataattatgagcacaagcaataagggctctaccagcagagaaatcagtctcaacaaaaccaacaacaaccgcaacaacaaagtcctagtggaggctaaaatatccaagctgatttattgctccaattcatgatggagactagagcctccattaaaactttagaaactcaaatgggatagttgactgctcaaattggcaactgtacttaagagaattcacttagtattagtgaggtaaagtgcaaagagcagtatcaagcaatttccttgaggagtggaaagagttatgaggggtcaagagttgagcagacagttgaagttgtagattaggatcaacaggcacaggttgaagttgataagaggtaaatggaagagcaggttaattgatgatttgccggttaatgaaactacaccgcctataaaaattgagcaccatataaaaatttcgtacccacaaagacattacaagaataaattggataaacagtttttaaattttcttgaaatatttaagaagctgcac

SEQ ID NO: 35938 - DNA, 1503 bp, Cannabis sativa
gtagtaactttaaaaacgggatcctagattatgtatagtaactttaaagttaattatgaaaatttaaattaatcacgtttttttataaaccctttgattagtaagagaatgcatggtattaataaatcacaataacaagcctaaactagtagggtgttacaatttagtatcaaagccactaggttatcttctgaagatcgtcaagatatgtagaatcatcatcaaagttatgctcaacttaaggttcagtaagccttttatgctttagtagttttctttattagtatgttataagaaaagtcttataggaagcatattattagcctaatagctgaataggcgtatattttattttctcaagtaagcggtaattagaatttaattttgacagctattaaatgtcaaaatattacatatttcatagtataaaaatacaaagttgattaaattttaaataatattttcatgaaattaaagttatatatttttacgttgaaaatattttatttaagattaaatttatctttgtttataaataataattagtatttatggcataatgaagaaaaaaaatagaaagttaagaaaatatattatttttatttaaagaattacaaattaattagattttaaataaatatttttattaaaattattgtgatatattttatgttgaaaaaatttatttttgatttaattttgtttgtgtttgaagaagaaaataacatttatggaatggaaaagaaaaaaaaaataaaaaaatgatgaaaatatggcccaaagaaggagaaaatggtattttggaaacccaaaatttgagccaaaaagcctaaagaattggcctaaaaagggcccaaaatctctccctagtcgtggcgggctgtcatttgtttgtagaaggtgcatcagcgccttgtctcctctgaagccccatgcgcgcgtgaagcacacggacgctcctggtctgtgtgttttgtccactcacccaatcgagagtgggcttcctccatctgtgctctctaaggctaaaatgcctttttttttctttccttcagcatgtgacaaggggcacataaatggccaacttgttctcttttcaaccaaccaacaaccgacacatggcactgactcatcaaaggcaagcaatccaattgtgacacgtggcaggtctgaattaaactattgggtaattgcatttttatccacatgcaatttataataagtttaatgatgcattagttcttttatcttcctataaatagaagcttaggtttctagaaattgatacagttttagatagaaaaatttagagaaaacgttcgaaacgctcagtattagtttaccgctattcttagttaattttcttatgggaatctaagttcccttattattgagatagacgatgaaacctagtgtatttaattaagtattttttttattctcagtacaatatatgcttatgatttttgtttcttaaaataatttttttcatctttaatatca

SEQ ID NO: 35939 - DNA, 1314 bp, Cannabis sativa
ctttctattttctaataagggtgcctttgaaactaacaatataattattaggtaatgtaattatttttttaaatttaagtgatgtaatcaaaatggtagtaattacacattagagtaactacgttttattttaaaatatatttttcattttcatgtttgacaaataaattagtaattatatagtttaataatattaattatctaaaaattgtactatattgtaattacaccaaattctgacgggagactatgagaattggagagtgtaactgagacttcttaattacctctaattacataattagtgtgatattatcaggttgaacaaatacgtcaaactttataattactccaaattacaataatttcaattacaaagtggctttccatacatgctctaaattcaaatgtgtaaatcttgaaaatatcaaaaatatccaagccaaaaaaatgtatatatatattcataaaaaaattatttttaaggttccgttgagttaggaatcgagctccgtcaagccaaaattttacttttgtttttttatacaaatgcaaatgattattttgaattttatttttatacggtaaattatttttaaaaaaaaattcttaaaataataatacttttattatagctcataaaaaatttggattattagattttgcatgaaaataataatactcgagtgatgctcttaatgaaagtaccaaaatattaacattaaaaagcgatcaactatgtaccgtctcataagcggtagcaaccaacgaatgttgaacataaaataaaaagagaacaccacaattatagtagttcactttccttgacgtcaaggtaacgaagctacgtctacttagaacttttattatcacaaaagtcaattgccttacgagaaaactcaggaaaaaatgactaagtctagcttcacttcacaatttctaaagagagaaagtgtgaagagagagaagctctgaccttgtagagagaatgtaaagtgtgaataatgagctaatgaactcttctattataggaaatgaggtcaaattaaattacaataaaataatagaaaaattcgtacaaaattctttgaaaattctatactagcttgtgagttaattttgaggcccgaactgtcaaaattgcggcagagatgtgagacacacttggatctgtcttgaaaatagattttattggacacttgaatcgagttatttggataaaaatggagaaagttacggccatcttattaagtggtgtgcactgctgaaaaagtgactgcgagatcaagctaacaccaagtttttacgtggttt

SEQ ID NO: 35940 - DNA, 1324 bp, Cannabis sativa
  modified_base (219)..(223): a, c, t, g, unknown or other
gaagggaaatacttcctctccaagttcatagccctataaatagtgatgcatgctactgggcaaagggttcaaagattttacctaagagatattatttgagaattcatattcagagataccgttgtaagagctataagaaaaggaacctttctccttgttcttgagtcaatacaaataacgaggattaggctattaccaaactgctcggggctgaacctnnnnnaaattcttgtgtctttacattgctgtactatatatcaatcgctataaattacttatcgcttactaaactagactcactgtcgttggctaaaagcgaggtcaacagggccaaatactagttgtgctaaaaaatagagcgcttatggccaaagatacaaacgtgaaggccctggggctaaaaataaagtaaatgttctaaaaaggcctcaagccacataggacatgaaagtagtgttctaaaaaggcctcatgccacataggacacgaaagtaaagttccaaaaaggccacatgccacatggaacacaaaagagagtaatgttcgaaagccgaaaggccatcggccatgaaaagccacatgctatgcagaacatgaaaatattgtttgtgcgatactaatataatgctgaatgctggtaataaaaatgttgtttaaatgtgtgcaggggcagaaggagctgaatctagagtcgcgagatcgagatccacagagtccaagctagccccatcatcaccatgttgggtagcgtgtaggccaactcctcatcacgtgtcctcaatgatggcccctctcaataggcagcaacctggtctgtctccatcaagatctcaaacagtgcctttctacgggccaatcttctctccataaaagccgtactgcccatgtacgacagtttagctcaagtgttgtgcaactagaactcataggtaagttcaaaggataggttgacatactccttcctaatggcctgttggccatcaagagcctcctgcaacttcttcctaagatcatcaaggttagtttgcaacccaaagatgagggcagtatgggcagtgttctctacattcctagcgctaagcatggtctctgttatcccaagttttgcactctgacatggcatcacgagaatggtgacacgtggagtccacttgggacatctgctggggaagataggctgagcaggatgcctcgctggcatgcccaaagcaaggtattcagttatccacgcaggcaatcaacacttagcgaatttagctttcgcatcatgagtaatcagctcaatccctataactcagggatcaacttacgtggatatggcata

SEQ ID NO: 35941 - DNA, 1354 bp, Cannabis sativa
aagttacactgtcaaaactagcccccaatttatcagcagccagcctaatcaactacaatccaaaaaaataatcggatcaaaactagttagaagtatggtaccagcaataattaatcgtaaaaccctaaatcacaagtaagacccaaattctattgaattttctttacaataatcaactaattctcacccagtagtgcttcgacagagcctcagcagcagcctcacccttctccctggccgactcgatcttatgattgcccaagctcaagatcgtcgcggctcggatctgatccttttcaggatcatcgcgaacttctgaattcgaagcgctgatcgccagggcaagttgaaactggaactcctcctcggacgacatataatcagaccgagccgttgacggtggagtggtgttgttggtgctcacagtgttgacattggtaaacggcgacggggagggggaagatgaagcactcccgggagaattagcggattgctgagtggaggcgttgcgatgatcggaagaaaatgatggcggagtaaccggaatcgatggcgaagtagctggaatcgaagtcgaagtcgaggtcgaaccttcggtggacgatcgattgggctcgtggctactccctatgtggagcttcttgaaaatgtgtttcatctttatttacttggttgattttgtgagattgaattttcagtatttcactagttttctgggaaactttctcggcaaatttctattgcactttctcggctgtgttctcgttttgaagtatataaagaccagagtcaatcaacgctgaggggaagagagagaggaaagtgtcatgtgtagaaatgaatagaaaggagggaaaacttaagggagtgatgttatatggtgtgaactgtgaagccaagccaattataataaagaaagaaagaaaaggcttggttttcaaaagaaaccacaacaacaatgacatgatctcttttttattagtactctagaactagattgacacgcttttactttgtaatattatttattttgttcagaattttcacttgtaaattgtattttgaaattatcttctaatcgaactgccatgctggcaatttatgtcagacatatttgcttacatggcctcattatttttcaccatcttttttttttttgtttgaaaaaagacattttataaattaaaagttagacctcacggtcaagtatggacatcacatctaccctaccgaaaatagaaacataagcctacctggccacattatgagctaagtaattacaagttctgggaataaacgaaaaattacaacttaacataaaagtagaaagttttttacaatgatgcgcatagtt

SEQ ID NO: 35942 - DNA, 1412 bp, Cannabis sativa
ttttttttttttttttataatcctataaatggtgctctttattttttgcactaattatgatgacaaatatgcttgtattctttctctactataaatatagtaataaattcatcaaatattaactatagggcatttgatatgagatttaaatttgatagaaatatgaatgtaaaaattaaattaaattttaatgatcaaagaatttagcttaatttttaaaattaaaatagtagtaatataaatcccctccaatacatgtgttttcatattacctttatatgaaaatacgattaaaataagaatgatatttcaatattttaaaataaaaataaataaataaatagaataaaaattgtttcactgacctaataaacatttattttcttgtctaaaaaaatattatttattaaaagcaaccactttcattatgcctgcaagttttgtaatttataaaataagaatgttgttagactggaatactacaataccacagagatagaccatggctgcagaaacacacaaagatgagctaatatggataccaaaagaggatgaagaagagcgagcaagagttgatatctataaatacatattcggatttgtagaaatggctgtagtgaaatgtgccattgagctcggaatagctgacgccatcgaaagccatggaagccccatgtctctcctggaattatcatcagccttaggctgtgctgctccagcccttcttcgcatcatgaggtttttaacaaaccgaaaactattcaaagagatcagaataaacgaaaatgttcaagactctgagcagcctagtttatacgcgcaaactgctctttctcgccttatcctgaggtctggcgagaaaagcatggcgacgttcgtgttgatggagagtagccctcccatgctggctccatggcacggcctaagtgcccgcgtcaagactgaagttgatgattcttcagcgccttcaccatttgaagtggccaacggcaaagatgtgtggagctacgcggcagcgaatcccggccacagccagctcattaacgaagcgatggcatgcaatgctagggtgacggtggcagcaatattggatggttgtttggacgtgtttgatgggattggtaccatcgtcgacgttggcggcggtaatgggacagctttgcggatgttggttagggcttgtccttggattcgaggcatcaactttgatcttcctcatgttgtgtctgttgcgctaaaatctgagggtgttgagcatgttggtggtgacatgtttaagtttgttcctaaagctgatgctgctttcctcatggtaataattactataattatatctatgataaagtctttaattaattagttggtcttactttttctttttcttttttacataatattacagtcggttcttc

SEQ ID NO: 35943 - DNA, 3303 bp, Cannabis sativa
  modified_base (2674)..(2678): a, c, t, g, unknown or other
tggctgaatgatgaaatctttcttcagttaaggcacttgagaatttggcaaactattgtcttgaagcttgcttcaagccatacaataatttttgcaatttgcatactgcatttggaggtaactcccccttaggtctacccttgaggtagagacatatacacattttcatggagatcaccatgtaggaaagcattgttgacatctaattgatgtagatgccaacctttgattgctggaagggacataaccagtttgacagtaaccaatttagttactggagcaaatgtgtttgtataatcgatcccctccagttggatgtaacccttagaaatcaacctggccttaaatctctctacactcccatcaacattgattttgatcttatagacccatttacagccaaagacatgctgatcagcaggcaaaaagacaactatccatgtgtgatttttctccaaagcttttatttcagtatccatagctttgtcccattcaggtattccttgggcttgactgaaggttgttggtttaaaatggcttgatatagctagaacattagctctgtaggctaaagacaacctgtggtacccaagaacctgagacaagggatggttagtaacaaaagaggcctgagaagaagcaatagtgttgttagtggccatataacaatgatattcattaagataagagggtttagtgacttgtcttcctaatctaataatgaggagagacattataagtagtaaaaacatcagaagaactaggcatgacagattcattaacagtttgggaagtacctgcatcctgggaattatttgaccctactatatgagaaaattcagaaagatgcatagcctataatgtgatgattcttcaggatctcttgaagaattataatagaaaaaatgtttctcgtcagtgtgccatcaaaattgatattagcaaagcctatgacacggtaaattaggacttccttgaagctctgttgaatgctttcaatcttcctcaaaggtttgttaaattagtgatgacatgtgttagatcttcccattactcgattatattgaatggtagaatccaaaatagttttaaaggagaaaaaaggcttagacaagggaacccctatcccctttgctttttgttctaatcatggattacttgacaagtactctctagattgttgcccataattccttattcaggttccaccctatgtgtaaaagcttaaaaatcattaatatttgatttgctggtgatttaatggtgtttagcaaagggtctaggcagccgatattggttcttaaaaaggctcttgatgctttcagctcttcatcaagatttcatattaatatagaaatctcaaatttactttggtggtatggaaactaatgagaagctcaatatcctccaggttcttaaactgtctgaaggaaccttccctctcaaatatttgggagttcctttaagaccaactaaatgcaaggcttaagactatgatgttactatcaaaaagataagatagaggttgcattcctggtctattagacatctctcttttgcaggaagagtccaattgattcactctattcttcttggactttgcaactattggatgaaacatttttgttcttccccaaagcatcattaaggaggtagagaaattatacagagggtttcttcggggcctaactggtaacaagaaaaaaattcatgtagcatgttaggagaaagtttgtctttcgaaggcttaggagatcttgggttcaaagatggagctaagtggaatcaagccaaccttgcaaagtatatttgggacatatcagcaaagagatatattctttgagttaaatagattattaacatttatctgaagaacatctccttttggtcctatgaattgaaacaagacacgagctggtattggcgcaagcattgccgtttgagacttaaatttttggaggttgaaattgcaatctttgcaggtaaactcaaaacaagaagactatatataatagctctcttcatcggcagcaagttccctaccatagagctgtttggaactctttgacgctacccaagcatcaatttgttttatggcaagctgtgaatcatcaacttttaacaagagtaaacttgttaacattttaggttgtgatggacaccattgattgtccggtgtgtgctgatggaatgataactcatgaacacctattttttgagtgttctctgtctcacaggtggtcagacttgtctttgattggctgggcaaaaatgcttcgccattggattacttgggatggttcaattggttatctctgtcttctttgagtttactgtaggctacagatatttctatatttgcagctacttattatagcatttgggtcaacaaaaaataaatgtactttttagggcttttttaatagggaaatttgcggtaaaagtcctcaaaaagtttagtttgatacagatatatcccgaacctcgaaaaatagcggtaatagtcctcaaggtcatgttgtttatttgtccgttagtcctaattttaactgagccgtttattttttcaaaattgccacgtgtcgaaatattattggtccaaattattattttaattttaaaaaattaaaaaaaataatttataaataaaattttttctttttctttttttttnnnnnttttttttttctttcttttcttattcgtcttcttcgtcgtcttttcactgccagacaagattcaaccatatatggtggatcaatgattcaccaccctgcaagttcaaccatatataatcaaacaagattcaaccatggaaattccccccatagaataaaactagtaatacccatttagatatataccaaacattcaaaggattagtaaccgtaagcccgacagatcttaacggcgcgatgaattcgagaacggaggcgtcgctagtgacgagatcttcgatgatgaggcagatttggtccgatttgaagtgtccttcgatggctttggcggtgccgtaatccttgacctccttgcggcgcatgagcatggggatgttattggagattgaaatgcaggtagcgatgggaagagctatgtagggaacaccgcagacgacgtcgtatttggtggaggaagggattgaggggattagggtttgggaggaacgtctatgtagattggggaagaaatgcctgatttgagcttgaagttatcaaatttaacggctaagatttcgtggagctttaggatgagagattccattgacggtggcgatgaaggtaaaggaaaaagctttagggtcta

SEQ ID NO: 35944 - DNA, 2548 bp, Cannabis sativa
tttgttttctaactcactgattcgcaattggatcggatccacttgcttttgattggaattgagttgtttgcgtaaatcaggcttccttcgattcaattattcacgaagatacggccatcttcgatcataatttctcgttgaccttgtatctgagtaactctaaaattgaaggctcctagttgtgctcatactctcttgatcattactgtggagagtcctattaccccctcgcgtagattgactgcgatctcgagatcttgtacgccccgagttagaacttgcctcgtcacgcacttgccttctcctttaggaaattttgatacatgtcccctgctggggtgtgtatacgcctcctccctattagtgcaagaaggacattgacagtgttttggtggtaacccaattttcctaggttgagtcccaagatttctcacgttaccacgagggagttcctgtttcctaatcctgggttaccttcttttcccgtttctacgagaagactccggtaaatcattgttttcattcccttaggttgtgaatccctagtgtaacaccctaacaattaggcacgtcatgacaaccaattaagaaaccctaatcccctaaatcgagattactagaaagaaaagcgcgtgaaatttaaactttaatcgataacattatgaaattaaaacttgtaataactttaactttacaatcaaaaattacatgtttcaggatcccaaaaatattttacaaaatattacaagttttttcactagccgacctaagcggcaaaatcaaagttacaaaagttcatcacttgtagaccccaacccgcttggtctagtgttgcccgagcatgtacatacatcgcccagatcttgccttcatggctaatcagagacaaatttaccctttcctacacaatagagcacccatgagccaagcccagcaagacattataaaatataaataatcataattaacacctaatataaacattaatgccatttcacttttgtctgtatgacacagacctacatgttacgctcacacgcctatttatgcctatgtgttatagacctacgtgttacgctcaataaggccttagaatggttcactgatattgccttgaacacataaccctaaatctcaatatacacatatttaacatggcatagcatttacacattaataatcactatagtaataaccctaggtcattaaaccgctcatgttagggtaataaccctaattctggttcctaattactcacatatatcattttcaatataagcaccaccacgcataactctacatgctaactactgtcttacctgatgtcccgcacacgtggagattccaaatgcctgggtgctcctgaccaagtgccggttatcctagtcacaaattatgggattcataagtatagagttaatccctaaatctactttcacataatataaaattggcattcaaaatacaaataatcacatagagctcagattgttcctcttgagtgttctgggggttttcctgagccatctccagcctcttagttcttgagcctcgatgtctgcctcgtggccttctcactccaggatcaggttggttcattgtgtttttttcctgagtcgccctaactacgactgcctccctctccaactaagtgttttgatggttagcctcggtcagtcgttgttagagttggcgattttccaattcagccaatagcacgtacctggtgggatcataggcatcctcactctttggtatataaccaccaacttcagtattgattccctcattcccaatttttgggttttgatcattatcactttggcttcttcttgaacatgttgatggtgttgaacgcgttgttcgttaattgggtggcctccgtgagcccataggctcttttccaggacgacgattggtctcttcaagacgattgtttttgttttcctcattattagccatgaagaaaaaattctttcttctttggttaggagggatttttctaagcttttatcacgtaggctctcaatgaaagcgccaaattgttaacgcagatttttattaacgattatgagcctattttcgtaatagattagacatagaaactatgagatattttagaagaataattgaaataaaaataacacgaggtttttacgtggttttgcagttaactctacatagtctacgagtctatcttattcagatatttctggatacagaattagtttttacaatcaatatattgctttttctctctaaggttttttgtccccttttttgtataatctgcccttatttatagtaatataagttggcaattaattacatttaagttcaaatcccataacaatattctccaaaattgtgggctttaattacgctccacttaaatacgtgcagttaattttaaaaaatcacacacctgctatttaaaccgtctttgaggaggtcaatgctaacgtggattaggacacgctgccaaatgtaccttgctgaggcgtctcgcctagtacataagtgagtgacttagtttacttatattcca

SEQ ID NO: 35945 - DNA, 2911 bp, Cannabis sativa
catacaaacactacacaactatttcataaataatataattattctaagagcatatcaaaaatatcaagaacaccaagaacacgataacattttaaacgataaaaggaatgttagaaacacttaccaacaagaagaagacttcctagcctttcatcacccaaagcttcctacaacaccactttaaaataaaaagaagacaagtgacagattaaaattagtgaaccctcttatgtagaacaataacactatagaggagtgaagatctaagtttcaaagatactagtactcattctcaaaacccattgccagccctatacacaatctgacgtggttcatgagtatatatatacacacacactcttgtgatcatctcacttgtaccaacaatagatcactatgaaaataatttcttacattcaacaaaaattatttcaagtgaaatacaacaagctgaggcactacattatctagtttacactgacattcgtactatgttacagcaaagaacataaaaatatatatatggaatggtcactattgttcatacaatgcttgtaaatataataatagtgtcctcactcatggatatacatgaagtagaagcaatctcaatggagagccttagttgaaacagaccattagggcacctccaacgctagcaacgttggtagggcccattttcagttttataattattaagccttacactaaccaatcaaaaaaaaaaaagaaaaaaaaaattaaaaaaatatgagtatcggtgctggacaggagcaatatgcttatattatccatttaaaaagtcaataattttgggcaaatagacccacactttctgacagtcacaagtatagcaactcccattggagttgcacttactgacataaatatatatgagtacaaacactttatcagggtacaaaaataaattcttgctcacttgtaaaaacttgaccatcatccaacacgttattagagtcagtccctataatggtttatttgcatattggtcacctcacaaatatattgactcttcagccttgcccaagcttattatattatacaaccataattagggattgttatccttaaatcaatatatgtgcaagtcaaacctaaggttaatatagtgcttgctctgactacatcatagctcgaaaagagtggacatgcctaactaaagattatatgctatcttccaaaggacaactttatataacacatatataacactttagaggtacaactagccttatatatatatgcccttacacaataaaagtaactcacgtattgctgatatgagatgactcaattcacacatgaaaaatacatatacatagtgggctatcccacaactaaatgtacttacacattatcaactttgtcttggacatgagctattttcctcttcaaaattatcaagttatttacgccttctataaaatatgaaataacaatgtttggttatgtttatatacaacttttatcacatgtccattaatctatcaaagttgacaatgtactctccactcacgtcaaacataaaagactttttttatttcttcttgtccaattaaatccaatatgacaaaaggtaaaatccacatctatgagctcacctactagacttggaccgctcgccaatgtacaaaattatcactaagcttgctactaggcctcatcatatattgtagaagctagaaatgacttataaaaactaatgttcataaactgtgacatctttaaacagatccaagttgagtaggtcctcgagataaaattatatatggcttgtttataacgagatatattgaaaaaatattcacatataaatattcatacaagaaagttggcctttaattactcttgagggcccaagccctcacaatttaattaaactaactactccaccttatgttggtccaaccatttcaaatttaatatgatgctacaagcactccgagtcaatcatgcacacctacgagtaatgctctttaacttgagtataactcaacttaaagagtacgggacaaactgtagtggctaaaaattgctctaagcccaacgaaaaggcccaacgatcgaagtatttgcaaagcctacttataagtctaaaaataagatacctgtaagctcaatggctcacatgggccacacccaatccatgtctttttggtcatacttgtatttgaatgtccagcccacaataaagtttgaccccaaagtataatgttagggttgacacatgaaggaagaagaatgttaagtttcccaactaacccacaaaaataacaatcttccctagcatagcagagcgagaagatcaaccctccaagtgatacgttgataatatgctcatctggcaactaacctaaaagatgacgcacatccctagaaaagtgaaagaagaccatttctctaaggatggaccacgtttcaagagatagtcgttttcctaagataataaatagaccctcactgggactgaggggggatcgatcgaataatatacgaatattcactctctttctagagttttatgactagacctatcatttctctacgatctgacgtattctttctcattctggtgagcaaagtttgacagtcgatcatcgcataaccattaacacgggaagtatttatttatatttcttaatttcttttttactttgtactataagtttactgacttgaccgtcggagtgccttcggtcgccaccaccttggtgtcccaaggtttcacagttatcctttgtctttgttccgcacgctgtcgatgcccttaaatgttcatttcgatcattgtagattttagcatttacagtatgtatacataatttaatagtggtatatataattttgttagtatgatatatatatattttttaagtattaatttaatatt

SEQ ID NO: 35946 - DNA, 3752 bp, Cannabis sativa
atgataagatattgcatgttcctattcttgggaagtcgttcactcctgtgcatggcaagtctcttccattgtcagttatggatgtttctgctacgggtaaggccttagcattttttgccccctcttccgtgactgctccttcagctcctctagaaggggtcaatcctgcatcttggaaaaaccaattgttctcaaaggtaaatgagtttgctgacaattatgctcgtgaccaactccaccagcgtcagtttgaaaaaacagttattgatgtactgactgtcatgactgaaatgttaaaatcttttgaagcatgtccagatattcctgcccatgatgacttctctagttccccagatgatggtggtgccttttctgtacattcctttgtactttctccatcgaatgtgggtacagatccatttgatactactgaccatatttccttcattcttgactctactcttcagccatcttctgtgggtgatgatcatggttcttccactggtgctattgctccaaaaaagacaagtttagctgatgtccagggggagcaacatgttgctcatgatcaaactcgatctactactgctgctatcttgggagagcaagtgagtgtacgtgatcaaaattattttacaacagttggtgtccaggggtagacctccaatgctgctcagtcttctactcctattgatgatattaccatagtacatggctctgctacctctcttgttgcctattccagtagcgactaattatgatcatcgagggggagattaagcacttcattttttgtataaaggctgttcactttgtccatattttatgtttagacttttgactagttgtttgtgattctgtttgtaaaactttaccttttcgcttttgtgatagtcttgctggttttgtgtgtgatattgtgtctctctctgtattttgtgtatggtggttgatcataatttgccaagggggagattgtaagtgcaatagtttttgcatggcaaattatgtcgttcctcgtttgttcagttttctttctttccatgattaatgtcttagctttttacattagtcatctaagttgtcatctttcatctgttttgtcttggtgacttttattgtctgccatgtcagctttcagcttttatatttgtttcgtatttgagtcagtgccagctggattcaactgtggttgttagttaaccgagccgtttctttttcaactaagtatataatattctattgttgctttttctaactaactctctcatctttgatagaatcgttcttgattcttgctctgctagggaaaaatatttctctggtgtttctgtgtgatatgtagatgaaaattcagtgaatcttcaaaaggttgaagaaggagtttgaatctacgttgtttgaggagagttcagactaaattgctgaaggatcttcagcttggtggaagcgaggagagcttgctttcttggatctaagtgtgcttagatctgttatcttgattatgttcaataattaggtaactagtcatttcagattatgtagtttgatttgtaaaatcagagctggtgtatgtaattgaattgatttaatagtggatgttactttacccagttcttggggacccaggcactactcggttggaatgtgtttccaaaagaagcttgtaaatttggtgttcattgatttagctttcttgtcttaattcttcgtaatatgcatttaagttcaattacttagctatcggagatattagaactttcaaagtatttccccaattggtttttttcacgcaacaaactgaccgcgtacaattttgagacttttgtcggcgaactcatttgctagaaaaagtaaaaaaaaacacaaaagatagcgtattatggaattgggttctacatcttttgccggtaaatttagattatttcaccggcataagtttttaattttttcgggaaattagtgcgtcttcaaaagtgttacctttgagaaaaaataactcaccaattgtgaaatttttttaattcgtcggtaaatgtgaatttttgctggagaaattcaaaaaagtctgaattacattactatttttaatatttaagacaatatatatgtatatatcgttgccaaagaatgttgatgtaaacctaaatatattatatgtatacatataagatgaaaaagtgtctctttcttgtgggtaggtttggcagataaataattccctagggttctccccccatcaatgaaaaagaatctaaacaaaggaaaagataggaaagggaaaaagaaaaagaaaatatagaaggaaagctatagaaagaaagaaaaagaaagaaagaaagctagagaaaccttcacccactttcaaactttagaaaatttcttttggctatccaaaaaattgtgtgaccacaatatatcttctaataaaacctaagaaaaccttttttggggtataggtgtggaatcgaaaaacccacaagtttcactttttcattccacttagcaataataaatataaatatatatttcttttcaaattagttttgtattaatcaaccttctaatgcatatcatcatgattcatggtatctctaagagttgtctcataaatttttattgaaatcgaaacatttaattcttttttttttctttttaaagcgtcatgctgatgcatatgcatacaaaagaaagataatattataatataatatatatatgtataattatttttaattagtgacattttgtggggaacatttttgcttagtcgttatgagaatttgggacccccattgatgggttacacatggactgaaaacattcatcttgtccgattaaattggccaatttctatgtcatataatttttcaacaaccaaaaaaaatgaagtaaaataaaattattaaaatcttgtccattataaagcacacctgaaatgatttttaatcattattatatttcttatttttccaagataattacttttcagacaaataatatagtactctatctcaacatgacaaaagaaaaacaattgagacaattaatgtattaatgtattaagaactaattattggaataatataccatgagtataaataggaatatatacacaaattttatcatttgtataaatttcttatattattataatcgttaatttaaagttggattaattgaacaatttttaatcattagaaaccaaaaaatatcaaattaagtttataatatatttgatactattcaatgaaagtaaatcaaaacaaaacgtacatgagatacaatatttattctattttgtttggtaataataaaaatacatatgtagagaaagggaagtgattaatttgttgagatgtcattttcatttgggtttattaacaaacaatgattttattgatgatcataaattcataatatcatggtcaacataagaatctttaattccgctttatatatataatattaagaaattattagatgcatagggaagattttctcaaggtggctcggataatcgggctcatataatggaaattaaatttatttattttgttattaattcatatattcattaaaaaaacacacgcacacattttttatatatatatataaataaatatatagctcaattatagttatataaagcatatcttataattaatttataattttcaatatttacagtgaaattgaactgtctctttttaattaattttattataaattaatgaaatattaatacacta

SEQ ID NO: 35947 - DNA, 1129 bp, Cannabis sativa
accgcaaagaattttattttaaaccgcattttttttgcggtgcggtgtggtgcaggtgatttgagcggtttgatgaacacccctagtcagaatagtacaatagtaaaattatttttattttttttaataaattaattggaaaataaggttattttatgagtttaaaagcctgatattattgagttgtatgggttggtggtcacatttaaatctattgggcttatattaatgggcctttaccgaccttttttaatgaattcaaccattttcgtacgtgagaaaagaatcatagtatacttatttttatttttgaaaaaaaaaaagattgaaaaataaggatgattttatgagtttaaagtactgagatttttgagtagtatgggtagttggtcctatttaaattcattgggctgatattaatgggcctttaccaacatcttttaatgaattcaaccatcctcgtacgttagaacattaccgtagtactattaatttatttttttgggaaaaaaagattgaataatgaggatgatatttaaccaaactccctacgtgtacacgtgtattaaaatatccaatacagagatttaactaccttttttttgacacattagatgtgtccaatagagtacagctaactgaaaaacgtactataacttatccttgagacattatataacacacttgagaagtgttgcaatccatcatcaattttatagaacaaattaacttgttgtaatttagttattcatttcattagaatatatcaaatatgagttcacatccccactgggttgttttaaatgggtcaaatgaaggtatttatagtagctatgaagatgctataaacaaaaaccctaattctaatttctccatcaaatgtcgttatgattcttttatagaagccttttctgcttcatgtctacatggagagacgggacgatgcttcactaggcagcaagtgagagaactttattgtgttaatgattttccatgcatgtgagattcggatgatgataatgatgaagaagcaatccttacttctatttgctcattgtttgatgagtgtgactgcttgttgggttttatgccctaagtaaaactctatttcaatgtaatctttattatt

SEQ ID NO: 35948 - DNA, 3547 bp, Cannabis sativa
  modified_base (1407)..(1411): a, c, t, g, unknown or other
atttttaatataaatatataaattataaaatatttataattatagactattagatgagattttaaaaaatatatatataactaattaatttggtaagactaatttaatcaattatcaggagaaaaaatataaattttcggacatataaaaataacaaaaaaaaaaaattatttatggtgtatatgtaatgtcccactttactttgtaaacaatattgcattattaacaaaagtaagattagttagtaattatactttttaggatattaaagaaactctcataaaattagaaaaatagaagaaaaaaaaattataaaatcacctacacatttgtgtgttttattgagagtgtatatgtaatattccactttactttataaacaatgcgggattattaataaaaataaaattagtaaataatcatattttgtaggacattaatttaaaactctcacagactatgaaaataaaaagtaaagaaaactatttacatacttgtgtttgtattttttttttatataattacataaatatagagtttttaaaaatttacgagtagtacatgatcataccaaaacatagaataaagcattttccgagatctaggatgtgttgttgggaatttatgttcttacaataactttgtaatgatttcttgaagtctacgaattacgattgaaaatcaagattaacattcatggtatgaatgcgaattttgatattcatagaaaagagatatggaacataaaatgagtgaaatgatataaatcaaactagtgtaatgcaaaatcaaaatatattaatcaacaacactaacactagagataacacaataaatcattaacggattgtttggtacatcatattgtattgtgttggattgtgatgaattgtgttgtattgtattatattgtattgtattagtattatttaatacaatactatgtttagtattgaattgtattaatatattgtatcgtattctattagaattatttaatccgagtcccggtctcggtctcgggtctggatcctgggtcggggttcgagtcgggatccaggtccaggtccgggtctgattccgaatccgggtctgggtccgagtcggggtacgggttggggtcgggatcgcagttcaagtcagggtctgggtccgaggtctgggttcgggtcctggtcgaggtcagggtccgggttcgagtccggtgtctaggtccgagtccgagtccgagtccgggtccgggtctgggtccaggttcccgggtccggcgtctgggctccgggtcgtggccggggtccggatccgggtctgggtcctaggtctggattagaaattggtgttgaccccgaattctttgtaaatattataacacaatataatacagatcatttgttatgtattaaatannnnnacatacattgtattaaaaattttagtcgtaataattaatacaatacattgttttatccaaaatatagtgttatttattatttaatacaatacgattcttatacgacgtatcaaacaagccctcagacaataggaaacaaagataagggtagaatattacccaattttggggaaagaaaaggcttacacatttgttttagaataattagtaattttgtctcccgaacttcgagaatattaattctattttctaaaatatatggtttgtgaagaatccccaaaatttttatatttacaaaagtttaatctttctgttaagtttcgtcctattattttgtttaaatgctgaagagtctgccaattaacaattttccatctgaactttgacaactatcaaatttcacgtctcaaaataataacaagaaagatataatatattttttagtaaatctaaaaaactactttagatcataaaaaattaatgattaaaaaaaaatttacaactaattaaacgatttaaaaaattatttattttttattaaaatatccatttagatataacaaatatatatattaaaaattcaattttagtaaaaaaaaaaacattacgagaacaagtttgagtctatttttttctcaatagtttagatttgtttaagtaaacataatattctttttaattttaatttctttttttcaaaataatttatttttatttttcaaaataatttttaaatttttaattatttttttttcaaaataatttttatttaagatacaagtttataaatataattaactttgattttttctttgaaaaatcttagttgttcaaattatttattggatttttaatcattttagtttgactttctaagatacatgtttagaaattaaataaattttgaaaatatttcttgtaagaataaattagatttattaagtaaatttaatattttttaattaacttaatattttgatcacattttttaataacttataaattttttcaaaattaatagaacattataatttttataattaattgtttttaataaaggaggacaatattttgtattggtcaaaatttagggggtaaaaatgtgaatttttaagggtaaaagaaatagaactaatagaatgagcataattatttaactgttatattttaggggaaatttttaacaagcgatatattttaggggcaaaattaggtagtctcaaaagttcaggggtaaaaatactaattattttttgttttaatgctgtccaaaatatcaattcctaagcctccattaatgcttgaagcttctctcaagtaggaatgagaagtgggatatacaagtcttttgaaactccgcacgtaaagtattttttgatgaagtttcttcgaaaaaactagtaagagagagagaaagagagtatgtgatcatcatattttcactcacaaattctatatataatgtagaggtcctcctatgtcttacaaaaaggattaggacacttgaaatcaattttggagctaaaacacttaatttacgcaaagctaaaaaatacaccatttaatggccgccagacaacatgtcgcctggaatattttacgaaactctgatttctgtatatattgcatgcattgtccaggcattatgtcgccttgttataggtgacacggaccactgattgtgtttaaatgtcatttttgatattttcaaatgattcaagactttttgggtaatcttatacactttataaggtcattttaaacccagaaaaaaaaaaattattaattatattctacattatatccaagttcacaatcatgtgaaattttcaaagatataagacaccttaatgtgcttaatctttttcgtagcacttaattaactaggggttgtattgagtttgttagtatataagttttaagaagggttaaaatttgactaaattcacttttcaactagaatttttgaattctcatgaaaaaaataaacaaattttggaataaaatttgtaccccacacggatttttaaatcattaattgtcgatcttctattttaacctttcactcaacttttgtgttagaaaatacttgtcgaaatatttttttttttatttttcatagcaatattcgttgta

SEQ ID NO: 35949 - DNA, 2639 bp, Cannabis sativa
  modified_base (2534)..(2537): a, c, t, g, unknown or other
cttactagattgaggagaatggataagtagtaagtaattataagagagacacaattaatagtagttaactccctatatcgcataagtaatggagcttacatctacatcggatttttatttctcacgagatgtaaattatagaaacagactaagtgtcagaagcttcaaattttagagagacaaatgttggattaaaatcctcaatatgggcttgtagaatctcagaatatgagattagagaaaacagagtaaaagaacaatgaagctgaaaaacagagaagaggcaaagaaagtaaaaccagaactgattctttattgagtagtgaagcttatttatacacagccttttacaacattaacagaattagttacaagatagaagtgtcagaatacagttggaaacagttacaaaaaagtaggtgtaataacaactaaaacagaatttattcaactatattaacatcccccctcaaactaaaagatgttgaaaccatttttagtttggattttaagtatagaaacctgtcagttggcagtgccttagttaaaacatctgcagcttgatcgactgaaggtacatagcgaaccgagaattgtttgtttagaatttgatcacgtaccaaatgaaggtcaatctcgatatgttttgaacgtgcgtgaaatacaggatttgttgcaagtgccgaggcactctgattgtccacccatatgacaggaacttgagcaattgagacttgaagttcttgtaaaagagaccgaatccaatatttgagttcagcagcagtgtttgtaagtgctctgaactcgctttcagtgctagaacgggcaactacttgttgtttcttggcagaccagctgatcaggttgtctccaaggaacactaaatatccaccagtagaccgccggtcatcgacgcagctggcccattcagcgtcagaataagcatgaagagtcatgactgaggaaggtcttatccataatccatctttgattgtgcctttcaaatacttgagtaatttttttgcaagcctccccatgaattgtggtaggagcatgcaaaaattgacttaacttgttggtgatgaaagccacattgggtcttgttaaagacaaatactgaagtgtacccaatgtgcttctgtacaaggtaatgtcatgaaatggttccccttctgttagagagagtttgacagtagagctcattggatttggacttgccttggcaccctccaaatgtaatttgactaacaagtctgtgatgtattttgtttgagacaagtacataccagttttgtctctgtatatttcaacacctaagaaataatgaacttggccaaaatattttagagagaaagatttattgagatcatgaatgagacccgagatgatagtaggattgggaccagtgattaatatgtcatctacgtatacaagtaggatgactaaatttgtacctttgccatagataaacagtgagttgtcagctttggaatcttgaaaaccccacgatcttagagttgttcttagcttatcattccatgctcttcgggcttgttttagtccatagatggccttttgtagtctgcacacatgagttggttgagtagtgtcttcaaaccttggtggttggcacatatagacagtctcatttaaagggccattcagaaacgcattgctcacatctaactgagatacattccagttgtgagttacaaccaatgaaagaactgttcgaatagtagttggtttgacaaccagactaaaagtctcatcaaaatcaattccagcttcttgtaagtacccttttgctactaatcttgacttgtatctgttgagagagccatctttgttgagtttcactctatgtatccatttacaccctgtgacattcattgaaggatcatatggaacaagaatccatgtgtttcctttcttcacagccgaaagttcactatccatagctccatgccactttggatggacaatgcatcctttagtgttctaggttcagtaggtagaaatgaatcaagcaaagggtgtttagtggctaggaatgattttggtttgaatatgctactttgagatctagtgcgcatagcgtgggttcgagtgatgcacggttcagctggtggttcatttatatttggctgagacattgtattaggtaccaagctttgacgagtaggtagtggtgtgttgtcaatggtaggtgtggggactataggagagtggttggtattttgtactgaggtgttatggtgaggtgatgcatgagctgttggagtaggggccatgttggggggctgcgcgggtgtaggtgcctggtgaacagtggtaggaccatgggtaggtgtactatgaacagtaggtggcattgtaggtgatgtagagaaatttgtagtaagaaaatgactagtcagagaaggttgtaccttagtggcaaaggcatgtgaggatgctagaaaaagttgttcatggaaaacaacttttttagctatgaatagtgtaacgccctgaccctcagggacgccacnnnngtgcttttataaacttattatcaccaatctatcaattttggaaaagtgtggtttaatttgaatctttaattaaattcaaaataaagacttccattttaaata

SEQ ID NO: 35950 - DNA, 1661 bp, Cannabis sativa
tagtctctgataccccttccatggaggacgagaacattgacgatcctgcaaacccgaaagttgagtacctaggcagtgtctcaatcgttccccgttctcgctctggggatggtgcaagtatcagtgctcaaactgtttcctccgaaagggttactctggtcgtccctcccctacagaaaaccaagcgaaaacaacctactcttgggtgctcctatctagaccataaatcaagtagtccatcagttttaactcattcagaacttgatttcttagtgtcctcttatggcttttcgtcgagtgtcgaggttagactccctaaatcgcacaagagggctgactttcctcaagtcgaatggctatgcttgcattcctattgatttgagtcaaaaattaagctaaggctgtccattcctaaattaattaaggaattcctttcgcactactccattgctcatgcttaattactttctaacgtgtgggctatccttttaggtttaatagttttgggcgataaggctggagttaagtgggaagtatcagacattattcatttttattcgttgatggagagtgagcaagggtgctctcatgcccagcctagaaagaattaggccctcattaccgatttagagacctctcataaggagtggaaagataagttcttttttgccaaagggcctattaagtttattcccgatgaccccactacccctttcattagtggagatggggagctccatgtattttcttcgttccttttgtcaggacatctttgtgtttttcccccactttcttttgtttttagtgcttttgcctttatttgtattgtcattaattagttcgtagctactttaacactgactttcatgtgcagcttccattaacaacgtagagactgttcagagatatttttactgagaaggttcgtaaggtcacttccctgggctcaaagtttcggtcgattaagtaccttctatccaatgaagctctgatcgaattcctccgcctggcctagcaaactcaggatcccataggtatccccactccttatccttcttattttatttggcctaatttcataaaaaacgccttgaagcatttaaaacaaataactgaaacagttttgatagaattttctaagcatcattccagccttgtagagacctacccccgtcatctgcccaaaatgaagttttctgagatgactatcgaagaaatcgaggcccaaactgccgcccgactgaagagattcatggcaaagtctcctaagcgtaaaagcaaaagtaagagaagcaaaacgacagggctcgaggaggccaatcagtcggacgttggaatgtcatctaaacatgactcggccattgacaaagccatcaaggcactgtttaatgttcccctagagactacatcgaacgttggtaatgctagagggaattccctaagtttggtgccgactgagctcccaaatcctaaggaagtctcccagctcgaggatcttcctgtagttgatttgggctcgagtctgagttccttgctggcttttcctacccgtacttcctctcttcccttaggggctccgtcgtcctctcagcttgctctttctcccttcatggtccttccttcaacctgttgggttttgtgccctaaataaaacccattac

SEQ ID NO: 35951 - DNA, 4753 bp, Cannabis sativa
cccttgctgctgcaggtgtagaggaccaaatttgaaagacaaatagtatgaagagagatttgtggaaataatcacccaatgtgagttctggtaaggatgctcatcctaaggattgtaggaaaaggcctaacgatccaatagctacggttcccaacaagagattccaaggtaatcaaggtttttgacgtggtgggaatgagaactgaagaacctatccagagtgcccgaggtgcaagagacgctatcagggtgaatgtcaagataaagcctacttccaatgttgggtagtgggccatctaaaaaagaagttgcccatagttagagttaccaaaatagaagaaaattacagtctagttcctgcccaggtgattgctttaacccaggcagagactgatgctggtccttctaccatgacaaaattggttatctctagcatgtgggttaggtcccttctagtgcatgtggaggaaagagaattctcgatcgatttgattaaactgaacctagaggattttaatgtgatattggggatggactggctagcaaagtataatgcaaccatcgattgtaaaagaaagatggtaacttttgaaccaaaaggtgaggacccattcgtatttgttggtaaggtccaatgatcaaaaattaatcttagtgcttaaggcaagagatttgttatggtaaggatgtgtttgtttcctagatagtgtggtggatattaagaaagaaataccattgagactagaacacgttccgatggtccaagagtttctagatgtctttctagaggagctaccagggttaccaccaaagtgggacattgactttgaaattgatttgataccgggggcaacacttgtatctaaagctctgtatcggatgtcagctacaaagatgaaagagttgaaggttcaattacagagggtatattagatttgaaattcactagaccgagtacctcaccttggtgtgcgtcagttttggtttgtaaagaagaaggacagaacattgcaaatgtgtattgatgatcaggaattgaataagctgacagtgaagaacaagtatcctttaccaaggatagatgttttatttgatcaattgcaggaaaaaaaaccatcttctctaagatcaatctttgatctggttatcaacagttgaggattcgagaggaggatatttctaagacagctttttgtacccagtatggactctatgaatttttagtgatgttcttcggattaactaatgcttcggtggcattaatggacttaatgaaccgagtgttcaaggattttcagatgattttgtaatcgtcaccatcaatgatattttgatcttttatgattcagaataggtacatgagaaacatcttcgaatggtattgcaacatctctggaagaataaactatatgctaaatttaggaaatgcaagttctggctgccccaataagcttcttagggcatatggtgaacaaagatggtatcttggtggacccggtaaagattgaagtggttctggattggccttgacccaaatctacaactaaggttagaagtttcctgggattagcaagacactacagagggtttgttgaatggtttgccaagatttgtgcacccttaacggaattaactcaaaggaatttaaggtttgtttggattgacaagtgtgaaagtagtttccaagaattaaaacagaggctaattattgcactagtgttaaccttaccagttagtaatgagaaatttgtgatttattgtgacgcttctaaacaagggttaggttgcattttgatgcagtccgagaaagttattgcctatgcatttaggtaactgaaggagtatgaacaacaatatcccacccatgatattaagttagcaacaatagtttttgctttgaaagtttgacaccattacctgtatagcaaaaagtgcaaaatttacacggatcacaaaagcttcaaatactatttcactcaaaggaatttgaatattaggtagcaatgatggttagaacttgttaaggactattactgcaagattctttaccaccctaggaaagtaaatgtggtagtggaggctttatgtcgaaagggtccagggcaagtttacgaattaaagaagatctcacgaaaattttcttaggatatgaccatagcgaatattgagtttgtagttggaaaagtagccaatattacgttatagtctgatttgttagaaagaatcaagacaacccaacaaagtgatctagaattacaaaagtataaagaaaagcttaaagtcgggtcaacaaaggacttctcaatttcatcagatggattattacgatataaggacaaggtttgtgtaccagctgacagagctatcagataggagattctagacgaatctcataccacgccatattcgttacatccgggaacaactaagatgtatcaagatgtgaaagccttgtactggtggccaggtatgaaaagtaatattgtggaatacgtgttaaaatgcctaacttatcagcaagtcaaggcagaacattagagatcagtgggattacttcaacctctgaagattcttgagtggaaatgtgaggaaataacagtggacttcatggttgaattaccaagaatggtagggttttacgattccatctaggtaattgtggatcgatatacaaagtcagctcactttttacgagtgcggactacgtatacagtggattaatacgctgatctatacgtcaaggagatagtttagcttcatggatctctaaggtcgatcgtctcagatcgagactcaaaatttgcatccaagttttgggagagattgtaatgggcaatgggtactaaattaatgtttagtacaacctttcattgttagattgatggtcagtctaagaggactattcagatacttgaggatatattataggtgagtgtgatggactttgaaggctcttggaacaagaaccttcttctcatgcagcaattgtagtactattcgtacggaatcgtatgaaattctttatgggaggaaatgtcgtttgtccaatcattgggatgaagtctgtgtacagagatatcttggacatgatgtagtccaaagaacgagtagggccattgagatgattcaagcttatattcttgcctcacagagtaaacagaaaatctacgctgatccaaagcgtagagatattgaattccaggttagggatttcgttttcctttgagtatcactaatgaaggggattgagagattcgaaaataaaggaaagctgagtcccagatttattggtcagtttgagagcgtaggacaggtaacctatcagctagccttaccccctactttatttggagttcacaacgtgttccatattttaatgcttcagaagtatgtatcggatacaacccatatcttgagctaagaggacattaaacttcagacagacctatcatatgaagaacgactggttcagatcttggataggaaggagtgagtgttgcggaataagactattctgctaggtaatgtgttgtggaggaacaacaagattaaagaggtgacctgggagttggagttacagatgcgggagcaatatccaaagttatttaggtaaatttgaggatacaatttctataaggaggggatagttgtaatatcccaagaaaatataatgatatttaattagacatattttattaaatatgtaattatatgatattgaagtaagattataattttacttatgctaattatgagttaattagtgtaaatttagtatatgaataaataaagcatacagagattttatcttattatgggggtattgtaaatactatttttgaaataaaatatttttgggctcggtgcacgtggaaacttgtcagagtggtcaaaaatgtcacggcaataaaagatgagttatattggtttatactggactagtttagaaagtggagttgttggtttaaattgggatagttggtttgaccaaaatacccctaggttatatttagcttaagtgttagaaggaagggtaaaatagtcatttttgaggtttttagattcttgtgctatatggtttttataggctgatttattaagtgttttaatttattttatttaattaagttagaagataaatgttgaatttaatattaaaccaaaacaaaacaaaaaatagcataactcttttttttctctcaccctcttttcgactcaaaagaacctatctccaaggaagaactcagcccaaatcatcaaaatcttgtcaatttcttcatccctaggagttgtttatcttggaggtaagttctttattcattctctttgatttctaaagttctaggttaggttttattgggttttgtgtgtgaatttgggactataaggactagttagattcaaagcatgatttctaggtttaaattaagttttttttgtgtgctttgaatgattttatggctattaaaattagaattgaaagaatgaagtttaagaactcaaggttcactcaattatggtgttttggttattttgatgaatttctaagttttgattgattgtatacactgtatacctgatatagagctgttttgtgaagtttgagaacaattggttaggtttggagcattttttgggactttgaagatctgaaattttcgagtttttgttgtagtgaactggaattttgtttggttactttttgaaaatcgccgatttttgtattttggccataacttttcactcgagtgtc

SEQ ID NO: 35952 - DNA, 2718 bp, Cannabis sativa
ttcctgctgaggatttgctggcgcactctacagaattggcctcgtaattcatactatgttctcgagagctttcgttgcaggcacgaaggaggtcgatcttctgagcaagcaaaactcacttcttccaagatggcgtgaataaattgaagttggacgtgacctcaaaggacaaagacaacgaggacatcgggaaggctaaggagcgggcaaagaaaaaagccaaactctttgaatcgcgagttgaggagcttactcatgaacttgagagtgaaaaggagaatgggaagaagcagtatgatcaggtagtttctcattatatttacacgactttgtccaagctgcccgtcttcgactttaccattcttggaacggaagcagctgaaacagccgaggcgttttgtgctatgtcgcctactcaacccaaggatgtgggggaaacctttttctcgaggatgctgagaacacagatgcggaggaagtcggtaatggtgctgcaagcaaggtcgcatacaatcccatcactttgcttcttaattttttcgaagtttctttttactatgttcgaactttaatttcttttgttaccggtacacgggtactcgtgctttgtacttcaaacaacttttatttattttgttatcaaacacgatatcctttcgaggatatttcacttatgcacacctatgaagcggtacatgggtactcccaaaatttaagctactcttttgatagttgtctttgttgtttctattcgcaaatatttttaaccaatattattacaactttgtgtaataacttagaatataaaaacatatgaagaatataaaaaatttctgattacttggaaaatttcattataataatcaatagtactatattaggttatacccccaatacttagtacatatattaaaataaattgactaaatataaatacatgcgagtactattgataataatattttaagcttttgccatcccatgctctcttgatcgctataccgtcgaggtctaataattggtaagtcgcattactgatttttcagcgattaggtacggtccttcccagttatagccaaatactccatgtgctgagttacatgtgttaggcataaccttacaaagcaccaatctcttactcgcaggttttgctctttgaccttcaacttaaaatcgcgagctattgactgttgataggctgcatttttcatatgagcctgatcgcgtttctcttccagaagatcaagttgtgacagttgatttttagtattattgctcacattgaagacatttcttttcaaagatcctactccaactatgactagtgccatggcttcacacccataagacagtgagaaggggatttcaccagtcgttgagcgaagagttgtattatatgaccatagaacttgtggaagttcttctggccatgtaccctttcttccttcaaggttacctttgatggtatgctttataatcttgttaactgcttctgtttgcccattactttgaggatatgcaactgctgaaaaagctttttgaatccctaattcatcgcatagttggcgcatctccttacaatctaattatttaccattgccagaaattaatttataagggatgccaaacctgtagatgatggcgctatagacaaactcgtgcaatttggaggttgttatggtcacaagaggtttggcttcaacccatttcatgaagtaattgacggcgactacagcatactttactcctccttttccttttggcagttcaccaattaaatcaatgccgcaaaccacaaatggccaaggactagtgattgaattcaattggcctagtggtctagttacataagctgctattcgctgacacttgtcgcatctcttggcaaagctagttgcatctgcctgcaatgttggccagtaatatccttgcgtcatgatttttagagtaaggaaattaccaccaacatggttaccgcagattccaccatgtacttctcagagtatgtaatcgcactcactcccatcgatgcacttaagtaatggctggctaaaacatctaagatagagtttgtcagcataaatgacataccgagcggctcgatatcttagttttttggcttcaattttattgccaggaagcgctcatgttttcaagtagtcaattatcggggtcatctaggtgacctttttgactgtattaacctccatcatccattctcgaatgatagttggatgagtcaaaacatctatagtaattacgtcgagtaattcttcttctcttgttaaggccagttgggccaaagcatctgcatgagaattgtaagcacgaggtattctactaacaattatgttgtctaaattttgtaaaactcacaagtgtaagaaagatatttggccaaacgtcctcctttggctaggcactctccattgacatggcaaatacgatttgcgaatagctaaatgcttgaaggtactcgacttttatctcgagagtgagctttaatcctacaattaaagtctcatattcggcttcattgttagatgcagaaaactcaaatctaagggcagggtctaccttgaatttgttgggacttatgacgattattccaccccctgatctttcatggttggatgccccatcaacatacaaagtccatccttcgcctgttggtacttcagggtcaactccctcttatgtgattatggctaattcgtc

SEQ ID NO: 35953 - DNA, 4398 bp, Cannabis sativa
catgactataacttatccctcttgggcaaacaagcttggcgattgctaactaacgagacgtctcttgatggtcgaatttataagagtaggtactttccacaaggaactttccttacagctgtgattgccaataatcctagcttcatctagaggagcatctttgaaactcaactgattattgcagcaggggcacgtattcgtattggtgctggtttgactgtccctgttttaaattctccagggctccctgatatgaccaacccgtgcgtgatcagctctcatccaggacttgttggggcatctattaatcaactcatgacagttgataattctcactgggatgtggagatattaaatgatctttttgatcatagagacagtgaccttatcctcaatattccgcttaactcatctaatatggatgatgtgtggttttggcatcatgggaattcaggtaactattctgtgaagagctgctatcaatggctccaggtttctaagggcagatggtctgctgatatggagtcggatctttggcgttctttgtgaaaaactaaagtccctcctaaagtaattcattttgcttggaaagccatcactgattgcttacttactcgaactcagcttcactcaaaacatgtgtctgtgcaactcagttgtgtatgctgctctagggaagaagaaacaatctttcatgtgctggtgtcctgcaattttgcccactcttactggaacagatctggtatgtctcttggcattacttctgccactgattttggcgactggttacagcaggttctgaactatggacaacctgctatgttcgaagaggcattaatggtatcatgggctatttggaaggctaggaatgacttgctttggaacaagaaagcctccactgctgctgaagtaattatctctgcccattctgtcctgaatcaatggaagtgtgcttgctcaaatcggttcgaacctctacctgcactggtgaacaacctcagcagctctaatttttggattgcgcctgggactggtgtaataaaagtgaatgtggatggtgctatttttgcagcaactcattcctttggtgtgggctgtcttgcccaaggtgttgatgctcggcttatcgaggcgctttgcttgcataaagctggttgtgttcaacctagcttagtggaggccattggtgtcaaagaggcatcaagttagatcaagaaaaaaacggtgggagcatgttgttgtggaaatcgattctttagtggtggttcaagctcttcaaagtaatgttgtaatgcattctatttttggttcaactatcactaactgtcttagtttattaaagtctataattcatgttgatgtttgttatgtgatacgatctgctaacaatgccgctcactgtcttgctcgcggtgtttgttattggtcagattgtttttttgttggtagcaatgtccctgatgctattaccaacgctttaatgaccgatttggctgttctatcttaatggaagttttctctttttattcaaaaaaaaaaagttattttattttaattttaattttatataacaaaattaatattcacgtgcaaagcacgtgctaatacactagtgtcattaaaaaaatgttgtgttttttttttgttctatttttaagttttttattttttattttttatttattcaatttttaggttaaaattaaaatgagcttttcttctcaattttacgatttccctctgatttctcatccaacctttctatttgatttcttctcctccattttcgactgttccaatttcctgcccaacccaggctcctacatccctcaccagcacaagcgctcctctctgcccgactcccaactgcctcgtcgttgtcgttcttgtccattggtgagttcttttctttctttttctttactgcccattggtgagttcttattctttttccgttgcaaagaattttgagtgtactcctaattttggttaatatatttacacccaatgtgccatcgtgattgattgtgaatgtaatgagtttgtgagggtttaacatctttgtgtattatatttattcaatgtggggtttcgattattttaagctacttagtttcatgagagaattaggaagccatgtctgtattttgatacatgaagtattgagtcctattaaggaagagaatatatttatgctttgacataaggtgcttcattagtactcaaggacaacctttcaggagttctctgtatttgttgatttctctttcagtatgtaaattaaaatcttaaggaatggtgaagaaagtattagtttatagatatgttgtgtaatataaagagtgaacaccaatgttcatttgtttaagctagtaatttgcaaacttgtgagctcaaactacaacatttatttatattgtttggtatatagattttagaaaatgatatatttttgcttaaaacatgtaatttagagtcattcttagaatgtttttgatgtatgcctgtatctatttgcttaataccagcaaaattttgggtttgaactccaacaaggggactatttttgatgttctctgttatattttaatatcttaacattgtttctttgtttatgctgatactactgcgaggtttaggttaaagggttctttacggtttttgtagagaaaggaaagaagaagaggaagaaggaaagcagtgaagtagagccatgagcaggagtttgggaataccagtaaagcttctccatgaagctgctgggcacgtggtgacggtggagctcaagagcggtgagctctacagaggaagtatgatagagtgcgaggataactggaactgtcagctcgagaacatcaccttcacttctaaggatgggaaagtctctcagcttgaacatgtatttatacgaggcagcaaagttaggtttatggtgataccagatatgctaaagaatgctccaatgttcaagcgtctagatgccagaatcaagggtaagggcggatcacttggagtcggaaggggaagagctgttgcaatgcgtgctgcagggcgtggaacagctggtagaggtgctgtacctcatgtacggaggtaataatccttgccagagtatgcatgccttagttaatgatatgtatgtcccttgttaccgtagcatgtgttgccttaaggacctctccaatgttaccatcagaatttggtgttaaagtttagtgttagtttgcttgggaagaaggaaggaaagtagtagtactacaaatctaatcaatgggaatcgtgacatactgctctctatttgtatgaatgttttggatggtaaatcattttgactgttaaaaatgtgtctggtttttcagtgtgcgaattcttattctatgcctttatttaagaatgattgtttctttgtctgattagttcactctgccttcatttaaaaagacttaagtgatcatggtaaaatggtctcattaaattttttctttttctttcacaaatttcattccctatttagtactatttggtaaaacgtctctttctattttttccaaaacttaaataatttgtttcttgattagaaatattatgcgtagtttattgaggagatttggtagctgcgatataatttatctagctatgcttggatagctttaaatttgtagttttagtggatgttatggtgccatgaccagatttattgcttaaataattacttatctttcttttgcatactgtgatattttggtttctcatactacaacttataattgtgttagtcatttttaagtaactttcagttgtttgtgcatatgtttcattctacttttgtttttgttcagtaatattaaagtattaaactattagaagaggtttttttttatatatatatcctccatattgaaagataaggatgtgtaattggtttggttcttttaccaaactatcattgaacggggtttcattgatatacgtagtggcttttgagaatctttgtgataaagtcaagtttgctcatttgaagatacaagtagtgggcaaattatagttatccaaatgtgttaaaaatttgaggttgattgcttttgtctgtaagttaaaattaggcggaggattgtggatacttatatcaatacaagttcatttcatgacagtatacaatcttatgaagagaatttgagctttgagaatgtatttatcacctataaattgaacttgagctccttaaaaaaaaatatatatatatatatatatatatcagaagttcaatatttgtttacttgtgttaatatgaattttgtgcatctggtagaatgctcagtcttgcatatgggttgagctatacaaagttaatttaaattagtgtgtggaataattctcttgtttgctcttgtaggataa

SEQ ID NO: 35954 - DNA, 2205 bp, Cannabis sativa
  modified_base (1701)..(1718): a, c, t, g, unknown or other
gagtattaaaataccacacttatcaactaacatatagttcccttcttgattttaagttttactttattgtcttccaatgtacctttcttagattaatctgatacatactcattactcccactcaacagtaggagtttggtctaatgcatttaaaacatacctgagacctctcacttttgatcttaaggatttttttctttggccctttatctattctggaatagttgaaatttttccttaaataaaatctatatctaggagtcaaaagacttcctatagatagccattcgaaaaatgcactatcaccttactaaaataagttgctaacgctagagtaattaaatcaccaggatcaccaggcataccccaagccacgggattagatggattagataatctcaaacctataatactaggatcacgaagttttgttaagtccattgaatagactaacttttcaaaatttcctttcttgtccttataatagaaaatttttggttacttcatatgaatatttttaaccatagttctcttggctttagttcttagtttcttattctgactatccattacttgtttaaactaacaaaagatttttatcacaagtttcttccaagtcataatatggtgagttctttgaaaccctcccactacaacaaggtatcgtgactttctgtctaggaacattaatggtattttccacatcagttgtgtcaatacaatagaggcagtgggaccatcttatatagaataaaatgatagaatactcttggaatcaaaaaatagtatctcctctactttgctactttattttttagatttagtcatattcataaaaaaaaaaagtagtatttcttgaaacaaatactttcttattttaatgaccatagaatggtccacgcctaattactttagaatagctatcaaacatgcaaacttagttagtagttctagcttttcttaagttcacgatcaggacatctatgaatctagtaattgtttatactaaatacacaactattccatcatttggaaaatttaatatcactagggtatttccctagaaggacttaggcagctactagtaactaatcatagacctttcactttcatgaacaaatttttgagaaggtaagattggatacaattcgaagttcatgaacttaatgatctttgaactgcatatccaccaaatatttctctacccctatatcagtttaaagatctataaccacttaccttaatgttttttaacattgttaaaaattcatgaaatttatcaaacatttaaattttttttgtataaggtaaaatcttgagtgatcgttccaagaatttaacaataactcatatcaacccatgaaagtacatccatttgttcaaatataaatgattcaactttcaagtggatacaagcatattttttctttactgagactgatcttctcaaattcattatgaacaagatacaaatgccatagatatattatcgtggtttgatgaatcctatgtctagttaaaacaaagcgttcttaggatagtctaactggattaataaaaaaaaaaaaaaaactcataatccatacataaacatatagttttgatccattaacagaaaatggatattaaacttgtgaaagttatactgtaatgtcccatgtaatctggaactaaaatttaaaatttctatttggaatctannnnnnnnnnnnnnnnnnttaaatttataccaaatatttcttaagtaatgattctttcttggaccaccactaataatctaactcttagtctaggttgcctctagtaagcatttacaagtaggagattttctaagatcaaggatttatatcatttcgggatcaaaagtttagaatatagtcatttgcgccattcaatttcatagaaaaaaatagatcacattataaacaaataatttatccaatgatatactatctaagtaaattcttaatgaaaaagctaagagaaaaaataaaagataatttcgattaaaataagaattcagcgatgtcccaggcgagagtcaaggtctttttttaaaaaaaaaattcttcgttgtttcatattgtaaacactaatctaagttgtcatctttggatgtacacgtagatgctgcattcacaaatatttatctgtcgagatctaacattattttgtttgtctaacggatgacaatcctttgggatt

SEQ ID NO: 35955 - DNA, 1506 bp, Cannabis sativa
  modified_base (664)..(668): a, c, t, g, unknown or other
gatagcccgatcggagatcaatctctgaaaagaccatcttcccctaaagttgatcaaaaagatcgttgatcctaggtaaaggatatttattcttgattgctagcttattcatttaccggtagtcaatgcacattcgtaaagatccatctttcttcttaacaaacagtactggagctccccaaggtgacacactgggccaagaaaaccctatgtcaagcaacccttagagttgaatttctagttccttaagttctgctggagtcattctgtaaggggccttagaaaccgattttgctccagatgccaaatcaatgacaaaattaatttctcgcttaggtggtaaaccccaaagttcataaagaaaaacatctaaaaattcctgaaccaccttgatgtcttctggccaaacagagtcaggccgagtggtattcaataccatcgccaaaaaccctagacatcctcctcgtaacaattctctagctgttagtactgaaattaccgagatccgagatccctgaaccgatccaacaaatacaaacggttattcgccttctggttggaagattaccttcttcctcttacaatcaatactggctgagtacttggacaagaagtccattcccgctataatatcaaaatccactaaattcatctctatcaaatnnnnnctcaactctctatcctctattctgatcagcatagacctaatccaccttctggagataactaactctccgccaggcagtagggttccaaaccctatttcataattatcatgcggtctatccaatttactaaaaattctggccgccacataggagggagtggccccagagtcaaacaacacagagaaataagagttgttgaccgagagctgacctgctaccattgaagggctggcttctgcatcagcttgagttatcgcgaacacccgagctggagtgggtttcgctgcagtcttcggtgttttggtcctgagctggggacaatcccttttgtaatgccctggcatgccacactgaaagcacccctgccctttacactcccccagatggtgcttttacaactggggcactctgggtaagtgtatcgggtttcagtgccactctgacgattgcctcaactctggttccctcggaacctcttgttctgacccgagccactggtagcagtagatgcctttcttttctgatcaatggcggagccactacatccgctgctaaagcctaatgcaggaggggtaggagccccgccaacaattggagtcccacgagactctactatgcatccactgcgccctcagctggtagtgccttatctaccatttcagcataggtggtactgtcgtcagtagtgatcatcaaatcatgtctgatcttcgcattcaacccatccagatacttctctttcttgctgaaattggttggcacaattcccgaggccaacctcaccaaacagtcaaattgcgttgtgtattcagtaatattggaaattattttaccaaga

SEQ ID NO: 35956 - DNA, 2037 bp, Cannabis sativa
aaaccaattggcaatgagtggagtagcccatgttctttatatatgactcaatacttttacatttaattcatgtgggacaatgttctccaatagtcttcaaattgcaattctgacattatcaacccttttgcattctaattgtaaaataaatagtattgttatttgacattttaaagtattcaatgctacaataatatctaattctataatttattagcaattttttatattatttattaaattaaaatgtttaagattcaatattaaaatatactaatatgtgtagtacttgacacgtttaacttaagtgcaccttagcatttctaacaaattcccaattactcacatagggagatttaataaagtaataaaagtaaaagatggtttggtaattgatgaataaagtttgaacctttagtaaaagtacaaaagaatatagtataattggtcccaaaagtaggcttggcccacaaaaccaaaacttaaaatagtccatttgctcactcactcattagccacaaaacatatataggattaggtccaatccaaagaagacccaacatttgaatgttattaattaatgattccacatatgttttaatttgacaatgcaagcaagcaaagcattgattccaataccattcaacaatatttcttgcttcattcccattcttttcattatattcccaaacccttttatatatgtttgcactattcatatatagaaatttcaaacaaaggtaacaacaacactaatatcatctttatcacttgtagaaataaggataactactcataatagtgttattataacttctattatcaaactgtgaagaatagtaaccaaacaaagtattacattttttatgttccataatgtataaatcaaaggataaagatagtacaatagtcataacaagaagtagtggtgatggtggtggaaacggtagtagagaaacctcatcgagtaattggcaaacatctcggcaaaaaagtacaaagaggactaaaacaattcatccacctattgaatgtcattggcaattgcctcctataaaggaagacaaaaaatcatctctttcttcttcttcttcttcttcgagctttaagtcgatgttatcatatcctctaaagctcggtggagcaatgaaaaagattggaagaacaaaaagcatgcaacaagttcttgaaggcaaccatgatccgaaagatgaacatcttgttcaatcttttcaagaaatgctttttcttgaggttcaacttccaccaaaacataatgattatcatacccttttgaggcaagtaattaataatagtgttatcatagagttgaattaaaggtgttattatatgttttctaaagtaaggtattttttgttatagatttcttcgaatgagagactttaattttgctgaagctaaagaaatgttcttgaattatcttaaatggagagaagaatacagagttgatgctattcacaaggttagtcttatgcaaaattaattatcatatattttttaatgtaaattacaaatctctgaaaaaatataattttgatttttgcaggagttcaaatttgaggagcatgagagagtaaagaagtgttatccacatggttttcatggggttgatagaaatgggagaccaatatacatagaaaggattggaatgattgatgtaaatcaactgttacaagttacaactgttgaaagatttgtgaggtaccatgtttcagaacaagagaagacattgaagcttagatacccttcttgttccattgctgcaaaaactcatgttgcttcaaccacaaccattctagatgtccaaggagtggtaactaattcaaatattatattggatcggatcctgtattttacagaagttattgatttgatcttctcttctgttaaataacaaattagactttatatttttcaaaatagtacccgagtcgaatttttgttaaaatagaacataatataaccttaaagtgttatgaccaggttaaaaactgagctcagtgaattattaatttt

SEQ ID NO: 35957 - DNA, 1657 bp, Cannabis sativa
ttaccagtgcagactacgtatacaatggatcagtacgctgatctatatgtcaaagaaatagttcggcttcatggtgctccaaagtcgatcgtctcagattgagatccaaagtttacatctaaaatctgagaaagtctgcaaccagaaatgggtaccaaataaaagttcaatacatcctttcatccttaaactgatggttagtctgaaaggactattcagatacttgaggatatgttacgggcgtgtgtgttggactttgaatgctcctggaacaagtaccttcctttgattgaatttttatacaacaataattatcagagtactattgatatggcaccgtacaaaaaaaatgtcgttcacccattcatcgggatgaagctggtgaatagaggtaccttggacctgatgcaatccaaagaatgagtgaggacattgagaaaatttgagctcatatgcttgcctcataaagtagacagaagagctacgctgatccaaagtgtagagatattgaatttcaggttggggatttcatcttccttcgggtgtccccaatgaagggaattcaaagatttgaaaagaagagaaagttaagtcccaaatttattggtccatttgagattttagaaagggttggtcaggtagcctatcggctagccttaccccctactttatctgtagctcacaacgtgttccacgtcttgatgcttcaaaaggatatggaacttcagatagatctgtcatacgaagaacaactggttcagatcctactagcaaggaaaaaatattgcggaacaagactattccactagtcaaggtgttgtggaggaacaacaagattgaagaggtgacttgagagttagagtcgcagatgcgggagcagtatcccaagatatttaggtaaattttgaggacgaattttctgtaaggaggggatggttgtaatatctaaaaaattatgattatattaatttaggcatattttattaaatatgagattaaatgaataaataagcgtaatttattaattacagagattttatcagattatgtgggtattgtaaataccattttcgaaataaaatattttcacattcggcggctgtggaaccttgacggagtggtcagaattgtcacagcaataaaattgagatatattagaattatactggcctagtttagagagttgagttgttaattcattcgggaaaaattaaaaatgaccaaaataccctaggtttaattttaggctttagttttttttaaagaggggtaaaatagtcatttcattaggttgaatatttttttttttaaatgcattaggttgtatattagtttgtcttatattgaaatagggttttgatgttagatttattattattaattttaatatttagttagaaaaataaagataaacttaagtaaggaatatcaccttctcctttcttcttcttcccttgacatccctagaacccagctgaaccaagcaattttcttcttcaaatcaacccatttctagtttaattaactaaccctaggtgttgttcaagcttgaaggtaagtcttttatcttttctctttgaatttctaaggtttaggttgagtttggttaagagattttgtgatttttggggctatggtgttggattaagttcaaagt

SEQ ID NO: 35958 - DNA, 988 bp, Cannabis sativa
tgcgtggttaaaaatgttgcaaacgcttctaacatttttttatataataataaaagggtaaatagtgagataataaatatatacaatgagtatttctttactgttatcttagtagggggattcatagttttgttagaatttttcattcttttcccgattttttttaatgaggtattattctttaaaaaagtcaattgtgacattttgatcatttcacatacgcttaattctctgaagtttaaattttagcggtaaaattttttaaactattgaattgttaataaatttaaagtaacattcggttaactactaccatggacggcttatgtgtacactcttgtactttggaactctggggaagtgaattatagagtagaatcatgactctcttcacattcttcactattctcattaaacctatttttctttgttcttaaacttgaaaatatacactagggatagattttcgatctaatctaatatttttcttcttattcgatctaatccaattagtaattaaatttgaaaaattattatccgatccaatctaattagatctcaaaatctaatctaattcgattcaattactaattggattcaatcaattttttaattggatatctaattacactcttaattttcaatattaatttaaaaatataaagaaaaatacataaaaatcaaaattaccctttatttaagtttaatactctataaaaatatcattgttaagcgtaatgtaactaaaactttaaaataactaaaacaacaatattgcaaagtaataaaatataacaaaacatcataaaaataaatgtatagaacaattaagtgttatgattttaacaaaaaaactactaaaaatataattttattactttttattatataaatcaatataataaaatcaatatgatttttatcggttttttcgattcggtttgagcgggttacactacaaaaaatcttacttttagtcaccacaaaa

SEQ ID NO: 35959 - DNA, 960 bp, Cannabis sativa
attcttggtaagatgaacttcagtagtcaacattgtttgaatgtcagcttctatctgagagagctgactcgacggagcagtgaatctcattgaaagatgtctgaagctgattagtgaagatacaaagagtatgccttcttacagcgagatggatgccttgctactcgtcgttcaagttcattcaactgttatgcttagtttgtataatgtacattatacaataattgttctaatagttaacatgtctctcttacttttcttcatacatagcgaggttggtgcctcgttttgtgttaataacgtcgtccatgcgatcatatcttcatatacgaaatggttttctcgtcaatacgtgaattaatattttgtacatctgtgtctcactcaagactttacagtcaacaagttatagatatactctaccagtttagcatttaatgagtttttccattttaatatcatttaatataattactattatattttctgattcatattctcccaatttgacacgtgtccttctctgaagtaccagccaaattttgggtataataataactttaatgcctatttcttaaatataaggcccataacatatttaatcatatataatcatgaaaaatataaaaattaatgctaattactccactaatccatgttcgaagtttgtgatcattataatttttcttctcgtagtagaaagttgtttctttaagctcttctcacaatccttggcactatccacagtacctaaaaaatctgaaacaccagtctcaagttcattgactacattctctaatttagtgaccttggcctccgcatcagaagctctttgctcagcaactgccaatttcttagccagctcaacaaccctcatatgctaattatccatagcataagccaagccaacacaagcctataagtgacaaaaaaaggtcacgataagactttgataaaaag

SEQ ID NO: 35960 - DNA, 2657 bp, Cannabis sativa
ttctgcttgatggaagaatttgggtccacctttaattgaaatggcttaaagcccaataaattgaataagcaacgagacaacggtcaataccaacatgattgtaaaacttacaaaaatactgaaattcgaattaatttttacaaaaatactgtcacacggaaatttttttaaaaatgctgtatttttataaaacaccagtagaatacaaaatagaacaactcaaaacaacagtaaaacaattaaaaaaatatcagtaaaacaacaatgaaaacttaacacagtatactgcagtataaaacttataaaaaaacacagtaaaaaaataaaaaataccgtctggcagtatttttgtaaaacaataacaaaaattagtataccatgtaaatttcccttttagaacccttatttgaaaacttcatcctttcgtttaaatggattcctcatgggcctggtctagaaattggaaggaacattcaacttgttcttttcatttttatcatgtgtgtattttgaataaaagtctttgaaaatattaaaacataaaattaaaatatttttttacattcgaaaccagaaaatcaccaagagaaaagaaaagcttaattatatgtaattttagacactaatgtagcaacaaaaagctatgggttgatagccaatttactgaatattagatagaacacactatagcaaccaattaatcaagtaacacaagatatccctcctgctggcctttctttatatttattttccaaatgggaaaatttataaaagtatggaaattttaaaattataatagcatagatatgattactcatctaattactaattagttttgagaagaagtctcgtacatcttacaattataacattgtattagagaaaaaataaaaaaacctctaacaagtatccgattaaaaaacaaaatgtagaaacaaaaaagtacaatcaagaaaaagagctacaaaaaattcgaaaaccaatcaagaagtagaagagccaaaaagagtcattttttgatttggggatagtgaaccgaaaaatactaccgaaattctaaaaaccgaaccaaaaaatagagctaaaagatacacttgtgattcgaaaatagtgagccaatgcttgtaatcaagttgtctaatattggtgagcaaaaaatagtcaatatcttgaaaattgatgttagagagtctcacaatactaatatgtaaaaagataataacataaataaaattcatgaactactcttctcataaccaattagtatgaaaactatagtactttaaactactttaccatatattcctctcatgtcgtgttcgaatatttcagcttctttaaattaattatttataagtaataaatcactttagacgacacaccacagaacatactatccatccaggctatgaaatgttcttcgcgtgtaacccagatggatgtcatgtcaccatgtgcacaaattgaaataacattttctctccaagtctatgtggcaatattttactcacacgcagacttattcagccactaagattgtcaaccctttcttggttcgatgtgattaaatgaaaatgtgaagattcgattatctcttcaatatctggggcatttaatgtcttttctcaaaattcggatctcaattggtgcattgacgattattgagcactgcgtgcagtcgtatgtactccccaacatgtgatgattatacctgtaggggagaaatccaaaatttaaacttcgtattactgaactacccttttaattgcctatataaagggttagaaattcctttatacacttttagccattttcacactcaaagatatcaaagcataaaactgtttttcctctgaaatcctcgaacaccccattgctctaaacttaagatgcaagagtcgtccaagtacatttgaaagcttcaaagtcgtgagtaagtcttcttacttctttttattttcattaaatgcatgtgctactataatttatgaactactttgtgaaatttagattcttgaagttgttctctgtcgacatagattaggtagacttagggctttcgattctcgactttaacatacgcctagggcatcttaagttctcaaatttttagccttttcttattatattgctagaaactatttaaaattacatattcaaggtttctggaaattttcctggttctttgtcattcattgaacccttgatttggaaatttcattgttgaaatgaaatttcttcatttttccttttaaatcggtctggtctgcatattacacatgttttgtcctctcaaaaacttcatactcctagctaaaattggggaggtaaccactagatagatagtgatctcttccatctcctttacgagacccaacctcgactccttgtagactcatcttcatcgagtgaaaactcatcaactttgagctttgatgagtgaaaggttacgagtaactcatcggagtccccggagcccgtggtacaacatcacctttatcctggccagatcggtggggaaggatacagtcagttcatttgggaattgaacaggggctagaggtgttattttcctagtacttggacgtacaaggtctaggctgatgtctatgacacattgccagaaggccatccagagcctttaaagaaacattcta

SEQ ID NO: 35961 - DNA, 1654 bp, Cannabis sativa
tatgcgccatgttatggcctctttgtggcagccaagtaaaggagtttatgctaaggagattgacaccaaccgttatctatttcaattttttcatgagattgatttagaaagggtggtggagggaagcccatggacgtttaatagggttcagtttgttttttacaaacttagaaggggagatgatccaaaaagggtagtgctgaacaatctcgacatctgggtgcaaattcatggtctccaaccggggtttaggtctgcgagtgttgtggagaatttgggtaattttgttggtacgtatgttaaggctgatcctaagaactttcagaatgtgtggagagattatatgcgtgttcgggttacattggacatcactgctcccttgagacggcgcaggaagctccgtcggactgcaatggaggatgggttctaggcagaattcaaatatgaatatctccctacgttttgttttatctgtggtgtaatagggcattctgagaaattttgtcctaagctttttgatacaccagccgagatgctcataaagccttatggtgcttggatgaggggtcaaccatgacggagaaacaacctggtgggctctcagtggttgcgtgatgggaatgagacgaatgagatgtttgccggcctgtttagtggtggtgcagcgactgcttcggtgatgttacagcatccgccaagaagtgaggatgttgttggaggattttgtggaaattcagtcctgaataaggggggaaatatccttaacttaattcttctaatgctatggaaaatatgggatatcatgttggtgttgaccatagtgggaatgagataaatgctaacgacgttgatattgatgatcagaatgatgatatcatgttgctggattcttaaaaaaggcgcacaagggatggagtgcaatcgggccaacgaggtgtgggccaacatgctattgggtagtgtaaggatctagttgagaaggataatagtagtatagatgttcatgtggctggagttaatcaagaattgggctcgaagaacgggcctttggtgggtgctgggatccaggcccactgcccattatgagtatcattagctggaattgtcgtgggcttgggaacccatggcttatcaattccttgtggatcttattatcgacaagaaacccaattttctatttttgtgtgagagtctttgtcggaaggacaagttggaaaggctacgggtttcggtggggtttgatggattgtattctgttgatgcgggagaacatagtggtggggtgcccatgctttggcgtaataaggatgatgtgtagttgcttggctattctttttatcacattgatattcagatttcggaagtagcttattctccttggcgtttaacgggtcattattgagaacctaatagagcagttcagtataaaacatgggatttattgagattgttaaagtccgaatcttctcttccttggtgtattattggcgacttaaacaatactactagtcatgcagagaaaagaggaggaaatagatatccacagatgctggtgaatggtttcaatcaagctttatctgactgtgatcttgttgatatggagttaatcgggtatccttacacttgggagcgtgggagaggcactgattcatgg

SEQ ID NO: 35962 - DNA, 2021 bp, Cannabis sativa
aagcttctatccttctatctatttatctattttaaatttaaataatgtttcaatgtttcttttttctttgttttttattaaacgatctgctaatatgacaaagcacagctttgctagagcgtcatatttttttctagatcgagttttcaatgggagggatgtacctactaaattacagtcttgtcgtttggctgatttagcaaattaataaaatttcaatttgtattaaaaaaaaaagacataatttcaaatataataaatttgtgttctttatagatagatgtgcaagtttgtgggaaagttgggagaaaattttgattagagaataatgaaaattattgtgaagtgataggtagaatgattgaaaaaagagatatataataaattttgaaaaaaaaaaggtaaaaattaaggcatcaaattaaaaaaaaaaaaagaaaaaaaaaagggtatatagtgtaattttctataccttatggaatatggaaataagatgagaacttttctcttaattttttccttaatttatatgggtccattaattttttttatttcaaaatatagtaaacaaatatgtaaaaattaatacaatacaattgattcacattttccttgtaaatatatataaatatactctgaaatatataaatgaaaaaacctctacattgggtgtattattttctcattaacaaaattgtaattatttactggtagacatgtaaagtctcctaaaatttattaatgaagaacctatattacaaagcccatattgtgagaaatgatttcaaaaaaccatttgctatctagctatttttttgagattttgtgtgggccgaaagattaacaagccaggcccaaattaaaaaactagtagacaactcattgtgaactccagttgaaccacaataaatcctcatacaattcaagtactactagacactagcatgcattaatgattcataaaacaaagtgcaaattttttttattaacctttggatactgaaaatttaagagacaagcgtcaaaaacttaggcatgttcattaagaggatcaagtcaaagataattataggtaaaaggagtaagacaactcaaagtgaatgggagagttgtcacctgtaatatagtatcaaatgtactgagaaatgacttttcactgtacaccataatattttgtcccttaaatcagatattggatggaatgaagtgaaatatgatacactagtaagacatcattatacctatctatacctacatctatttttctaggtttgttaactttctttttttttttttatgaataggtttgttagctgtttggagtagcctcaaacatatcttcaccttgaaaatttgagaacattttcaaatcaagcccctagagaaattgaaaaaaaatcacattataaatgaaaactttgagacttttgagaaaatggtatattttactagagtaatgttatatgcatttaaaagcatttttcagctaatcacaatttttataaataggatacactgttttgaaaaggaatatcaagtcaaattgtataatattattactcaatttactatttgtttgtttaaaaagagaaaatataaaaactctattagttgaaacctaaacataaatatgaattagaaagatgttttattttgtgtcatatttaaattcagtttcgatcattaggttggatggacttatttataaactacagtcttttagcagaatttgccatcttgtaaaggtaaaaagataaatcctcatcaataagtaaattgagtagaatctatgaaaatagtacttataaaggagaattatctaaattaagtcatttataatgaaattaaattgttgaagtaaactccatattaaccattcactgtaaaaccaaattttttacaaagagattataagacagtaaataaatcctaggtggcctttggcctctaaatacctaggacagatcagcaagtttgttacaaagtttattaaactttgtaaccaactcttttctctgttt

SEQ ID NO: 35963 - DNA, 1907 bp, Cannabis sativa
  modified_base (768)..(770): a, c, t, g, unknown or other
  modified_base (854)..(862): a, c, t, g, unknown or other
  modified_base (1031)..(1035): a, c, t, g, unknown or other
ttttcttggtgattttttcggtgattttgctggcaaaaataccaattctgacgaattttttcacgccgatagcaactccggtgatttttctgacaccgacagctactccggtgacttttccagcaccgacatcaatctccgaaatagtcgtcagaattggcattgtcgtcggtaaaatcaccgaaaaaatcaccaagaaactaatttctttgagatttttccggcgacaatgctaatttcgacgactttttcggtgctggcggtaacttcgacgacttttccggcaccgatagctactccgacgacttttctgatgctggtagcaaattccggtaactttttcggcacgagtgacaactccgacaatcactgtagtttcatttattttatttatttttttaaataataaatatgaatgaagagaatttaaatatttttttatggtaattcaattccatatatgaagtttttagtttttatgaatcttaaatttagattctctttttaatgttttatatggttttttttttagaaaatcatattttcagtttgattggttagataatgccatattttgtggcatttactttttatgtcatatttatcataaccttaataattttccccatattattgaaaatagccttttaatatttctaccaaatttatattaaagtttaaaaaggcaaacatgatattatcttgtggtgaagtgagaagtccataattttattttaggctaattaggatttttttctccgaactttnnnatgtaccaaatcatgctctctgaatttttttggccgttaaaaaattcaccatgaactattgaaattgttagatttaaggacttnnnnnnnnnttcattcaattttattgtttcaatgattgtttatgtactaaaccatgctttacagactttgatatctaccaaatcatgctcttcaatttttaatatgtactaaatcataccccctgaactttaatccatgttagaattttttagtaaaattagacaaaagtctttaaannnnncaatctcaatagtttaggggaaatttttaacgacaaaaaaaattcagaagcatgattaagtacatatcaaaattcgagagagagaaaaaatcctaattagcctttattttatttttcacatttgacaataaattagaaaaccattctagtttccactattgaagctctttgaatccaaccaatatttaaagtggagcagatattcaaatttggtgaaaatgcagcacatgtgatatttcgacaactttcccaagtctcacatgtttgtttgtgtgacgttagatataataagtgccttgtttttgttcccattcccaaaatgatctaaaaaaagaaaatatgggttgtatttgattttgaatgactttaattaatgtgaacgttaaacacaaataagttaattttgtgacttcatccatttcatacataaatacacatgtttcaatggtctaagttcgtatcacgcactgatgatgtcttcaatttatttttttgaatggttttaatttgactaattaatggatacaattgttatgagatgaagaaaagatagatatgcatagggatttggggtggacgcagagatagaaattattcaattttatacaactcaggatagagtatgaaataatgttttttgttttcttagaaaatatagtggatgcaatagaattgaattatcatcacttatttaccaatgcatatctaacgaaagtgctaaatttattgagcattcctactactaggtattaagaggtgtctagcaccactataaaatcacacttttaactataattaatgatattttataaaaaattatattaattatgtgaaactcaatactaaaatatattgatatgatatttttaagt

SEQ ID NO: 35964 - DNA, 1267 bp, Cannabis sativa
gctgcacaacatgtttaaaaatcatgtaatacgcctatgctagttagggtgttacacatggtatgcccatgcccacactttagcctatatatacctatttatttccacacgaagggggccaggaagtaatagttgaagctctgtcaaaatctcccaagagaaaccaagagtatagagttaggttttccactataaacaccactgtaatacattaaaccaaccttttaaggccaatatacagacttgtgtattagggcttattaatgtgtgaaccacgtaaaactctgtctattttatttataacttttattatttcttaagctttttttaaatttatttttaaatatctcggtaaacataatacataattatgaaaacaaaatatgtgaataaagtaattgacaaagtcaaaatattattttataactttattgattataaataaaattatgttgaaattaaattttattaaagtattaagcttaatagtgggcaatggcgaattaaggacacttattatgtgcgacttgtactaattaatttgaagtaaccttgttttacatatttgtttgcaagaatcacgaggagtatcatttgtccccaataaatcaatttcattaaaattgaaatttgtacttttacctttctaggtatactatttatttgagtacaatgtaataaattatggtcgcttttggttgaagataatgatatgaaatagaatgaaaaagaatagtttttattctaataaaatgacatttctaccattttataatttctatttttaaaagaaaggaaaactattttaatgtaatatgaaaaaaaaaattaatgattcttttttgtgcaatttaaattttattctatttaactttcatttctattattatttctatccatattcttatattttcattcatcctaatcaaacgcgacttatatatctctagaataatctaattataagatatcgttatagtattacacatgcatttgtcatgcatttgtttaataataatacatgtcaaaatgggagcttattagcaaattaattaatagttcttcgtatcttctctctaaattaaaatatattaagttatccatagtttcttcttttctttttaaaagcaaacaattaacatatgatatattaagtgtaaattaattaatatatatactaatgaaagaactatatataggaggtactcgaacaagttttgatgtatacatatttatttggaatttgaccaataacataacgccgttt

SEQ ID NO: 35965 - DNA, 2774 bp, Cannabis sativa
ccgcaaattactcaaatttaaattcctatttaaatcttttttttttttttttttgtattaatccttttcttttaaacaaacactacatatcttttaaagaaaaaaattctcaaaaatttacaataacaattatcattaatataaagtgttgtaaacaattactctatgacaaaatttcccaaacttttaatatcatattttgtttaatgtaatagtgatattgaaaattaaatcattattaccaaactttataatggactaataataaaatgaagaaagagaataatagtaatttttgtatgtggcactgattttgtagtagtcttctcaaggttattttaatattcttgagtagacttttgggttaatagtatctctaatgaaagattttaaatatgtgctaaatttaataaaaaaaaaataagtttgtaatatatttagtttattattgcaattgtgtttcaataaataagatgtaaaataatgaaaaataattaattatattaatagtcatttaatattttattgaaaaaatataaaaattattattttttactttaaaataataatagtaataatatagtaaataaataatgtaaaattcaataaaagttaaaatataataattagtgacattatagtaaataaaaaaatagcacttattgtagactaaatttaacacaaaagttatataaaaaagtagcacttattaaatcttgtgttttacaaaaattatcaattgaatttttttttttaaaaaaatgataaattaaactctatatttttttaaaacaatacattgacctcaatttttatcattttttctaatatattcaacgtagaatttagtttttaacacaaataaatacaaaaaatataatcaacttggttataacatttctaagtcaggttataattaagttttattttgatgaaaactaagttcaaggtattatttcataccattttaaaaaacatagaatctaaataatcacttaacacaacaaatggtcaaattgataacttttataaatgcatgttctaaaattgtatttactcttattaataaatagtgagttaatgtgtgtatttttaaaagcattattattagcaccaatggtgcgcctagcactatcttcgaggtgacatattgtaaatagttagtaacactctataataattattaaattaaattgtgtggtaataaaatgtgtcatcgtgtcgtatttgtgtcatattttatgggatttgcttttatattttgtattaggcgtgttgacccgttttttgactctcgtctaatatttttaaccctaaatcaacccgtaaaaaatagtatcgtgtttatgttgactcactttgactcgttttgctattgaagttggaatatatagagaaaaatgataaatttaagttccattaaaaaacttatatacatttatttatataaagtttttatatatataataaaaattaaaattttaaaaatattttcaatttcatttttaaaaaattaaattaaaatattttaactaacattgaatcactgaatatatattttaacataattatattactattaattttttattttattttatttaaaaaaatcgtctctaattcgtgttaagcgggtcgtatcgtgtttgagccgtttttatttcatgtcaagtcgtgtcgacccatttttgactcgcgtctaatttttctgactctaacctgtaaaattcgtgtcgtgtcgaaacccgtttttccaccactagtaaaatacgatatttaattactctaatagcaatataacacctattagataatgttagacaccaataacatttatcgtatttttatggacaaatactattttaaatcatgtattttacaaaagttattgactagaccataattttttaatttttttttttttataaaaaataatttgatatagaggtattttgataaaaatgattacattttctatatttatctgtgctaaaaattgtttttaaattagttaaattaaaaaaaaaatatcaaaaattaagctcgattaaaaaatacaaaattaattttattatttaagaaaatagagagttgaatgaataattttacctaaacatttgatattaagcctatttttatatattatattaaaaaaatggaggagcatagattggccagaaagtgatagataatagggccccaagtggaaacgacagtaaagaaaatgccaaatccaacgtccacacacactctgaatctgcacattgatatctacaaatcatgtgttccttccataacatgtctcactttaatacaaacaaaattaacaactttatttaattaaacataccaactttatttaataacacattcaattttgagggaagggtattttgtcaataaattttatgaaccaatttaagtcacaagatctatgctttttgcttttatggcaattatcttcatttattttatcttcaatgccaagatttttgggtgatcataatgacatgaaaatggaaaatatttcaaataataaaaatattattatttggtacatgccaaacactataggtacaaggtcgggtttgtgaaaaaacagattagatctgcatttagaacccactcgacaaagaatccaaaaattatttgctaagagatcataaaaatactaataataataataataattgttgcccctgattttgcccaatgtacgtagaccaaccagataaggacacgtggacacaaaggttttagcacttaaattaata

SEQ ID NO: 35966 - DNA, 1311 bp, Cannabis sativa
ctcccagctcatccaattaatacccttaccgctacttgaatctgagtgccaccagaacttggccataagccgctctaactccttacaagtgtctgacggcaagaggagaacattcataacataactcggcaagacttgagcaatagatttcagcaatacctcctttctcgcacgagataagatacgcccttcccacccttgaattctcttccgaagcttatccttaagaaaactaaggatcgcattcttatttctcctaaccaaacatgacagacccaagtaatagccattttcatcggcctcataaatttccagcatagcacaaatggaatcccgcacctcaattcctgtattattgctgaaaaacacaaaagacttagagaaattgattctttgccccgaagccacctcgtaagtatgcatcaactccttcacattgtaagcttcttcctcagttgccttacaataaaacatgtttagttaattactttttttctctctaaatatatatatacaaatatatctgatttttttatttagttcttacaaataaagtttgaaaaattatgtataatttttcaaatattaatatatatatatttttaaatttctcagtattatttttatactaaaataataaaaataaaataatttttttactactaaattattcaactctttatatatgatcttgatatatacatataatatagatataagtaaataaatgtaaatatataataaatatgtttgttatactataaattaaaattaataatttctttccattcaaaaaaaaaaatttcttttagttttataatattttctcaaaaaaattaattttcttttcatacataaaataataaatagaaaatatttttttccctactaaattattcatctaaaaaaaaaaaaatcttaaaaatagattgaactcaatatatataatatatgtaaataaacctaaatatataaataatattttagttgaaataatattgggtcacatcaaagtaaaaaaaaataagagttttatttaaggtaaatagtagcataagtagctaaagttttaaatttgtaagtgacataaacccaatatttatttttagcggtataagtacccaatgtttgtaaaactataattattctctaatttcatcagtacaaactcttttattttcataacaggccacatataaggtttaaattttaaatcattgggtctagacagaaacatatagtatcagttacttccaaatattcttttaataaattcaaaacggagtttgtattgacaaaattggaagaaaa

SEQ ID NO: 35967 - DNA, 1534 bp, Cannabis sativa
tctcgccgcggccacatatggcctcgccgcggctagttagcgagtgtggaaccccctttttgccaagagtatttcgccacgaccgtatataaatttgttgcggcgactgctctccctcgctgcggccaaagatggcctcgccgcgggcaatgggcagtgcccataaaaaaaaaaaattctttcccttttttttttgaaaggaatgaaaaacaataaactaaaaattcaatggacaaaaactaacaaaaagcaagaaaaacaattaggaatgttcaactaaaaacaccattaaaacttgggttgcctctcaagagcgctgtctttatcgtcatatagccggacgttgattgtttcttcaaagaggtgccagaatcatggcggacttggcttggtcaatatgacctcccaactagagctttaacccctgcccattaaccttaaaagtctctaggtttttgccttttagttccacaactccatatgggaatgctttgaccaccgtgaatggtcccgaccatctcgacttcagcttaccaggaaatagtttcaacctagaattaaaaagtaggactttctgcccgggttgaaactctttcctgactaagttccagtcgtgccacttcttggttctttccttgtagattttcgcattctcataggcctcatttctaattcttccagctcattcagttgcagcaatattttctctcctacaactgctaactccatgtttaaggtcttcatagcccaataggccttatgctctaattctaccggcagatgacaagcttttccatacaccaacctatacggtgacataccgataagtgtttttaaagctgttcaatacacccacagtgcatcatctaacttttgtgaccaatctttccttgatctctgcactgttttctccaatatcatcttgatctcccgattggaaatttcagcttggtcattactctgtgggtggtagggtagagcagtcctatggcgaacgccatatctggatagcagagcttcaaattgtttattgcaaaagtgactcccttcatcgctaatgattgctcggggagttccaaaacgagtgaatatgtatttttgaaggaaatacaagactgttttaccatcattacccggagttgcatcaacttcaacccatttcgatacataatccacagccaataaaatgtacaaattgatgaatgaagatggaaaaggacccatgaaatctattccctagacatcaaacaactctacctctaagatacctatcaaaggcatttcgtttcttctggaaatgttccccgttctctgacaacgatcacattccttcacaaagtcattagcatctttgaaaagagtcggccaaaagaatccactttgaagaacctttgcagctgttcttgtgccgctgaaatgccacccacattgtaaggcatgacagtggttcaagatagaatacatctcttcttcaggcacacatctccttattatctgatcggcgctgtgtttataaagaattggctcttcccaa

SEQ ID NO: 35968 - DNA, 2113 bp, Cannabis sativa
attccatacattgtacaagctattcaggaagaaccttttggattctacaagaccttctgcacagggctttttggatccacactaagcttctggtatttgctctccgaattcacagcttctaatcccggacgacaaaacttgcaaaccataaccaacaaatctccatcttggtttcaagttgaagtcacttaatacatcattgtctaaatactgttgtcctctcagcccctctgggctcagctgactccaatcagcttcaggcaatgctcaaacttactacttggcactaccttagttatcatatctgaaggattgtctttagtgataactttggcgatcttcacagcttttttctccacaacctatcgtatgaaatgaagcttgatatcaatgtatttagtacgctcatggtgcacacaattcttggttaattgaattgcactttgattatcacaatgaacaataataaccttttgattgagcttcagctcctccattaacccagttaaccataatgcttaatctcttccgtcaaggccatatattttgcttcagttgtcgacattaccacaaccttttgaaggttttctttccagctagtagttttcccgaacatagtaaacacatatctggtcagagacttccgtgtattaatacaccctgcataatcagagtccacataaccattgataacatccaagttttccttcctatcattcatgccaaatattagtcccttctcagcacttcttttcaaataacgtagaatccattttagggcttcccaatgctccttttagagatttcccatgaacctacttaccatcctcagtgcatacgctatgtccggtcttgtacaaaccatgacatacatcaaggagctcactgcactagcatattgaactcttgacatctctgtcttcttagtatcatctaccagcatctgagtaccactcagttgaaagtgttgtgcaaggagagtacttactgccttagagttacttatttcaaaggtatttagaaccttttctatgtagctcgtctgattcaagtacagtagtcttttctgcctttcccttcttatatccatgcttaagatcttgctggtcgcacccaaatctttcattttaaactccatttttagctagcgcttcaagtgtttgatctcttgtacactcttgctggcgatcagaatgtcatctatgtatagttatagatataaagtatgtctatttctctctcaaaaatatatacatggatcaaacttacttcttttcagacttatcttagtcgcataatcatcaaatctcctgttccactgtctcgaatattatttcaagccatacagagactttcacaacaagcacacccagtgttcctttccaacctcttcaaatccttcaggctattttattagaattctttcatcaagatgtccatacaagaaggcagttttgacatctaattgttctagttcgaggtcttgacacgcaacaagtgccaacaaaattctaatcaatctgtgcttgaaaccggagaaaaaatctcattataatcgactccttcagtctaagagaatccctttgcaaccaacattgctttatattgtgcctcttgtacatttggaatgccttcttttcatttcaacacccatttgcatccgatgactttaccatcttctggcatcgatattacatctcaagttcggttcttctttagggagtgtatctcttttaacatagctccattccatttcttctaatctttgctcttcatttcctgtgcattgctagtgggttcttcatgcacaatctgattagcaacatgaaatgcgaatgcaattaaatcaacatgtccatatttatctggagcctttacttctctctacattctatctcttgccaatttacagcttttcagattattacttctagaatcatcttctgaatcatcacttccatgatctacaggtgtttcagtctccacccttcctagaggctacactcaagctcagttcctagagctttaatttcttctcagtcagtattggcttgacttcgagcaggtttgtaaatgaatcccataacaaattaattaaaggtctcatccctac

SEQ ID NO: 35969 - DNA, 2258 bp, Cannabis sativa
  modified_base (329)..(329): a, c, t, g, unknown or other
  modified_base (722)..(736): a, c, t, g, unknown or other
tattagctaatttattatatttaactattttttttttaaaaataatattggaaaattctataatgcatctccttaaaagggatgtaccgataaatctttatgtgttttagtatccgaaataatttttttgtcaatttttttctcaggtcatgcaaattatagttatttaagacatcctacaaaattatacgaaattcaaaaaagtttaacacgttgaaaattgcgttccaaatagtgtgttgcagtcgtgactattttattttatacgcgtgtaaatagactgtttgaacattattttctatattataaattattttgaatttctcaanattttataaaatatcttaaatagctataacgtacatgaatataaaaaaaaattagactaaattttttttagataccgaaacaagtaaagagtgtataaatacattttttttaatagagtgtatcgaagaatcacccaataataattactaacttaatttctaaatttaaatttaacatcattttaataacattggaaaattctagaatgcactcccttaaaatggatatattgatgcacccctatctgttttagcatccgaaataattttctagtcaaattttttctcatggtcatgtacgctatagttatttaagacatcttgcaaaattttaagaaatttggaaaagcttaacacgccgaaaattatgttcaaatagtgtgttgcacacgnnnnnnnnnnnnnnnatacgcgtgtaaaatagactgtttcaacattattttttatattgtaaattattccgaatttttcaaaattttgtaggatatcttaaataactataacgcgcatgaatataaaaaaaaattagactaaaatttttttttgatgccgaaacaagttaagggtgcaaaagtacattccttttaaagggtgcattgtagaatcacccaataacatttacctttttaaaaacactacatattcttaaaacaaagatctaatacaaggcgaccacacaataatttttgatttttttttttaagcaatggaaatacattttaaaatacaaacaataggaagtcggtttactttgatatttatttgcaaaattattaaaataataaataaagaatctttgcgtgttgataacttaatgctcctagccgagtgtccctaacgaccacttcctaaacaaacggcgacggaatagagagctcctgaaactgaagagtaagatttaagccacttaaatcatgccacgtgtaaagataaccccgtttgtaataggagagaaaaagagccatgttttttgggccaatttaccatctccttcgacacgtgtttaaaatacacacataacattcatgccacgtcatcacttagtttaaccgtggtacgtcccattctttctacatcgccccaggtttatgaatttgacttttttgaccccttaatttggggcccaccaagtcctccaatcggtcccaccacccacataccctccctccttatccccgaacttaacgacgttaactatctcacctctccaccacccacgttacgttacggtctcggtccttgttgccctccaccgtcaacgttatctttcacgaatattccttctcgtttcaaatatatttatatattttttacattttttattttatggcttattatgataatggtgaccaaaaagtaaccaatagagaccctccctttttccatgtaggattttggacctatttcctacgtggcaaaatactccaaaagagagaaggaaattaaaaaaacaaagaggaccacaagttttgtgcccaatttttatttattttaaattgaagaaagaaaaaagtgtgctaacaatctaacatgcttatcgggataactgctcgaatacaaatacgtctgcattagggataaaatgacgaatgtgaccctcgttgatcctattcgaagaacctttaccttttctttttagatctgatgaaggagaaggggatctttctcatcccataataacaagcaaagcatatatttttaatttattaataaataaataatttttttttttttttttttgaaattaataaataattatataaacatgaatatatttatatatatattttttgataaatgaatatgaatatttttagttcctttagatctgtttttgtacccacacgtgataaattactccaactctacaaccgcttctaatctaaaccatctaacgttgttgcttgtgtgcgttatttccctttgatc

SEQ ID NO: 35970 - DNA, 4388 bp, Cannabis sativa
  modified_base (4331)..(4335): a, c, t, g, unknown or other
ttcttacactttcaaagggcacaatctgtgggaatttttttgtgttctgagctgggttatgttttcatgtgttaaggtgcatgttgttgggacattacctaaggggacttgagtatcgagtgcaactaatggaacttctagtccttacaaacgactctgaaagtgatgcctctgatggagctcaagctgcttaaagttttggagttgcttcattccatgtgtatatacattcctactcaatattcaataatacatgtaaaaatataatttttttttaaagtggtgtaagccaatatgcgctgcaatttatgttttatttagcaaataagaataaaccacgatccagatttcatttatactatatataatctttattgaattacaaattagccttccctgaaaaaatatgttaatgtcttcaatggagcactcccataaccctctttgttagaagaaattacactacatctttttttacaattgatgtctttaatttttatctttttttattaaaatttattatgtttagttattttttcaatcattctactaattttatctttatcatttcacgatagtttttattttctctaactaaaattttgcttgaattttcccacaaacttgcacatctatctctaaagaacacaatttattatgtttgaaatattatcttggttatatgagggtataaggataatttgaatataatactcataaaaagaggtatatttaaattaaattttatttaaaaatttagttaatttatatataaaaattcaatttcattcaattttactaattcagtaattatttataaacgaaatcatgctctccaaacttttatatctatcaaatcatatccctcaaactttgacatgtaccaaatcatgtgcacttaactttcatccatgttagactctccttacaaaaattagataaaaatccttaaatccaacaatctgaagagttcatgaaaaaattttagcaaccataaaaaattgaaggacacgatctggtatatgtcaaatttcaagggtaagaattctaattatcaaaattgtattttatttttgaaattttaatatatactattattatatataaaatatattttaattatataatataaatatatatctccagtattaaaacttaaaaattaataaaatatgtttataataatgttattcaatgtataaatgtaaagaagttttaaatgaatgagtctagggagtaatgaatttttagtatggtttctttaaatattttaaaagttctatattttagaacatcttatgtgagtgagtgtataagtcaagtccccaaattatttaatagcactttttaatttattctacttttgaatatttttaattttataaaaattataataaattaaattaatttttttatattaaaaaaacttaatttttttgtttgaatccaaccataaacatcagatttcaatttttatccaatttcatcccaatgcaaagaacatagaagtttaaatctcaacacatcggttaattccacaatatagactagtgtgtcaattaaattagcaaataatactcattatgagaaagctagaaaagataactcaaatacaaaacttcacaccattttgataacatcaacccaaaacttgcaataacattatcttgtatcattccttcatcgagtgaaaatgtatagcatttaatcaatataatagtttactctgaatctgatgaatctgggtttgtactctgccgaacactcctcctcgtagacttagatgaattatgcgatgattcaccttcaaaaaagattactttggatttcgccaacctctcttctagttcatctgtgctgaacccatctgttccaccaagctcatcaaatcccacctaagaatacacattaaaaccatcaaaatgtcaaaagaaattcaacaaagtaaatatctgtatgaccagtgaactgttttatgtagtaacataccacataatcatccactttggtgttctttatgagggcgagtgttggcagaacaactatctttaacttctcggacaagaatgggcttttctcagcatttattttcacaaaacgagtctctatatgctgctttgataatatactcaagtgcttgtccatcacctacaaataaactgtaagaatcacttgtctttttctgtttctttctttaaaattttatttttaacataataaactatatgaacacataagaatattccatggaacaagaaagattttagtagcatatagagaacagttgaatacattatgcttaaatggtttaactacagatttcttcttttttatattataatttctcaaaggagaaaagacagtttaagaattggctatcaaaatccacttcttaatccattctacctgtaatatcagatcatctccctcgaatgcacatcagtataaatcctacattcaaccacaaaaaatcccccctatatgttcgtataatagcaagctactgagttcattcactgccagcttatatagttcactagtttaattttagaaaccaggaaccataaatgggaaagaaaattatcgtttatgttgatctatatcaaattctaacaacaaagtctaataacatttggccaagaaaaccctaaacagcatggatttgtgctttaatcattaaaatgaaagaaaattaccttgcaaggccaattttcgcggtagaaatgacagacaacgcgatcgctagccttaacgacggtgaagaagtccttctcggaagggatctcggagtaatcgccatggccgagggcgatccaacggctacgcttctccgccatcttcttcatctgctggagcctccgctccctcagcacctctatatcgtcagtgtcgagccgatccaatgccgcgatctcatcatcgatcttatcctcaaccgccttcaccaccgtcaacacctgcttctccagtatctgttccgccaccaaaaaaaaaaattgaaaaagaaaaccatgaattgtatgcacaattatgtagctatgtgattgtgaattgcacaaaattgatcaaaggaaactacctcctgaaccttgttctccattgatgatgaagattcagtgattcagtctcacaggttttggtttttgtttttcaaatgcaaatatatttgaaaatgaataatatcatgagtcactgagccatatgtttctgtcgctccacacgacgccgtttagttacatcttacttacatgggctacttgttctgcatgagcgggttcgtttcatcacgacccggcccaaatatatttcatttgatttttcttttctcttttttaatgttaaatccttatcttataggttagcaaaaaaaatcttatgatattgattaatatttgtcaaaagctctatgtttatggttttatttttctatattattttaagaatttgtgtgtgtttaatatttctttaaggaatttaatatttttaaactattttttgtatttttataaaaatctatatagaaacttacattgtaacaacctaacttctaattaaaattcatatagcaactcacgtaaaaattaccaaaataattatttgagtaattaaaaaaattaaaaataatatataaaaatttctttttttaattaatattttaaaaaataaaaataaaattacggtgttagtttttgaaattttgttttaattcttatttttaattgtttatttctttcagaatcatttcttattatgcctattattatttttatatcatataatttatattttagtatatatttttttttatcttactaagtttacaattttaagtttacaattttttttttttttgttttaattatatgcatttttttcttttttaacttttctttcttcctctttactttttctcctccctactttacttagttttggtctaaattaagatgtttatgttatggggtttttacactacataataaatattttaacttttttacttttttttattgtgggacagagtttttttcaaaaatattatatatattgtattttaagagtttttacacagttgttccacgattattttttagctcttttaactattgttttaattgttttattttgttattttacaattgttttataatagacagtacttttataaaaaattctatgtgacagtaaaattataaacgtttacctaaaatctaatatttttataaaaactcattgttttatcattttattttctccttcacttatttttcattttctttggggtaatgcacataaaaggtcgattaggtattgtatatatatatatatannnnnactaggtgaatgtacgtgccgagtcacgtattgctagtttcatttaagatttt

SEQ ID NO: 35971 - DNA, 1182 bp, Cannabis sativa
  modified_base (1150)..(1157): a, c, t, g, unknown or other
tctagggctagtagcagtcgctctagataaggaaaaggtagaaaaaaagaaaatgttgcgggagaagcatattctatgacagttgatgaagtttttgacccagctagacgtggagccattaagggtatgattgttgtttctcattcttggtgttatcctaatttttgtcctcctgacgtggacaaaatcaacgccacatggcaatacaactcactaataagaaggccaaaagcacctaagaaaatgccgtcacttaaacgggcatcaagtgacagactagctccctcataggagatggtcggccacccctggccggccctatggccaactagccttgggactgcaccacggtcagctagactgtcccccataaggtcctggctggcaaggaggtattctgcagagtttcctgtgcacttctacaagtggacaacaactcttaggctacaaattgggccctaaaagcccaatagcatagttgaataatatctatattcaatggcattttggtcttttgtaattaactaataaaatatacaaatatctagggtttcaagttgtaatctaggggttaggtctcctatgtaaatgtcttaactctaatctagaaagcctaagctcaatctaagtctgaaacctgcctccaagctctaagcttaagtctgacaacttctctattcttcacttcctcacctcacatgcccatacaagcactatcacttgagttttgccattcttgattcatacattgtatttctaagggtgttatagtagatttcatctatagtgacctagatagtattaaccctcggtattaagacaactaaaaaggaagcaggccattatccgttatcataagggggtcgaacctctataacaaatctgtttgtttattactttttattcttgtttgtgcaatatgtggcaagcatcagatctatatgaccccgctgtcggttgatcactttttgaggtcaacagtttagtgttttcattaagagtatggatatcgtatatgatcaaacaccatggttaacacaagaaaaacccctatcgcaccatctgcatcttcgggtctctctctagacccacagactgtagaactagatacttagtgcatgtttggcatcataactaaaaaattgttttnnnnnnnnaaaaacagaaaattattttttgaaa

SEQ ID NO: 35972 - DNA, 1215 bp, Cannabis sativa
tagtcgatactgggagctcaaccaacattctatttgttggagttctaaaagaaatggagatcgaggacctaaaagcccaggacacccaggtcacactagtagggttctcgggggaaagcgctattgctcgaagtttcgtccaactacccgtctacgcgaatggagtcaacaaatcagtaaaaaatttagttatggacttcccctcggcctataacgccatcctcgaaagaccatggatccatgcaatgaagacggttgcatcgtcctaccatcaagtgatcaagttcccctgtaagggtgaggtaagagagattcgaggggatcagttgggggcccgcgagtgttacacctcctctttgaggagtaaaaacaagttatagcaattagttaactcctagaccccagaaaagaacagtcacccacagttgaggagttacgagaggtacccatacacccgacggaccccacaaaaacaacctacatcggcatgggacttacgggagactgggagaatcaaattataggactattaaaagagtattttcaagtgtttgcgtggaaacactcagacatgcctgggatagatccgaccataattactcacaaattaaatgtaaacccaaattatatcccggttaagcaaaagaggacaaaaatgggggcggatcggaacaaggcggtaaatgacgaggtcacaaaaatgctaaaaaatgataccattgaggaggtacagtatccgacctggctcaccaaccccgtggtggtccccaaaaagaacgaaaagtggagagtgtgtatagatttcaccgacttaaataaagcctgcccgaaggacaattttttgctaccacacatcgacatgataatcgacgctaccgcaggacgggacttaatgagcttcatggacgctttctcaggctgcaatcaaatcatgatgcaccctcctgaccgagataaaatgtcattcatcactgagaggggaacgtactgctacaaagtaatgccttttgcactcaaaaatgctggagctacataccaacgaatggtgaaaaaaatgtttgcccaacaggtgggtctgactatggaagcctacatcgacgatatgttggtaaaatccaaagatggctccgaccactttgaccaccttcgagaatgttttcaaatcctccttgcccactcgatgaaactcaacccagccaagtgtgcctttgctgt

SEQ ID NO: 35973 - DNA, 1796 bp, Cannabis sativa
aataattaagtaattagtgttaattaattaccaattgacgaccagtttcttctctaatgccagcagcagcagatgcaaaattgactcctccaagaatttgttggcctcgagcagttgcatatggtggaatataatcctcaaatcccaatagctcagctgttaattacaaccatattaattaattacttaattaattaacatctttactacttttattaaataacattgttattaaacatcactggtgtctaatatcttttataggtggcgtccaacaattggttgacgatattattttctaaaagttattttcttaagttatatagaatctgatacttaattatatacaccaatattcatgtttagtacttttattaaagacggttgttggtgaagaatttagagcattgttattgagtaccagtggtgcctagcacttttttataggtgtggcaccccactattgattagaggtattccttaacgtctattttttaagttatataagacctgatatttaattacactaataacggtattacactgaggaggatactaggtaccagtagtgtcttttaacaattctcaagaatttaatagggccttagataaaattaaatttgagatataaaatagagcattgttattaggtagacttgtaaccttataattggttagcgatactccttaaaagttattatattaattaattatataaaaacttgatacttaattgcacaccaatagtgatattcacacgtaaaaaagtgttaaacaccactgatactttttagcatttcacatataaaatgtagacaaaaaaataagaaaaatgttaaaaagtaccagtggttactagtacccttctcattattatatcgctattggtagtataattaaacatcaaatttcatataacttaagataataagttttaaaaaatattacaaaccaaatataaaatgtcacctccaagcattactcatacaaaataacaatgctctaaaaaaatatttatatatatgcggcacacttactattactattaattactacttaatattgtagtttgtaataaatgattttctaccaatatttaaagttgtataattattactatttattaccctcttaatttattggaccccacaattaggactatattcaagcttttgaagtacttcaatatggagccacacagcttccattcattaaaccaaaaataatatttatatatataaataatgaaattaataaaggaaaatgaaacgattcaaaagaaaaagtagtttgttgtatgcatcttaatttatttttaactcatttatagaaattatttagcttaattatctgtttttctacatatatttaattttctttcactaaataattaaatattatatttggtgccaaaaaaaaaatcactataatttctataataaaataaaataaaatgagtaattaaactaagctctcttacaacttaagtaacataacatgtattatatatatattacttcatttaaataatataatgagcaaaatcatgaagcattatataaagatatatatatatatatatatatactaaccaacaacatcaacagtggtttttccattggagaatcgaccagaaggaccattaggaaaatcaataccataaggcaaataatcagccctagccaatgattgaagttgattattattcccattatcaactaatgaatctccaaatatgaagtaacatggtacttgtggtgcaccttcactcactactactacactcattattatta

SEQ ID NO: 35974 - DNA, 2755 bp, Cannabis sativa
cgaaccagcttagggagggacctgttcaagccttccagtcaagccattgcttgatttcatccaagcagtaaaaggataaatcacattcaaaaaataaatgctgctcattttccaaattagaaacacataagctgcagtggtcatttgataagatgccataccttttcaacctctctttggttttcaattgagtaagcattgctaaccaaagaatcacactatgttttggtgtgttcagccttgcccaaacctctttacaccattttacactctgttgtggtgtagtaaacagactatatccaaatgctattgtatctcttctttgctaaaatgagtcacaatcaatcaagttggttagttggttcttgatggttacaagcttcttccaataccaacttgcatggatagaagcattgtaatcccaccaattttgatctttgatgtagacactattaactcatctaagccaaagactctcttggtggctcgagatagcccacacatacttactcatggctgccttgttccattcttccaactttttgatgcccaatcctccttcggttttggttggcatattttgtcccaagctatagctcctgcaccacgaaacataggttgcccttaccaaagaaaagctctacaaatagattcaattgccttcaaaactttctttggcaaaatcactatttgactccaataggcttgtatggctataagaattgagttgatcaatgtgatttggcctgcaaaggagaggttcctagaactccaactcctgattctagctgtcattttctctgccagaattttgcattccttccctgatatcctctttgcacaaatgggaatctcaaataagtaaaaggcagattctgcctcatatatcctgacagttgcaatatcttgtttacacttccttgatccatgttgctgcaataaattgcagttttacttggattaggatgtaggcctgatgttttagagaaaagcttcaaagcctgtaacatatacaacacacttctaagatcaccatggcaaaatagaagaacatcatccgcaaaggccagatggttcaatttgagactagtacatctgtcatggaaataaaaatcctctttgtctccaatcttctccattaatcgagacaggtattccataccaaggacaaaatgcaacggggacatgggatccccttgcctaagctctctcttaaactcaaaaaaaccgtgtaaggctccattgaacataaaggagaacttaggtgtagaaatgcagttcataagtaatcggatgaagctctgggggaaattcaagcctgttaacatttcctcaataaattcccattcaatagtgtcatatgctttctagagatcaagcttgatcatgcaactgggtttgtttgcttttcttccataatgtcttaccagatcttggcaaatcataatgttatgtcctataaatcttccttttataaaacctccttgggagtgagatattataataggaagaatgttactgattctagagctcaaaagctttgttgcaatcttatagataacattgcaacaagcaattggtctaaaatctttaacagagttaggacatttacatttaggaaccaaagtaattatagttgagttgatttctttaagaatattacctgattccaaaaatacattaaagggtagaatagtaagtttgtccctattcgatgtagatcatctatagaggatccttgactatttggattagaacgatggataatccatagcgtatctttctcttgtgttatcaactttttcacctgcatagcccgcgaggaataattaaggagagacaagaagtcatcaagctgcccaagggcctcgctccatcatcccagagggttagggctctaaccctgtggaccagtcttcacagacctccgcgggagaagtcctcgagaatagagaccataagggaggtgttcgcgaatcagcaaccctctcctctagaaggcaaaaccgttagctaccgcaaagatcatggaccttccatcaagaagtattgatccggggtactcctttaacctacaggggttcgtatgcacatgccaagctaagggtccaccactcactcttttcctatgtatgatgtcagaggttgtctctcacaccacctaagcgtgcatgtccctatgtactatggaaaatgatctaacagctaagagcgggggtaaatcaaataaggaaggccctagagtagcacacatccaaagcatcgtcagtacaaccagtacaatctgacatcggtaaagaccacatggaaaatatgccacctaccaattacacgatgggggttcatcctcatgaagatccataaattataatccttgcaagggaagggaatcgacctataaatacccgtagagacacacaatgcgggggatctgatccaagcttcaacttcttctcttttaatcccttcgactctccatcttaagatcgaaggcgagttctttgtaaacacattattataattcgattattaactctagaatattcctactaagcttcctcttcttcaagaggaacacagtggattggagtaaagtctatcccttttgtatttgtatcaacattcactggccaaagagcctagtaaaatggactcgtggactaaggataattaacgcctgaaccacgtaaaaatctcctgtctattattataaagaccgcctagtttaatttgaaaattagcagttaattatgtt

SEQ ID NO: 35975 - DNA, 1029 bp, Cannabis sativa
gtaacaatggataattcaattatctcaaactcctttctccgtcttttctgtgttgagttttctttgaacactatttgatagatacatgatgatcatgtagtatgtaatctcctcaatttctaccttttcctcaaatttcttttctacagtaatttctcatctccaagaaccttagaaactttctggtacacaaggatcatcttcagactttctctccacagagcaaagtccctaattccatcgaatttctccaatttaaatcttgccattgatggctttcaagtttcttcaagattgcagcaaaaagaatcttgattctacgttcttgatcgattaccaagctctgatttgtgagaaaattaagactaatggtgcagaatcaaatcaatgaaattttaaacaatcaaacaattaaaaatgacaagattaacaacaagaacaataatcagagataaaacaggagcaaacagagtgttaaaaccagaaaacactaaatgtagaaaataaagaaatcaacattacgatatatactagttcaagtccaatagatcgatgtgatctatggctctactccagttctagaacaccaccgtgttaactctcacattttcacccaagaatcttcttcatcaatacagtcgagacgagattcattgttgagttctcacaaagtgtttcaactctcacattttcacctaagaatcttcttcatctacagaagattcttcttacaaaacccaaacccaatctttctcttttctctgtacctttctacctctcaatcttctctctctctctaactctcaatctacgtctaaacagagtactcaaagtcgtatctcaatcgtctcttcaaaagttgagtcaaggtggtatttatagacttaggatcaagatcctaaagtcggcggttgcaagaaatgaggttgttaattagttagttaaaaataactaacttaaccaactcttcatttagcaaagtctttgcgtaagtaccagggccttcgggatcataaacaagcttctaaa

SEQ ID NO: 35976 - DNA, 2806 bp, Cannabis sativa
aaaaaaaaaatctttctttggtggcagatcctcgggcctgatagtggttggcacccgattcccttaacagaggttattacttcagctgctgtaaagaaagcttacaggaaagccaccctttgtgttcatcctgacaaattacaacagcgcggtgcaagtattcatcagaagtatatatgcgaaaaagttttcgatcttttaaaggtaatttacaacggacacaaccatgttttatcagggttatgtatattacataaggttcaccttttaaacctttctgcaagacaattgttacaaaatagaaaaattagttttagttgataactaccggacacttacatttttgtggtctgtctgaatttactccaggaagcttggaacaaatttaactcggaagaacggtgactcggcctctctcatactttataatgctgttatactgcaacagcatgtaattttataaagctgtaagtagatatagtcttatgttcagtttttcctttctatctttcacttattaatttaagtagatattgaatgtaagcttaaaagctcaaagaaaatagtttaaggaaatccaagtaaatgaaatatggttggccccctcttttttttttttttttcctttcttcttctaaactttattaaattgtctacttaaaatttgcactcaaatattacgaaacagttaacgctattagatattatggtgtctattgtctagtaaaatagttagcgatttcctgtaattattactaaagtaaaatatgtggtatcagatattaaattgcattagtagcgatatttcacctcgtaaaagggtattttatttttgggtgttcaaaatatggctatgcaattttcacttttcattttccacaatcaataaaaattgagtgggtgcgtattatgaaagggaagttgctgaggaaatttcccaattgaattgaacaaagatggaatgaggaaattttctgagaagattgggttgtgtcactatcaagtattaaaaataataataataaaaattgagaatctaatctttttccccaccttagattcagaatctttatggtcataaaagagaatagtatagtccacgtgtcatgtacctattgggccactttgctatagtgcttgacgatgtgatgtgaacggtgtcgttggctatgcctttatggagaagttgatacctggtctactgtagtcctcaagttacacatttttcaaatttgttgtgctattaattcttatattcaattaattaattaattatatttgatctctttcaataataataataatacttattatatttgattctcattatttttcccacaatgtcaaacacaagatatgtagctatgttttctttattcaactacttattttatgtgttttaacactttaaattgttattagtataattgaatatctaattaactaataataattttaatcaacacttattttatatctaacacaatttttttgtaattactatttaattttttctacgagctcccattttctattgatttgtatatataaaagaattatttgtaaagcccaataaaactaatgattcaataatagtaatcaattgttcaagaataattttttttcaacaactgtgaaagaatatcttgttaaagataaaagaggtgtgtattcaaaaaagcttaatcaaatttttagtaataatatttttcaaaaaaaaataataataataataatacggtaagtaaaatggattgagatttgatgaaattgaccttgttttttgtaatatttaacaatgcgtggaataaatcttattattattatttttttaaaaaaattattactcttattaatattatctcctcttgacgtaaaaaaacacgctggacttttaggtcagaggaaaataaaattaaaaatagtaacaaatttattgtcaacttttttttggacaaaaaaagtgtcaaacctacttgtccattcattttgtaccactaattaatttaatcattattattaaaatagtagttgaatattttgtccaaacaaaaaaaaagtagttgaataaagaaagcgtgggtgctggctcttctagagtcacgaaatgtgaaatgcatttttaaaaaaaaaataaacaaataagagaataagtcctttaatatttccaacaataaaataaatatattaaaattaaaagtctttgttaatttaataggttaaatttacgctctaagaaagacaccaaacaataatgagtagtaaaacatttgatcacttaactttatatttaatttataaccatttataattagtacattaattggctgattataatttgtaacgatttcataatgatcaaattttttcgagctgaattattataatttttatgtattttattggttattttctttcaaagatttattctcgagtgtttaaatataatttgaatatttgagtatttaaaaagaattaacaatctaaattatagattaatacagctacattatactgtactactaatctagttttctaatattgtcacgttttggttaaaatcaactttttgggttgattgggaaagttgttatagatagatctcaagtgattataaacaaaaccaaagatttgatactaaattaaacaaaatgaattaattaataaaagactttataatttaaatttcaaaaacaaaagaaaataaaaataagtaaatgaaagagtaatttgcggcataaatacttaagttttatgccgagtagcagataaatacctaagtcctatttttggcggtaaaaatacc

SEQ ID NO: 35977 - DNA, 2557 bp, Cannabis sativa
aagaggaccaccatattggaatgcgaattgacagggtgagcaatttttagagttagcatgtcatttgtgggttcttctcctttatctgaatgtgacttttattaaaaaaaaaacccttcaatatttacaggtctaagcttgaatttgggcattttgatttgtggtctttgttctatttctgggtttgagtttttaattctgggttcgtttacatgtctgacctttgttcttcacctgggttttagtttcagttattgcatttgtattttgtttgtatattttgatttaggatcctgtataagatttctgttcttggaaagttctaggtttgttttagggtatcaaataaattttgtattggtgatggataattgaagatttgggtttcttttattcttttttattttgtttgttcaaaatctaagtttgcttagacttttgattttagttttgtttcaaaatttgaatataatttatgttggaattcttttttaattcaaagagaaaagaatagaacaagaaataaaagaaaaatccatttaacaaaaatgaaagaaaaagaattaattatttaggtttacaataaatttttaggtttcagaatatatttttatttttatttttttataaattttaaatatatatttttttatttttaattgatttttaaataagttttaatgaattttaaaataaaaaataaaaaaatgatgtggactaataaaaggatgacgcgtggaccttacttggaagaaaacggagaggtgcctacggaagttccaaaagtgtgacggaaggtatttttactgccaaaaatacgacttaggtatttatttgctactcatttctcataaaccaagaattcggttatataggcacattttatatagaatagatattgaattttgggtaaaggtttacatttatactgccacacggcaaaattacatttgtactgccctgactttttttttttcctttatactgtaaataccgaaaataaaaaaaacgaagtctccatcttccacacccacggatagaagcaccacagcaacaccagaacagccagaaaacaataattaattctggtgagatgaagcacaaacattaaaaccattaatacttgggttgtcatggtttttctaatgttgtttttagattgtttcactcttgtttcgtatgtttaacaaatggtggtatcaaattacacaggttaaactaaccactgaatatttgtttgaggtaaccaaaatgaaagaatcatggacaattttagttttacttcccattgaaatggtaaaatctggaagacaaaaaaaaagaggatggaagttagccgacaaaagaaacaacataacaaatacaccaaatgtggagagttgggacacaacaagagaacatacaagagaaggcatcaaaaatgaaaagaagcagaacaactaaaaaataacagtagaacaatggatgaaaactgaacatatattggagcataggatactgaaaaaaataacttacatacaagtttcattattttcttattactattaaaaatagaacagtacaataatatttggaaaaatataataaaaaaatgaaagaaaataacagtaaaataatcttaaaataataataaaataaacgagtaacagaaaagggtaagttagcaaaagaaggtggacttagaagtacggtagagatggagccaacgctttgagaccaaagagactgaagaacatgaatttagtaagagtttttgaaagatttctacaagaagctcatcacagaataagctcttcatctctctctctctctcacacacaaccactcttatctttcccaaatctttttcttcttcttcctcattcacatactctctttttggttacctactataaaacgagagggttaacttttatttgagtaatgttgtagactaaaaaaaaagaaaaaaaaaaaacgaagaagaatatgaacgggggagaaagagctcaaatacattgaaaaataaataatgtgtgggtttagtgatttgctcaagatgaatatatatatatacatatatatatattttcttaggaaggagaagatcagatggtgggttgttgtccaaattttttaaaaaaaaaaataaaaaaaaacacataataatgtgtaatcaactttaatcatcatttaaaaaaataccataattttcttcagaaatagtaaatcatgtggtgggctgttgctgttatccaaattaaaaaaaaataaaaaataaaagcacaaataataatgtgtatggaagagaggtcaacatcaattttaattatcatttaaataaaataccaaaaaaataaagaaaataaaatactgatgataaaacggtataaaataataatatacataattgtatactgtacagagtatactatatataaaaaatagagtaaaaaaataaattttttcgtaaataaaataaataaatttaacaaaaacaatatgtggtgcaaaaattttgttttttttttttttaagaattttcaattatatacattaatgtgataataattacata

SEQ ID NO: 35978 - DNA, 1144 bp, Cannabis sativa
tagttgtgttgttgtatttatagcactaaacacttgagatgttctttgtttttaagatactgaggcatggcaagatctccatgcgagatggggagcttgggactttctcttcttgttgagattcatctatgtgctaccgagacgcatatggtgacatgccaagttggggggcctttgaggttccccttatcgagatgcatttagatgttaccaagatgcctttggcaagatacgaatatggggggcttgcgaggttttccttgccaagatgcatctagatgtcatcgagacgcatctaccaagatgctgagttgaggggcttccaaggtgccccttgtcgagatgcatcagaatgttgccaagattcatctagaaagataccgagataggggcctctcaaggtgccccttgccaagatgcatcttaatatttttgagaaaaatctggttatatgctagtctcacttaattcttaattgacatgcataacatcattaatatttatttcaaatgatacacaaaattatatttcacactaaatgctaagaggaacaattgtggtgatgtgtgtcttgcttgtacgatccgttatcgtggtaatatttgatcatttcaagttggattattgatgggactccatagattttgaatcttactcaaactaatcttggaaactagctttgctaattttaaggattaacacttgcacttttcccactagtctacgagaattccttcatgtagccactgacgtcgtgggatgaaccatcatgggtgacattggtattttctcatgagaatgagacactaaaggtggcgttgaagcctatcttaaggaagtgaactttctccttctcattgacgttaaattcttatgccatgaataggggcattaaagttaattttatagttattgcttaagtattgaccactatttttgggtttttattctcctgcgacagtttcgacatgagatgctttgtcaaaggtcatagaataggaggttgcctcttaccttttactacactagtcgcctggggggaatcacctagttagcgataccagaggtttcactttgatgggacattcgacgattgatgcctagttcattctgcaagcttcctccatttgcatggcttaggttt

SEQ ID NO: 35979 - DNA, 1736 bp, Cannabis sativa
gagattggattctagatttagggtgttcatttcataggacaccaaacaaagaattgtttaggactctttcagagagtcatgggggtacagttcttcttgggaacaacaattatttagagatcaaagttgtgggaacaatcttgttaaagaatcatgatagagtcatgaagaccttccagctggtcaagtttgtttcagatgtcaaaagaaatcttctctctatttgtatgtttgataaattggggtatgttatcaaagttgaggaaggtgtaatgaaaattgaacaaggcactgaaactatgatgagaggaacgttgagtaattgattgtatttcctagatggaaagacaataataggtagttcaacacctattattagcttaaaaaaaacacaacaaagcaaggctatggcacctcagattggggcatgtaagtcagagggtacttgaggaaatgaataggcaaggactattcaaagagaagctaatagaagacttgaattctatgatgaatgtgttttggggaaggctttctgattgaagttcaacaaggcagaacacaccaccatagagaggttagcttatgtccattctgacctttaggggtcatctaggattccaacaaaaggtagagcacgctatttcatgtgtataattaatgattatatcaagaaagtctgggtttatttgttgaaaagcaaagatgaggctcgaggaacctttgatacatggaaggggcttctagaaaaccagactggaaaaaaacttaaggtcctaagaactgataatggtcttgagtactggtcaaaagagttcaagcgattgtgtgccaaaatgggaatccagaaacatagaactgtgatcgaaacccctcagaaaaatggtgttgctgagaggatgaatagaacattgattgagagagttgggtgcatgttacttggagctggtttagacagaaccttttagggagaagctcttaaaacatcctcctacataatcaacagatcaccatttgtgccaaataacttcaaaacgccagaagagttatggataggtaaagccccgaacttagatcacttaaaagtgtttggatatattgcctttgtgcatgttagacaagattattacaacctagagctttgagatgcatgtttcttggctaccctaaagggattaaggggtatagaatgtggtgcttataacctagattcaagaagtgcttgattagtagagatggtttttccaaggaagatgaaatggccatgaaaaccaagagcacttccaaagacaatgaagttgtattagatgagaatgtccatattgaggtggagcaggttgctcttacagcaccaactaatgtttttcaagattgaactgaggtaatagaaggagaagacattgaagatcagtaggaactcaacaactatcaattagctagagatacagggaaaagtcagagaaagacccctgatcgttctagttatgctgaattcattgcatatgcacttatgattgcagaacccactagctttcaagaagctatgagaagtatagatgttaaagcatggctgcaggccatccaggaagagatgtagtctcttaagaagaataaaacctggatcgttgtgaagaaactagagttttacaggctggtaggatgtaaatggcttttcaagaataaaaaaggtttagggaatgaacctaccatattccaggaaaggttagttgccaaagggt

SEQ ID NO: 35980 - DNA, 2404 bp, Cannabis sativa
agaaacaactttggttgagagaaggcgaccagaattcaaaatacttccatgctatggcttcttctcgtagaagaaataatctcattcataagcttcggaatgctgatggtggctgggtaacatgggatgatggccttccaaacttgatgtctacttactttgggcaactttttactccgggtttggtggaagatcacgatgtggtgggtacggtgtcaggtgttgtgtcacaagctcagaacacgatgttgcttgagccgatttctgatgaggagataaggagagcgttgtttcagatgcatcccgataagtccccgggaccggatggtatgacaccaggatttttccaaaaattgtggccggttgtaggaaatgatgtaaggttgttggtgcggtcgttctttgactcaggttattttcctccttctttgaatgaaactaatattgttcttatccctaaaaagaagaatgcggagtttatgactgatctgaggcctatatcactttgtaatgtcctgtacaaagtgatttccaaggttctagctaatcgattgaaagtagtcttgcctgatgttatctcagagtctcaaagtgcttttttgccaggtcgattgatttcagataatattatggtttcttttgagataatgcattatctaaaaaggaaaagattgggaaaggatggttttatggcgctcaaacttgatatgagtaaggcgtatgacagagttgagtggccatttattgaatctgtgcttgttcggatgggctttgatagaagggtgattgcgttgatcatgttctgtgttagcacggttcgctacaagattacccatggtgggaatacgttggggcctattattcctgggagaggattgagacaaggggatcccttatccccttatctttttcttatctgtgcagaaggcttttcttctctgttgaaggactacgagcgacgccatcaaatatcaggtgttagagtggcgaggggggctccaattgtttctcatatgctcttcgcagatgacagttatgtgtactgtaaggccaatgtggaggaggcgtctagtattttacagttgctacatgtgtatgagttggcttcgggacaacaggtgaatttctctaagtcttcaatttttttcagcaagaatacttccgctgatactcgtgctcagttatgtaatatgctacaaatgaccgaagcttctgataatagcttctatcttgggttaccttgcataatgggtcgaaagaagaatgcgattcttggctttcttaaagaaaagatgaaaaagaaaatattcaattgggagagccggtttctatcaaaggcgggaaaagaagttttgattcgctcagttgcacaagctcttcttagctatgccatgagtgttttcttacttaccaaggaaatttgtgccgagttggagggtttaatggctaaattttggtggaagtcgcagtctaattccacctctaaaggagtgagttggatgagttggaaaagattgactaagcacaagcatgctggtggtcttggcttcagggatcttagagattataatttatcttttcttgctaaacaaggatggcgtttgttaactaatgagtcatctttggttagtaggatgtatagagctcgatattatcctaatggtagtttcttaacagctacattaggacaaaatccaagctttatatggagaagcattttcgaagcaaaagatgtggttaagtatggagctagaaggtcaattgggactgggcaaacaattagtatcttgaatgacccgtggttacctgactcttctaatccgtatgttcaatctacacaccctgcgctggttgatcagcaggtggactctcttatgtgtatggagggtcattcgtgggatttagaggtgcttgatgacctgtttgtggctagggatagggacttaataatctctattcagcttagtgatcatagctatgttgataggtggtcttggagcttggaaacttcaggcctattctccgtgaaaagtgcgtataaatatttacaaactgctcatggaaactggtctgtaatggatgatattgatgggtggaaaaggttatggaaattggagattccttcgaaagtgttgtactttttgtggcgtgccatttcgggctgtttgccaactaaagtacaattgcagactaaacatgttcatgtggatcttctttgtcctttttgccttaattcggttgagactatctctcatgtgctgatggaatgtcggtttgctcaatcttgctggaacttggcaagtccgactgtgatttctggcagtcctatcgactttggcagctggtttatgggcgttcttgacactcaatctagtgcagttagtgttgatgctgctatggttag

SEQ ID NO: 35981 - DNA, 2940 bp, Cannabis sativa
aaaaaacttattagtagctattttagtttttaatccaagtttttcccaatgaatacacactttgtgggatttttttgatctaaaataacttcttctaatttctgaattggtttcaatagatttcgttcatcttaaatccgagaatcaagatcctcattctgcttctcgccttcttcagtcatgactaccattagctggtgactggcctttttattctgcagcgctatgcgttagcatttgtgagctagcatttggtcacctagcaccactcccacacctttcggtgtctgaaaccttagagataagtacttaattgaactaattgccccaagtacaattaatgttggtcgacccagcaatattttgtaggatgatgccaggtcgacaacaagaaagtctcgcatgatagtggtggataaagctgcttcgcccatagttaatgggagctcaattattctttgactggcgacactgtcgcctgtaaatccacatagatttacaatgcaaggttttaactttgctttttctagtcccattttctttagtgtatccttataagggatattcactgaacttttgttgtccaccaacaccctttttatcattttgttggcaagttggatggtaactgctagtgggtcaacgtgaggatacctcacgtgttttgtatcttcctccgagaacacaatcggaggttcctcagtcttagctttcttagaaggtttcggagtaaaaacagactgctcgttcttaacttcctttgcatatctcttttaggcattgttactttctccagcaagatgtggtcgtcccgagataaccagaatgtcctctcctttaagaggagaaggttgtaatcgctagttacctgggttattaggcggattatgctgggtttgtccatcaccttgtctttttcacatactgtcagaagtgacctcgacatataaggctttctatctcatctttcaatggacgacattcctcttttgtatgcccaatctccttgtcatacttacaaaatttggttgcatctctcttatgccatgcttcttctattttttcttgtccttggttgattccctggagtcatctttcctcttagagcctcctagattgtcagccttcatcgagacggtacttgtcgagatagtgttgggtttacttcccgagctagtctttaacaacttcatctcttttcttgcttcctctttttgaacaaacacctgagccctctcattgaactcactgatgtttttcactgggcgaccctgcaagtcatcccacagcttgcctcaagcagttaagagatcagtcgtgatccctacttgaagggcagtgagctggataatgtcgttcaaatttctcactctcgcaacggttgtactaaaatgactcaagtatgccttaattatctcgcctggctgctgctttttattagtgaagacttcgggtcgcctgtctcttgctgcatagaactgcttcttaaagtctttagacagttgttccaaagaggtgattgaatgatgggtaaatttgttgaaccatctgctcgctgctccaactagcaaagtagggaataaaatacagcgtaaattattcgtaatattgctaacttgcatgatagtattaaaattattgagatgagcgaccggatccgtagtcccattgtatggcgagacttgggagtttttgaatccttggtggaattcagcgctcataatgtttaggtggaaaggctcgggctccttgtccgagtcgtaaccaggcggttttccaaattccccatcttggtagctcctgaacttgtccaccaactctatgcttagtaattgggtaggatcctcttgcttttgatcgagctattggcgtaagtaaggtttctttcgatttagttgatgacgaagattcggctgttgtggatcatagttacttacagacgtcgtccttgagtaacccttaattctagatgtgcccgtactctctcgatcagtactgcgatgagttctatcccctcctcgcatagatcgactacgagtcctcgtacgtccagaactagaactagcctcatcacgtactcgccttctcttttgcgaacaggttgatacatgccccctgctgggatttgtatgtgccccttcactgttagtttgagaaagatgttgtccgtgtctttctggcaacccacctgtcctaggttaagctcgagatctctctcgttttcacgagggatttcctggtccctggtcctggttcacattttgtgtttgttactttaagaaggctccggtcggtcattatttccattcctctgggttgtgtgtccttgggttcttcaaggcacttcttgacgatgtgcctggtcatttggttgttcatcatcaggggcatccttagtttccccaggtggttcttcctgagagttttgagggtccccctgagttgtctcctgcctcctagttcttgtgccacgaggtctgcctcagggcctcctcactcacgaacgaggttggttttgagcattaatttcttgagccgccctggtcttcgatgcctcctattccaactcagcatttcgttggtttgcctcctctaaacgtcgcctgagttggcgattttctaactcaaccaacggtacatacctggtggggtcataggtacccccactcccaggagtacagccacaatcagtgttgggtacttcattccgagtttttgggttttggccaccttctggttggcttgtccttgaacgtgttgatcatgtagatcaagttgtccgtgagttgggaggccttcgtaagcctgctggctcttttccagcgcaatgagtagtcttttcaggatgagtatcaatattttccctattattagccatggagaaaaaaatttcttttggttaggaggcattttttctgagcttttttcatgtaggctctc

SEQ ID NO: 35982 - DNA, 3422 bp, Cannabis sativa
attttgacaatttttgaagtaaagtacaattataaaattaaatgtaaatatggataggaaagcaataatttaggcacttgtatgtttttgagggcccatagctaggtatactccccccgagtgatctaggaagtttggacgtctccaaattcgtggtcacttatttaaaacataacttggccggaacaaacatgtgaactcttgcgcaagtttcttttttttttttttttcatttcattatactcgaaggttcacattaagaaagaaagtttacaaaaaattcacaaacaactgtaggggagtgtcatatctggatacccccagcctattagtaataacggcacaaatgatctgcattgtaggtgcgagggatttatgatccatccattctcttaagttgaaacgttccctctcctactttgtgctgtatcttgtagggtcattcctagttaggtcctaagacccccacttctgactcttgggaagttgggaagactcttctcaaaacaagatctttaacgtcaaatgtacgacttctaactttagaattaaagtgcatggcaatcttgccctagtacagcttgatttgaacttgtgattgttctcggagttcttcaattgggtctaacgattcttggaggaagaaatagttccaggttgggtcataagtgtttggtctgtgagaagggaccgtggtttctactgggatgaccgcttcatatctataggtcatcgaatatggtctatgccatgttaaagttctcttcgttgttctgtattcccagagaactcacggaagctcctccggccaatgagctttataagcttggaatttcttcctcaacgttgtcttcaagatcttgttcacaacttcgacttgtccatttacttgtgatttagccacagttgagaagcttttcacgatttcgtgtttgttgattacagaagtgggtggtgaagtgatcactgtcaaactgcttcctgcttcccattgtctaagttggtggagtgatcactatcaaactgcttctcattgtttgaggcaatcttgtgtggaagtccgaagcgacatactatatttttgatcacaaagtccatggcctttttggaggtaaccgtattcatgggttctgcttctacccacttggtgaagtagttaacaacgactatggcgtacttgacttcacccttcccagtaggaagggatcccactaagtcaattccccagacagtgaagggccatgaactgctcatgattgtgattttcgtcgttggcggtgcgcgcggaaccttgacatattatctctgacattgctcacacttccagacatattctatgcagtctttcttcttgataggctagaagtagccttgccgaaggatctttttagataggcttggtctgaagtatgatctccacagaagcctccgtgaatctcatgtatgatggcacttatttcggtcccggccacacacctaaggtagggcacagataattccttgcagtaaagccttccatctaaaatcacatataggggggcttggtactaaatcttgtgagaagcatccttatctggaggtagatgggccatatccaggagttggaatgatcaacgatggcatttacccctgtgttttgatgcttgacgcttcaagacgagcaacaggtactactccatattgaatgatctttgggtttgtagtaagttttgccaacatatccgcgaacgaattctgatccccagggacttgacagatgttgtagcctttaaacccttgcaacaattctcgggagaccattacataggtatccatccttttgcctttggtctgatattccccaaatatcttatttaccaataactgggaattactgtgcacttcaatgtgttgggctccaacttctttggccaactgtaagcctactagcatggcttcgtgctcggcttcgttgttggaggtaaaaaatctaaaacgaagagcgctttgtagctggtgtctttgcggagagattaatataactcccgctccagctcccttttcattggatgctccatcaacatatactttccaagtgggtaactctaggacttgctcgtccgggaggtcacctaccctggagcattctatcacgaagtcactagggcttgacctttgattgacctcgtggctgatattggaagtcgaatcggctaaattcctttgatttattggtgaaaaatacatgaatttagttttccaaaacaataaagaataaattggaaaactaaactagtttcctataatctcttatcagtgtgtgtcaattccacaaaatagagattttatatgaataattaaatgaagatatatttattgaaaatatcattgaaaatcttattcagtcgcgttatcctgcttagaggatctggcttcactagataataaagatttgtgcagacaatcaagtacaaacttattagttttaagtatagaatgctctggccgggccgtggagagaaaattactcgtccagagttctcactattctccatgtgtcaccatgctggatgccacatctctttgtgcggaatttgagataacacccaacttttcctcaatagcctcttatagttccggttctacatctttatcttgtataaggataatcttcaatataaattttttacactgatgtcatattagaccacttcctgtcacacttgaaacaaacatattacacttttttctttttctctcactccagcctttcattaatggcaaaaccccagatttgtatagtgaagaaaagggtattgaaggagtgacaaaagtgctcttggaccttattccaccacaagtagtaaatgatcagcggggtgattagagaccaataacatgattggggttagcttcaataattcgagctaattccattgtcttctcgacactcgatgactccaaaatacagagctcatttcattatcccaccacaagtagtaaactcctctaacaacaacccaaattgattgacaaatatagttcgcattcaattattaaatgctgtcacaattgctaacaaactgcaaagaaagtcctttgcaaagagaaccaatgagatgttagtcccatcggtttctacaacacaaatgaacaaataactgggagtgaccaaacaaccaaacatgcagcatttaacagtaaattagtttaaaagactagtgccctattcacaggttgattaaactgttatgttaatagaaggtttggcaatatgtttattatataatgacaggaagataggaaaaaagctaaaggaattctaaagtttcaatatggattgctgttgagatcatacgtgattgtataattaagaagaagaagatggaacacaactgcatataggattcctcataaaatatttgctaaaagaacagaaagaa

SEQ ID NO: 35983 - DNA, 1079 bp, Cannabis sativa
  modified_base (377)..(381): a, c, t, g, unknown or other
tttgcgtaggacaaccctttcttccaatgtatggaatttgtttatctacgggaagtgaaactcgaacatgtgttccatctatagctccaatacaatcctattataacaatttgagaaaaaaataaatttaaagattcataagtagtaacacacacatatatatatatatatatatgaagattgtgtattcaaattaccttaaagtagggcccatatctcgaattatttcatatataatacgagacttcgtcaaaattttcaggtggtttgatttcatccaaaccaagcatactcattttttctaatacatttgtaaattgtttattaatagtttcaccggaatgttaaaaatgttcttgaatcattctattacctgnnnnntgtcctaaaatcatcataaacataccaactgactcttctagtctcaaccttaattttactggactgtaacccataacttttcaatctatcacatagtttacaaaaaaacatgttttttcattcgacacatctcatgacaacgtcgatcatttctattaagtatttccatcataaatttccaaccagtgtgaggtgaatttctacatggctccttaaccacaaagttattgtggtaatatactgattttcttgcaacgataatgattacctcatcaattatagcttgtatacattcttcattcatctcttctgtatctgaaaactatccattctgctatagaataaacatgtaaatatataattcaaatattttttaaaaaaacaaataatattattcaagaaatcaaataaaccaagttttacaagaaataaaataaaatgaactaagtaaaccacaatgttcaaacaagtaaaaagaaataacatctaatttagaagttcaactcatgttctttcaaccactcaatttgatatttaggctccttcaaagcaacaaaaatttccctatttgctttcttcatgaacaaattagtaccaactttgaatagagggctcattggttcacaacctggaagcgtagctaatatatccatcacttcttgaacaatatatcgaggaggatcggtacgtatgtatga

SEQ ID NO: 35984 - DNA, 1439 bp, Cannabis sativa
  modified_base (1387)..(1399): a, c, t, g, unknown or other
ataagttgcgttcatcttgaatccaaggatcaagaccttaattcttctttttgctttcctcatccaagactgccattaactggtgactgcttttctgtattgcagttctatgcaatagcaatagtgagctagcatttgatcgcctcacacaactcccacaccctctggtgtttgaaacttcaaggacaaacgcttgatcgaactatctgcccctagtgtgatcaatgctggatgacccaataatatattgtaagccgatggcaggtcgacaaccaaaaagtcttgcataattatggcagataggggtgcctcacccaaggttaatgcaagctcaattataccttgactggcgatactgtcgccactgaatccgcatagatttaccatgaaaggcctcaattcagcgttttcgagccccatcttcttcagggtttccctataaaggatgttcactgaactcccgttatctattaacaccctctatatcctcttattggcgagctggatagtaatcaccaacgaatcgacgtgaaggtacctcacgttcttctaatcctcctccaaaaatatgattggaggttctttagttattaccttcttggaaggttctggagcaaatactgactcctcattttttatttccttcacatacctcttttgggcattgttgctctctcccgtaatttgcggccctcccaagataaccaggatgtcttctccctcaacaggaggaggtagtaatccctagttgcttgggttgttgggcagattgggctggttatgtccattgccctgtcttttcacatactgcttgaagtggccccgtacgatgagactttctatctcatctttcaattgacgacactcatcttttatgtgcccaatgtctttatggtactgacaatacctggtcggatctcttttatgcctcgccgcctcatgggctcaggtttacgaaagggaagcttatgctcacgcgcgaggtaaatattttcccgagtttcattaagctcggtataaatagtataaactggcacgtacttatcaagcttcttttgtttcttcttgttcttggacaaccccttagagtcatcttttctctttgagccggaggcccctgagttatcaactctagttcagacggtccttgttgaaacattactgggtttgcttcccaagccagtttttaacaagttcatctctttttgagcttcctcctttcgaacaaacacttgagccctcccgttgaactcagtgatattcttcactggacgaccctgtaagtcctcccacaattcgcccccaacggttgatagatcggtagtgatccccacctgatgggccgtaagttgtgtattaccatccatatatctgttgggttttatgnnnnnnnnnnnnntccatttcaatgtaatccattttattcaacatcaataaag

SEQ ID NO: 35985 - DNA, 3249 bp, Cannabis sativa
  modified_base (59)..(62): a, c, t, g, unknown or other
cttcaaatactgttaatgatacttgaagtatctacaaaataatataaataaatatatannnnatgtacaaatattataaatactatgtaaaatatatttaaataatgagcttcaggacacattatatatgtagttaaaatgcttagttttaattagcttgtaattattattgtataatataatatatatttacactttttctttcattttaaaatattaaatctcaattttaaattttttattttatcacaattaattatacagtaaagatgaaaataaaaaaaaatcaaatgaagagtttgacacgtacaattgcacctagttttaaaaaaagtggcaagtcaacctatataaataaatttggaaaattgtacatgcgcccttttaaaaaggatgtatcgatatattttaatctatttcggcattcgagagaattttttaatccatttttttatatcgtatatgttgtagttatttaagatatcttataaaattttgagacattcagataaatttaacacactgaaattagggtttaaacagtcagttgtacacgtaactcttttattttatacgcgcataaaatagattatttaaacaatactttctatattataaattatttcaaatttttattatttttgtaaaatatcttaagtaactataacatacgtgactatgtaaaaaattcaaactaaaaaatccttccaaatgctaaaataaaaaaacggtgtatcagtacaccctttttaaaagtatgcattgtaaaataaatttaacctaaaaataaccaaattaaataaattacaagtatcctattatatcagcataaaatatattggaaaactctttgatggagacccttagattggacacaccaatattcccagattctattatttttattgagaaatgttaaggtaagtaccaagtacataaaaagtgttatattctctcgtatattttgatttaataaataatataagaaaccattaattaattataagatattacattgatataattttgagtaccttaaaatgttaaataacaatgctcatttttattgattgtaaatttttttggatgcttctacaatgcactgccataaaacagattcattgatgcactccctatctgttttgatatttagaagaaattttattctattttttttataatcgtgtataatataattagtcaagatatcatgcaaaattttgaaaaattcagaataatttataatagagaaaataatatttaaatagtttatttcacacgcgtaaaaaataaaagagtcacacgtgcaacatactgtttgaaccgtatttttagtgtgttaaatttttttcgaatttctcaaaattttgcaaaatgtgttgaataactacaacaaatacgaccataaaaaaaattagactaaaaaattctctcaaatgccaaaatagataaggatagtgcacctattttaagagtgtgtattgtagaatttcccaaacttttttgtggggcaatttcaattgttgtttgtaggtgattgagaaatgctaaaaggcaccaatagtgcctagcatcctctaagtgtcaatatcgttattggttcaactaagtatcgagtctcatataatttaatgtaataattttcaaagagtatcgctagccaatcataaaacaacacgtctagaagatgctattactccttaagaaattgggtacatgtaattcctttttctgttttttttaaagaaattcaacagttatttcactatttctgtaatgtaaacccatatttctgtagtgtaaacccatttagtataataacacaaacaaataaaattaaatagtgtcgttgatttcatttgatttttctttttgtccagggtattatgttgtttcgaattttgttgaaaatgttggtattttttttcccagttaataaaacttgcagtaagttaaaaaattagtagctataaagtgtccacacaaaaatcatacattggtcgattcacatcacctgataaaaatctttaataatgctatctctttaatacagtaagaaaaataagaaatacttctcattaaaactaacccacaccgcacattaaaagaaattgactaacatccttacattttcttttttttttgaaagaagaaaatattattaagcgacactaggcacatctgatattaaaaaagcagcagcacaattttggtaacaaaatcagtccacatctcggacttttaagtcaaaacgactccacttagctaaactattagcaactctattacaacttctagtaaaaaataaaaattgtaaagtctgaaatttgtttctcaaaagcttgatgtcttgcaccagttgcccccaatccgtggggtaagaagtatctgaatttaaagcttttatgagagaatggctgtcggatccaacttgagcatttgtaattgaccatctgatagctagctgaatgcctaagtggacggcattagcttcagcaagcagaaccgataggcaaccaggtatgaaggaagttgcagcaaccactaaaccacccttcgggtctcttatcacagcactaagaccacaaccttgttgtccagcaattaaagatgcatctgtattgatgaggaagtagttctgttgaggaggaatccaagcagaatttagtttcatagcaggatttttactggttttttggtgcggctccaagtgagtagagatgagatcaatagcccaagatgtccaaatcttttcatctagaattttgtgttggaagacaaagttattccttctttgccaaaccaaccaagtcaatcccatgaacttgaaaaattcctcattaggaaggtgttcatgcagccaccaaagcacatcagcagcttttgtgagattcagtggtatgagtttggggaaaccaaacaacttccagatgttttggaccttcgggcagtgccatagagcatgacatatgtcttcattctggaaagtgcacagttcacagtgagtatcaataaccataccttgctttgcaagctccaattttgtgggaatccaatgattaaacacccgccatatgaaattctttattttcggagtgagatgagaaccccaaatgaatttccaccaagatttaatttgtgatttgttagaacattctgctacattcggattttggaagcgaagtttgtatccacttgcaaccgagtagacaccattaggggatggactccatgtaatccaatccgacc

SEQ ID NO: 35986 - DNA, 1007 bp, Cannabis sativa
ttcttcacctatgtagtcccatacctacacagtctcaggatcatcacacatgactttccccaggcgatatgggattgtacatctcttggtctttccccttcgaatcacggggctctgactgtcacaatcaccccctttgggggtcttacgtcatcgtcgaccacactttcgactgggtcaaggctctgataccatttgtaacatcctcgcttcaagcctctattaggcccttacacccacggaatgatgactcttatacacgggtacgtcactatatggctacttcatgaaatgacgaatggccctacaaactaatatgagtatttctagcatgctttgtctcacttgcacgcttcttgggaaaactttccaagaggtcacccaccctgaaattacccaaagtcaagcatgcttaaccgtggagttctttcgtgatgcaccttgttgatataggtagtactaatcaatttatttaagccatcttcaactgtgtagtcacatacctacacagtctcaggatcatcatacatgaccttccccatgcgatgtaggattgtacagctcccgatctttttttccttcggatcacggggccctgactgtcacaaagcacgcgatactaaattggatgatcgcagtatccttgattaaaggcatgccacaacacaaattcaaggataataaagtaaatatgggattcagttaccccttatgcagtttttttttgttgtacaactaaacttattcaataaaactctaattttaatattttttttcatatttatgtgtactttaatttcatctaagaaaattatcgtaagaggattcgtttaagtacattgccacattgttatgtaataaatatatcgtaaatacatgaaagataatactcaccataaaatgaggacatatcgccatgattcatgtatttgttatatagtaaggataatcgttgagtttaagtaataaatctaaatgctaaacaagtggggagaatattagaataa

SEQ ID NO: 35987 - DNA, 1573 bp, Cannabis sativa
tttatttttaaatagtaaaagaatttgaacttagtgggatgttgcaaatttatttttaaaaattcactcaactacttattttgttttaatatgaatgatctttcgcctttttgcatatttattgtaaaatccactatgtatttccaaacagtttgaatctttttaattaatgtatcaaaattagtattttgtaaaataaggcaaaataccggggcgttacatagatagagttatgcgggtaaggcataaccaggttagactcagtgattataaccgagacaaacccttgtaaggcctcaaatgtaaaaagacgtgtgagcgtaacacgtaggtctataggacataagcatttattataatgacattattatatagaataatgtaatataaagtgtgataactcaatatatatacgtagtggcgaagtgtatgaagtgtaatcattattataattatcatattgtatttttttctgtcttgctgggccttggcttaggggtgctctattgtgcaggcaagggtaaagcagtgttgggtcaaccatgagatcgaggactttgaggatgacttgtacatgttctagccaagctagactacgagggttgggtccaacaggaatagtatagaaattccattttgtcacttaggtcggaatgtaataaataacttgtaatatttaaaaaataaatttttacgggatcccgaatatgtaactttaaattattttggtttatactaaaacgtcgatgtttattgcaagttatttatttaaccaagttttatatttgttttaaatcacctggcttatggaccccgattaatgagattagtagcttgtaatcacgacacgtggcattactctgagtaggacgtttataattttctatcagagcaccaaggtttttaaacttcttgaagactgctgaacatgtacaatcatcgtaaaaaataagctcgactcatggtacactaagtgttgagagtaaatacttatctgctctgcttatgtaaataaatgttcactgcttttagtaataggcagcatatgagcatctagaagatatatttatataatgaaaagcatgattattaaatataaatagtaattgttatatttgggaaagagaattgtgtgtattaattagggttttggcatgacatgtgtaagtgtggaattggtgcctgactcactaggattgttgatttcatgattatttgaaagaaggaaccctaaaaaccaactagatcacagggtcagtctgtagagcggggtgataacccaaccaatcaatcggcaccgccagctcctctgcataattctgagaatactacgagggtgaataacgttaatcttcttgccgactggcaacaattgtttactgaaatgcaaagtattatacttcgtcaagaagaagagttgcactgaattatgcaagttcaggcagctccagtagagcaattgattcctctagctcctggtcccgtggtagccaaccttagatcggctctacaaccacaccgagattcagtgtttgagtggtttgttaagctgcaacctccaacattcttgggt

SEQ ID NO: 35988 - DNA, 1901 bp, Cannabis sativa
gtttaaaagatgacacgtagttaaaaaattggaaagagctatattttagtagttttgagaaaatagttctcgtactatattttgtgttaaatttaacaaaaaagacagtatttactgcaaataaaataaaaaaaatcgtaaaaatgtttaaagttcgtgaaactgtatttttgtaattttttttttatttttgtgtatttgtaaaataatctcaaaaatattattgttttaaatttagcacacaataaatgcagtaatttttttaaattataaatttgtaattaattattagtgatagattccaatacacatttttaattaattgcaataattttattaactatgttttaaaatttttaattattaataattattaatgatattttattttttcgaactgatttatattttaaaatagaataattagtatttttgctctctgaactttcggcactacttgattttaccccctaaaatatacatatggcccttctgttaagttccttttattttatcgttaaaaattagcctttttaccctttaaactttgaccaatgcaaaattttgcccatttttttaaaaaaataattttaaaaattatgatattttagttttttaaagcaattataatattctattaattctgaaaaaatggaataaaaaatattaaaaaacctataaaaatattaaattaattaaaaaaatatcaatttcatttaaaacactttaaattatacctaaaaaactattttcaaactttattatatttataatcaggtatcttaaaaaatcaaagtaaaattattgagaatctaataaataattaaataaactgagatttttttaagaaaaaattaaacttatttatatttataaactcgtatcttaacaaataaagaaaataattaaaaaaattaataaaaatataaaattattttgaaaaaaagttataaattaaactaaattttttttatgtttacttaaataaatctacattttttgagaagaacaaaatatattcaagtttttcctgttgttgaaggaattttacaacaccaaaataaattataataataataaaaactgatgaacaagtgcgagtattcaacctagaatggcgagtactcaaactgggaacacaaatatttaacaaataggccggaaagaataataaatacaagagaattatagtggttcagtcagatcacggactgcttagtccactgttgcaaagattgtgtgtcacggtggattactcctttatatacaaagcaagtgtcctatcatttacacaaggattgcattcatcgtcaattcgtttatacattgatttacaattaattaagttaaaaacgtaaacatttataaatgaagaacagtttccagttttattcactaaatacagcaacgtacgcgacttctatagtgcgagttggctgttcacattcttgcataagctcgcaggtttagagtgcattcgagactagttgggtctaagatgtctgcgttcttgtacagttgcttttacggacatcgtataatgagctgatagaaccaaggcatgcgagtctacattggtttatcgagactgttgggtcatcgggaccagctcgcaacatagagaatcgacctctatgttttcgcaggaggattgtggggatactcgcatatatctcggtatatgcgggttaaatccgttccttggtcctacataatgcgagtcatacgaatgcgattagacttggtcatatctgcatcatctctctgagtctagttcgggtgaggtttgagctcgaggagtctctcattgacatctcatctttccttggggaaattgagtacacatgtcttttgtaaagaccgcttagtttaatttggaaattagtagttaatcatgttta

SEQ ID NO: 35989 - DNA, 1620 bp, Cannabis sativa
ttattgggtactttaagatgtcttacaataatacacatatggggagagtcgaatggggtataggctaaaatattaagcattactattgggcatcagtggtgtccaacactttctatagctgtcgctctacgattagttagtaatattcactaaaaattattttattaagttatatggaacaattacactaatagtagtataacatcgagaaaggtactaggcaccaatgatactttttagaaattctttaaaatatccctacatttggccgaaaattttcgttaggaaaatgccctaattgttttaatcaacgaaagaaactccgatttgaaatttttgtccaaaacccctagaatgcttactaatcgtgcttgatactacttatggtgtaatgatattggacaccttaaaatatcgcgtaacgttactttagtttattttaacacatgtacatctatgcagctggtgggaaagcactgatatgggaaagaagttggaatttgcaagagatagaacaatggtgaatttcttatggacagtaggagttgcatttgagccacatttcaaaagttttagaagaatgattacaaaagtaaatgctttaataacagtaatagatgacatatatgatgtttatggtacactagatgaattggagctcttcactaatgcagttgagaggttagtataaaatataaattttgctacttccataatgtgtggaaacttaattagtactattttaactatcataagctactcactaattatcaattagttttgagattaaaattcacatttaattagtactattctaatatggtattaaaattaaataaaattcttactatagtattcgatctaaatagttgagcaaaacagagttattattgtgattcgaggataatgaaccaacaataacatcttatgattcattcgtctaaaattagtgagaaaaataactaccatcatgagaaagatcctaaagagtctgacaatattgataatgtgtgaaacttaatactgtttataataaaatcatggactactattttatatctttaacttattgccaattaattttgagattaaactctatattgcttattatcatacactcatcctattttgtaaactatactcccaaatttcaactacaataataaataataaataataattaatactaattatgatgatttttttcttttcttaattattattatatattgttttatgtatagatgggatattagtgctatggatgggctccctgagtatatgaagacatgtttctttgctttatacaatttcataaatgaccttccatttgatgtgttaaaaggggaagaaggcctccatataataaaattccttaagaaatcggtaactaattcttatttgttcttttggtgttaagagtattgggggaaattttatttttatgggtttattttttaatggaaaaagtttacaaaaaataaatatggctttttttttcttcgaaaaagttattttataaaatacactcaaatatttatgagaaaaacagtttaggtaactagaagataactggtaactagttactttatactatttttttcttcatattttttaatt

SEQ ID NO: 35990 - DNA, 3242 bp, Cannabis sativa
  modified_base (39)..(62): a, c, t, g, unknown or other
  modified_base (1354)..(1355): a, c, t, g, unknown or other
gtttatttcattgctttagagaattcatatttaggatgnnnnnnnnnnnnnnnnnnnnnnnnatctagatcttggtaaaatattcccaacagcaaaatcatcaataaacctcaaaaatacaacaaaatgcatcatctattctcaagaacatcaagaacacattcaaagattaccaacaagctattaatctcagaaattactcaaagatgagttcacgttaactacctcaattcaccaaactcctaagcaagaaaaaattccaccacttccaagtcttacttattccataattgaattgaaaatgcaaagtgagaggagagagagagagacagtagcatttagggtatctttttacttaaatatgagattttaaatagccttttactaaaatatggcatacaaaaacttatataaaaccccccaaaaaaaaatgccataaaaattactcaaaataaaaattgccataaataataaacttttaaaaatatatatttcgtaatttcctcttttacattagatattgtgaaatatgcccttaactaattaagagcaatgtcatcaatgtaaactttgaacattatagtttattctttaaagagtttttttgcggctaaaccttctcagctatcacttcactgtcacttaactttctaagttcaaattttgacagtaaatctctccaaactactaaactgcttccaaatttaaggtgtcatctattttttatagttaatttatattgatacacctaatattattattttaaaagtacataaattatttcaaactttataatattttttattttttaaaattattttatttttatttttacaattttatttaattttaaaatgaatattgaaaataaattttaaataataatattaggtatactaatataaacgggtcatgtgtacaaatatatatatatatatatacataagtagaccatagtgacagttaatcgaatgataacttaaatttgctactagttctgtaatttaaaaggttttaccgtcaaaatttaaagttaaaagattaaatacaagcgaaatggaaactaaaaaagttttgacgcaaaaaactcttctttaaaacataaagaggatgtaacaaaaataaccttgcatcaaatgagttattatacattttcttagttcaataaatagtgcttatattatattaattttttttaaaactttcttttatgcacgtgtgtgatattattataataatttatttatttttttataccataatacaatatattaaaaataataatttttaaatgatattgagaaatacaagctctgtagtaacgtaaattaataaccacttgaggctagctcanntggccataggtgggtgtgtgtgtcttggaggtcttggcttcaagtcccaagtaaaacatgattgtaatatataaacgcttaaataaaaaaaaaaacgtaaattaacgtgtgagttaaaataataaattttgatgaagttttttaaaggagagaatatagagtagagaagcttatgtgagggcttagagcaacaccaaggacccggtatatattatatatattgtgcatatttgctccaacgagactgtatttcttgcagcatttcgagattttgtttacagtgcatgacatatactgtagtcactgcatatctttttttttttaaaaaaaaaaaaaatttaattaatatttatactattgcatatataaaattaagaattgtattttaggaaattttaccatgcacatttttaaaagtgatattttattatatattatttattttaattagaaaattaaataataaaaataatacaaatttaaacacattaaaattaaatttaaacagagtagacatcatattcttattgatcaagagtacacattatggtaatttgttaattaatatgatattaatttttttattttattaaaaaattaatataataataagaaatatttttttagtgtaatttttagttttgtggttagagtaaaaatactttttgacatcaaattgggtgatagtgtaacactaaaaatgatatatcctggagatgctcttagcacaacaatattggactaatattaatcagcacattcgacataaccaaatattcatggcagcatatatgattacattataaagtacttcctcctaacctaaatgttaattaatttaaaacgcggtggtattacgtctcagcagccacgtacattcctacttaacacagaaattgatactatattattgaatatatagattaaattacgctacttaattattattagctagccatttaggttgtaagactgaagagtgagctgatcaagaaggccagtgaccggcgtggcaagtctgggctcataagcgaagccatgcaactgatcacctcctccaatagggacatatggacacgaaggaatccactcccatctcttcctcatcatatcaaacaacaccattttctgatctgttcccaaaatcatgatcgctatgaactctccatttccaacgcaatgaaacccattaccattctcaacctcagcaaactgcaagtaaagtggctgtggcattctctccatctccacccacgtggtcccgcacgactgtaatccccaaactctcaagctcttgggcacattcagttgacttttctccacggccgcaatcagaagaagctttcctctgctctcaaccaagtttggagacctcagaaaccttctcataggagcttgaatcttccaccaactgtttgaagaaatatcgtgagccagaatactgtaagggctgtagttcatgcagtaaaatttcccttccacgtgaaccatgttaccagattcaaaactacacagccttggaagagaagaggaagtgccccatatggagtaaaaccctcctccgtctatgtgaaagctttccgccgttaagtttttaacggcgtacggagagatcaggtcgtccccggctatagtaacgtcaactgaggtgggagtaaccgcaaggccaacggatgggaatagacgagatcttaacgttggaggtaacggcgttaacgagcctaccattgggttgcagaggattaaggttttaggaccagaatcgtaagacacccaacagatcaaaccgcctgaagaagaagctggagagaacccagaaggaagtaggctagggaaagagattctgtaccatgaaagctcataaggttcgaagaggtaaccctcgca

SEQ ID NO: 35991 - DNA, 1585 bp, Cannabis sativa
atcttagccctgctctagcttttgtgctctagcttttgtctttagcttttgtctttgatcttctgtctttgatcttcttttttgatcttctttttcaaaaaaaaaaaaaaaactaaagtttctcaatatctcgcatgtgaggattactggcaggtgcggttctcttttttattaattaatcttataaattgctcaagtaatagaaatgaatgcaatatattattgtgggcataaaattaagaataattaatatttttaattttttaatttttggcactatttaatttaataaacggcttattaaaaagtcttcttaaaatataatagttacataattatactctttttattaggttttattttttttatcataaaaaattagtatttttaccctccaaacattgaccaatacaaacatttccctcactttattaaaaataaattaattttaaaaattataatattttaatatttttgaaaaaaattataaatataaatttttctttaaaaaacataaattttttcttaaaaaatattttcaaattttattttcattataaatacatattttaaaaaatcaaatcaaaattattgagtatctaataaataatttaaataaattaagattttttgaaaaaaaaaatcaaagttatttatatttataaactcatatcttaataaataaagaaaaataattaaaaatttaataaaaatataaaattattttgaaaaaaaataaaaataaaactaaaaaatattatgtttacttaatcaaatttatattttatgagaaaaacaaaatagactcaagtttgttcccataaaattaattttttttttacaaaaattgaatttttattattttcttaatatctaaatgaatttcttaataaaaagtaaataaattttttaaaattacttatttagttctattttttttaattttcttatttattcaaaataataatttttttttaattttcttatttattaaaaataattttttcttaaaatccaaattaattttttaaaacttactaaaaaaatgttgaatctttctcattttattttaaggaggtacgatttgatagttgtcaaaatttaagggacaaaattactaatttacaaagacatgtcagtatttaaatagaataatgggacgaaatctaacaaaaaaatctaaatttctgtaaatataaaagtgcaagagattcttaacaagttgtatactttaaatcattatcgtgaaaaaagttcagagagcaaaattactaattattcacccacataaaggcgtcgcccccctaaaaaaataaatcgggaataaaaaataatgtatgcattttagttaattacaacatatatttataaataaaagttatatctatgaatataaaataagtttttgcataatggtaaagtcatttcatgcttcatgagttctaatcccaataaaaacatatttatttagtatttgtattttgttttttgaacatctaccaataatacttatatttaatgttttaattattgaacccaatatttttattgttattttttttatttaatactaaaatataaattt

SEQ ID NO: 35992 - DNA, 1529 bp, Cannabis sativa
  modified_base (644)..(648): a, c, t, g, unknown or other
gactgtaagagaaactttgtctttttcggcaagatgtcagggagttgggactcgctatggtattttatttatttatttatttatctattttgtgtgttactttatattgtacaagtttttggtattattgaaattacgaaaaatattgtaggtaaatttgtaaatattttagaaaatctgattaatttatactaacaaaattatgttttttttttatatatatttttttgggtatatatatttgggtaaattgcggcataaatacttaatatttcagattttatacacttaaatatctaatgtttatttttggaggcaaaaatacataatgttacaattctcttacaccgttactaccacttccgttattaactcataaatatggatacgtagagtgtccaaatgcattacatttatttattttattttaaaactcaatattttcttaatgtcagaaactaaatattacttgtttcaaaaaaaatctgttctcataacaattttacatgatattggcacttcaatttgataatcatgttccatatattacactggttcactcagctatgataatttaatattgcatctctcttatttttttaaaaaacaagtaatatttatttttttatattaagaatattaannnnnaaaataaaataaataaatataatgtatttgggccctccacgtgtccatatttataagttaataatggaagtggtagtaacggtgcaagagaattgtaacattaagtatttttgcctccaaaaataaatattaggtatttaagtgtataaaatttatttatgccgcaatttatcctatatagtatttgaattttctcacaaatttgtaagagggttgctatggttatattataaaaagggataatattatataaaatattatttcttaataaaaaaaattacattttaccttcgaagatttttttttatacttttacaattttttatagaaacaacacaaaaataataaaaaaattacataaaaataacaagaaaatatcatccaaacaacataaaaacaataacaaaaaatcaacaacaaattaaaaagagtacaacaaaaaaagattgtataaaaatcgtaaaaatatttaaaatttcatatagtggtatttttgtaattattttattattttgatgtatttgtggaataattccttataataaacactttcataaaaaaataaatttataattaatttctgataacaaagaaaataataattaatttacatatctaaaacaagatcattccataaaaaaaacctactacaaaatctatcaaaaatgattagctatcttatgtacatatacttatgtataattggcagaaatgcttgctgaattgtctagaagagagaaagaagcaaatatcaaaccagatccagacattgatatctttatgaaggtaattaaataaaacttcatttaaacaaaattacttaaatcaccatttttcttaaattatagtatacataattatattttctcaaattttacaaa

SEQ ID NO: 35993 - DNA, 1103 bp, Cannabis sativa
cttattggatttattcaactgctaagtataggtgacctttagtcactctgatcttgattgagcaacaatagttactagtacgcagttttcatagaactctaaggagagaaccagtgggactgacagagacagaggaataaatcattgttcctgagaaccgagtttggggtattaccacccattgccagcagttcaacaatacaatagcaatgaatggaaaccaacagatttgattcaccttatactactttcagaaacagaaactagaaacgcttgaatatctaaattaccattaaatgcaatatcacaaatagtttaattagcacatctatatcaatagacctacacatatagcaatctgcattacaagctatgtttttaagcatcatttatgtaagttgataccacttcctcataaaaaaggagaataagaataaattaaactaaaaactgtataaaaatgaagccgcaggctaagcatgtacacgtgtggctcggttttcatagattagtgaaagagcaacaacttactttagagaaaaaaaaagatccttcaagaatctatctaaatcacaccagattcagtttgcagtctaaaaggtctcataaccaataaaagaaattagggaaaaggaaatatgaatacttaatgaaataaacaaattaaataaactgacacaggtaaatacaggcgtgttgtgtgctaccaaaagaaactagtaatgtgctaccaaaagaaacatcttctgggatttcataaattaaaggctaactaggatttttgtccctcgaactttgacatataccaaatcatgatcccctgaacttttaaggtcgttaaaaatcctcccagaattattgagattgttggatttaatgacttttgaccaattttgataaggaaaatttaacatggaggaaagttcagagggcataatttggtacatgtcaaaattcgaagggtttggtagatatcaaagtttggggagcataatatagtacatgaataatcacagaaccagtaaaattgaatgaaattggacaaaaattctaattagctctttgtcaaaaaaaaaaatatcctaattagcctaaactattat

SEQ ID NO: 35994 - DNA, 1537 bp, Cannabis sativa
aaaacatagtagataatttttgaagtattaattggagtaatttttgtaagaaaatatattgaattatatgtgaatgagagaaatattaaaaaaaaatactctaaagcaatacatgtattttggtaattatgggtattataaacatttaattaatagtattgttatctaatatatatttagtcttataattaattaattatacttcttaaaaattattaaattaaataatataaaactcaatacttaattatatttcttaataatatcttctaaaaataattatattaattatattagcattttttcaattctcttaattaatatatatagcatcatttatggtggatagaatgacagtcaggtgatattaaaataagtcactactatgtaaacgttatctatttcatgaagaagaaaaagacgaaaagagtacaaattccaagatttataaaatataaaacattcacagacttcgatcatcgattctcattttctgaacaaaatccagcgttaaagaacaataccgttacataattcacatgcaaccatttttaaaatttaataaaaataacttgtctactactatttttgggcctctaaatgacatgatgatgaaaatatcaaatatactcatccttgaaagcaaacacttagaaaaagacaaaaattaaagacactcgaaaattaattttcattttcttttaatttgttcggccagttaattatatatataaaaagatttaatcaacttttatcgttaattattaattaataataataattatcatatatattaatatattattaatctcaaatctcgttactactgaccgccatagtcttgttctgaatcagcaaagagttcttgcaatgagctatggcaccttgaatagcactctgaagttcctccatagatgacgaagtcgatgtattcatattcatatcaccgttattgtaaccacttccgcctctagcgccgccggtgccggcgaaacctggccggcaaagaacaccggagtggcttggcgaggaccgtatcgaagatgggcagctagagatgcagcttttcctcctcgggtaccttaaattcccagaaaacgaatgagaaaacccattctgatctttattattactattactattattagtattggatgaggaggatgttgctgaggataacggtttcgaaaatttagtcgtagaggttgacttcgaggtagaaaacgacgtcgttttgatagctggagcggtcattacacgaccgagcttttgttgccgcggttgaaaatgttcattattctcctccgccgcggcgaccccttgcttttgcgatagtttctcgtacaacggcttaactttcttcatatactttcttataacctctttagccgaactgctcattcgtttaaccgacgaagaagacgacccggataaccctggtaagttgttatccaccgccgccgccgccgccaccgccgcaccacctgccttaggctctttcttgaaaacggaagagattctggctagagaaaagtac

SEQ ID NO: 35995 - DNA, 2062 bp, Cannabis sativa
  modified_base (170)..(175): a, c, t, g, unknown or other
gtcaacaagtttatcatagcaatttagatcaaataaataataggtttgtttaatttctttttgaataaataattaaataaacaagcaaacaaacatgtaacaaaatatctgttaagtatgttaagatatttctattttaaaatagatatttaaaaaatatcttaactagnnnnnnaatttaggttgttagaaaatatttgaaaatatttaaattctaacaaatctcttaaatatctaaaattcaaactgaaatttaaatatccaattaattttcaaattatatagtttatttaaataattcaaattaattaaatatctattaagataatataatataacaacttaattttaaaattgagatctttttgatattatatttctaatcttattatttttataaaataaatttaacaaaaataaacaaaattaaaaataagatatttgatggttagaatattgacaattttaattaataaataaataaaataaaatatcccaaatttgaaaatattatagttagaaaatcctaaaatatctatccaaaccaaatttaacaactttttaaaatttcatgttattttgatagaaatataaaaaattaagctaaatatctaataagataaaaatatcaaaattaatatttttctaatcttataatttaaattaacaaaatatatttcaaaaataacaaattttaaatatctgatatggttagcaaacttgaaattctaactagattatttttaagttttattagtattttattattaaaataagatcatttcaaatttcaataataaattgagtaaatctgatcttataattaaaataaataaaacaaacaaaaataatcaaaaaattttaaaattaaccataaggctggtttgtggaaaaatccaatttcaaattcaaaggctactaatatctaaaactgattttaattaattaagaaattaataaaaattaattttattttgataattaaatgtttatttaaaaattttgattctacacaaattttactaaaatttgaattttgtttcactgaaaaatcatttttgaatcaaaagttatcacaaacataagatatacttggaatgccgactttaagtgggcttatagttttggaacattttacccctaagcttataattacttaagttggaagtaaaaagggtattttgagaattttgtttagaggtttaggtggccgattataaggttgatagctggccaataggggttatctcagcttggtttactgattagttagtggaattattattattttattaaaaaaaagaaagaaagaagagaaaaaaaatgatccaattttgctcttcctcccttgctagctttgaacccagcccaaccaacaaaatttgggacttttggtgtgattttgaggaagtgttaactgaaatcaagtggagtaaatcaaaggtaaatcctagaatcttttctctttgattttcgaaagcttttaagttggttgagtatacatgcaaatttttaatatttggttctgtctcaaaacctagttaattttaggttgttttctaggctaaattaaggtttgttggagttggtttgaaattattttggtgcctaattcttgggttgatcaagtttgagttcaaggtgctcaaacttgactcaaaaatggtgttttaagtttctatggttaattgttgttgtttctagttgaattttactcctggatgctatatgggtggtctagaaggtttgtgaagtttggggacgatttgtgcatgttttggaattattggggttttttggtgtaaacctgtaaaactagttaagcggatcacagacaagatcctagaaaaatctattttgcatattcgtgtcattttcagagccttagtttatgggtttcctcaataattagggtatagttaatttagttatcgataacaaaacttgtagttgtgactttatgtaataccctaagattaagaaaatggattagcaaaccctaactagttaaatgtgtattattacagaattatattattatataatttattatatgtgagtt

SEQ ID NO: 35996 - DNA, 1178 bp, Cannabis sativa
ccagaatcaacattatactaacaacaatttttatttagaagaattatatttataatataataatgtagtatgcttacagtaatgttttggaatttttttcataataatataacatgttatttaaataaaaaaacaattttatataataaatatattaaatattttttttatttataatataaatgtttataatttattataaatttatgtttattttataatatagtttattttataatataattattataaaatatataatttattataaatataagttgttttttaaaaataaataaatatgtttcaaaataaaattaaataaatactaaatagtttgatacagtatataataaacatactattttttttttatctagaatgatttattataaatatattttttattttaacaaatatttaataaaaataataaacaacaatgtcttgataattatatatgtttaattaaaattaagaaaagaaaatcgtacaaataattttgcaagttataaatatattttatatctataataaatctatacattttttaccaatatatatgtatatatctttattatttataatatcatatgtttattaaaaaaaaataaaataaacgatttcataaaattaattaaatagattgaatgtttttttttttaaaaaaaaaaactaaacatactaaatatttattaaattaaataaattaatatttattatctatgttattatgatttattataaattaaaatatatatataaggtaaaattatattagtgttattcagtggcggatcccggatttaattttaaggtgagcttagttatacattgaataaaatccaaaacaataaatgactaaactaaatttaagtaggtttaacaacattctcatattcttcataagtttgaatttggtttaaatcttatactttgttagtttttttctaataaataaaatttagatacactttgaaaaaaaaaggagcaagacgatttgaaatatggtctcctatgtaaactcaaagcatcttaactaattattctatttaactactatatatatgtgcaagcaacaattatatattagggaaattatagtaaatgaccccaaatcataggactatgttagtttatgttcccatttcaaaaaaatatagcaaatgaccctaaat

SEQ ID NO: 35997 - DNA, 6892 bp, Cannabis sativa
aatttatttaaacttaaataaaagaaaaaaaaaactagattgaagtatgcttgctcaaaaggtccatgtatggattaaaacaagcaccaaggcaatggaatatcaagtttgacagctttatcactagtattggtttcactaaaaatcagtatgatccctgtgtgtacatcaatcaacatttgtatttgcttctatatgttgataacatactgattattggaaaagagaaaagtgaaatcaagaagatcaagggcaagctcagtgaggaatttgatatgaaagatcttggcaaggctaagaaaatcttagggatagaaattgatcaaagccataaaggaatgatcaaattatcacaaactgactacttgaagaaaacacttgaaaagtttgggatggaaaactcaaaggttgtatctacacccctagctcctcacttcaagctttcccacagaatccccaaactaatgctgaaaagaagctcatggagcaagtgccatacaccagcattattgggagcttgatgtatgccatggtctactctagaccagacctagcccatgctctaagtgtagtgagcagactcatggcaaacccaagaaatgctcactggacaactgttaaatggatactcagatatatcaaaggcacactaaacatggggatagtctacaacaaccaaacagaagctactgaagaaattgcaggatatgttgacaatgattatgctaccaattagacacaaggagatctctaactggactggtgttcactgtttttggtggagcagtcagctagaaataaaacatgcaaaagatagtagctctttcaacaactgaagtagagtacataatagctgatgaagccttcaaagaagcactctggttgaaaggtttggcttaaactccatcaacataactatatactgtgataatcaaagtgctctccacttgcttaaaaatcctatgctacatgagaggtctaaatgtatagacataaagtcttactttactagagaaattgtagctaaaggactagttcaagccaagaaaatcagcactgatgacaatcctgctaacatgttaacaaaaagtgtcaacttaaccaagcttaaacattatttaagtctactcaacatatgcaagtgatgatgcctatctctttgttcaaatctgctacacacatcatacttcttctagaacctaaaatgactaaactaaggtggaattgtggtgtttagttaatccattttatgtttcattttcagctgatgtgtcaccaactttttgacagttggtacccgagttgcttatctaacaaataaacaactatacctattatagatagaccttgtaacacacttctttagttatattggaaattcagaatttagtaagaaaaagagtaaaaaggagggatgtataagggaaccaggtgtattttatcttgattccccattagtgaggttctttgtaatttcttctcatccattctccattctattcaatgcactcttgtactgatttcaacatcaataaaaggtcaatgtttatctactcttggtgttaattttctctttgttttgctcattaagttactggtttttgtgatcaaactgtgtttgtgattttggttcttttagattgttgtattgtgttcttgatcaagttcttaagagtgatttattcaccacataaataattaaacattatgtttaaattcattcatttcctttaaaaaaaaaaatcaactctgcctgaggatgaacattgatagtgaaaaattagaaagaaatttgtgtacatgtaacatatgaattgcaaaaataattctattttcactgtttgagtctgtcattaagaaaccatccttgctctgattaattgttaaattcatattagtattatatgtgttagttgtggtctgtttatttagttaggacaactaaagaggcattagttagttaattcagttatttcctagttttttggacaagctatatatatatctgtaaactcacccctttgtgtgggtaacttgtatccatattcatcagatcagatcaggtttgcccaagaatttttgggtagaagctatccttacaacatgtcacctaataaatagatgcctctcttcagctacaaactttcaaactcctatggaaaggtggtctggccatcaagcaaactaccaaaatctgaaaacttttggttgcattgcatatgtccatgacaagagagggaagctagatcctagagctataaaatatgtgttcataggctatccagatggagttaaaggatacaagctttggagccttgaaccaggaaaccaaaatatgtttgtcatcactagagatgtgatcattggaagaggacaaagtatacaaagacacactcaaaactcaacataataatgcttctaccagcagagatgagagtatgcagtttgaggtggaactgttaggcaattcacaattggaacagccattacatgcacaaacagatgatgaaccagctcctacaaataatgtacaagcataacaggaagaactagaagatgaagtggataaagaagctactactgtccatgattacaagctaagaagagatagagacaagaggcctcacaaagctccttaaaggtttggttttacagacatcattcactatgcagtaaacatagaacaatttgaacatgaacttagaagctttgctaaagccatgaggtcagctgataagaagaaatggggaagagcaatgggtgaagagatagaatctttgaagaaatataagacatggatcttgattttaaaacctgcaggaagaagggtagttggctgcaagtgtgttctcaggatcaaagatagaattcatggttcagaagaagtgagatataaagcaagattagtggcaaaaggatttacacaaaaagaagggctagattacacaaaaatcttctcataagtagtgaaacacacctctataaggctaatcctagcactaacaacaatgaatgaccttgaattggaacaaatggatgtcaaaacagcctttttgcatggtgaattggaggagaagatcctaatgcaacaactagaaggctacgtggagaagggtaaagaagatcatatttgtttgctaaaaagattactctatggcctaaaacaatcacctatgcaatggtataaaagatttgttgatttcatcaccaaatctggcttcaagaagagcgcctatgacagttgtgtgtacgtcaaaacatccaatacaaagaatataatcttcttaccactatatgttgatgatatgctaatagcaagcaaactaatgagtgagataagaaagatgaaagacatgctgagttcaaaatttaaaatgaaggctctcgggcatgccaaaaagattttgggcattgagatactcagagataggtagggaaagagactaatactatctcagaaagattacatttcaaaattgctgtagatatttggtttttcagaggtaaaactagtcagcacacctatgactcacctaacaaaactatctcactcacaagctcccactacaaaatctgatcacaactacatggagaacataccctactcaaacttggtgggaagtctgatgtacatcatggtctgtaccatacttgattaaagccaagctatgagtgtcataagcaggtttatgggaaatctagggataaaacactgactggaaggcgacaaacaaagtgggtggtaaggtacttaaagggcacatctgacataagacttatgtatatcttaaactctcaagcactagaagtcaaaggctatgtagattctgactatgcatgtgatatggacattagagtatctcaaactggttgcgttttccaactaggtaattgcacagtcagttggaaagcgaacctccaaaacattgttgccctatccactactgaggcagaatacatttccttttctgaggcagcaaaagaagctatatggttgaaaggaatcatcagaaaactaagcatagaacaaaggtgcattgaggtacactgtgacaataaaatgctctgcacttatccaaaaatcagttgtaccatgaaagaaccaaacacatcgatgggcggctccacttcattagagatgtcatagtagaaggaaaagtgaagctcaagaaggtttcagcagaggataatgacatacttaccaagccactcaccactgccaagttcagactctgtctgaatctactagggatcactaccatcagcgatctgtaactaacttttttttgttatgttttgttgctttatttgttgttccttttttttacattgaataattcgaccaaggtaaaaaaatttagttgtggtctattaattcagttaggacaactagagaggcattagttagttaattcggttacttcttagttttttggacaagctatatatatttgtaaactcacctctttgtgggtaacttgtatccctattcatcatattagaataatacaatgcattcatttttcttctcaataaggtcttgctctctttttcgggttgaagaactgtgttcagttcaaagtacaatcatgcatagttaaatgcatttgttgagaattgattgttttcccaacaatatgatatcataataatataaaatttatgatagttgataataaaaagagataattaagacttaaaaaatagaaaaaatatctcattagtaaattaaaatacgcacaaaactcctaagtttttctttaatttgcaacttatagagagaactgatatatcatagtttgatacaaatataatagaattcataattgtgcatacaaaacaaaatatacataatgaagataaaagaggattaacacaacaacataaaagtattaataataagaaaataataaaatttaaggatacataggcttataacttattttcgaaaattttctctccaaatcgtaagagcactccttaatatacatattgttttatttagagagcagtcatttattgatatcattgaccttctacatgtatttgacaatacaatttaaattgaatatattataatatatcgtaattaaaatagaaaaaatataatatatatttgaaaataattagaaaataatttcaaaaaaaaaaaaaaaaaaaaaccaaaacgtaagtgatgataaaattaaaaaacctaataaataaactatcatttttttaaaaaataaataaaataaaaaacgagttgattaaagagtgaataaatatatttatattaattaatatttataaatttaataaaaaattaaagagaaaagaaaattaaggagataacaaataatattcattagaaaaattttagagtgtcccgccaccacctcaaatctctcatttatatatatatatatataaaaattttaattaattgagagattttgtaagatctaattaataaataaattaaataacaattttatttgataattaattataattattatataaatagttttgacaattatgggattgaaattaaaaatatggcattagtgaaagaaaagataaattgttgaataaaatggtaaaattgtagctggtggggtccactatgtatggccgaccacttaagctatttttagccattattttatcttttttattccatataatttaaattctaaactctagttgaaatactataaaaggaataagatgacccttataacctaattttcattctttgtcacacaactagaaattgagagcctccttcaatagctatttcgaaatccttctccctcttcttcttcattaaatttcgaatccctagtgaaaagttcatgcccagcccactcatatcaagtcaagtactcaactatagtgtggaagattgtgaagaatccaacacctgaaggagatccagttcaagacttgttattactctatgacataaaagaacaaggattagagatctgaacagaaggaggtataacattctgctgccaccaatgtaagtttttctaaaatttatatgtgtttattttcttttaggaattcatatttagggtgttagattatagaattatcaacatattttttttagtgtaccgtaatggtattttacattcaattaatagcttgtagcttaaaggccttgagttcgaagattgtgaagaatccaacacctgaaggagatctagttcaggacttgttattactctatgacataaaagaacaaggattagagatctgaatagaaggagctataacattctgctgccaccaatgtaagtttttctaaactttatatgtgtttattttcttttaggaattcatatttagggtgttagattatagaattatcaacatattttttttagtgtaccgtaatagtattttacattcaattaatagcttgtaacttaaaggtcttgagttcgaacccatgacctctcccttttcccattcctccctcaccactaagctagccttagtggcttatagaattattaacatacatatgagtaaatttagatcctagtaaaataacttccaacatccctattccacgatatcttatggattactagcatggctgaccagagggtggggcagccggagcctaggccctatgcccaacaaatttggaggccccaaaaaattaaaattaatattatatacataaaaataaaaatataatatatgtatatatataaattttggtataccaatttttttaaaaggtcttacaacacaattggtggagggaatttatgttggttggtagatactgggttcgattcttagctctctcacattttgggtgttttaaaaatttaaaggcattgattaaacttaataaagattatgtagggtttcaatgcattattta

SEQ ID NO: 35998 - DNA, 1474 bp, Cannabis sativa
ccctagttccatgtgagcaacacataattgaatgctattacgacaaatagaagaaatagaactcgaaaaattcaattgaaaatgttgttgtttgtaaatatgaacaaattaagtttctactaaaatttagaatatataaaacattgtttaaaatcaaaaatttattctgaaacttgaggggagcttctcctctagcttggaccgatactaatttgtcattaccaactttgagcttcaaactcacttggatttaagcaatcccaagttttaagcaactgcaatgaagagcaaacatggttagtagatccagaatcaataatctaaatggatttgtcattctctaaaatacatgattcaaaaactaaagcattaccttcgttcttagggtttagaagtttgagatatttagatttaaaatctcctttctgtccacagtgagaacattgaatagtatgtctgcttagctgttctttgattttctctatagttggttcaatttgaagtctagcctttatcattgagccagcaattgcagtattgtcgaaggaatcattctcattatattttgcttttcttttacccttttctgcagtactggagagggacctccttgcaagtgacaatgtcctttcataagcatgtaattcagcgtccagcttgtatatgtcgaacgagttcaaattattgatcatataagatacaacaaatttattatactcatgtgataagttgttgagaacaaactgaactcattgctctttcgataatacaattctcaacatagttgttttctgaaatttcatgttcatcaatagcaagtgtgaagtgatactttggatgtcaagtggtaattacatgtgaatttctattgccatatttgacaagacaattagtaattaaacaataaattaatattatgtaatatataatataataattattatcattttgtaacaaatatttaaaataaatttatctattaataatatttaaaataataaaatttcttcataaaataaactcaaatatttaaaataatttttatctattaagactatcaagttgctcttatattccatatattttgagctattttatttggtgtatagatttccagtcttacatgtttgtgtatttataattcctatgttgattaaaaattaataataaaaaatttaagtatttcatcaattaaaatttatactaaatcataaataaatctattaaatacttaacacaaaagagaacttaaaaaatagtgttaatgaaaaaaaaaaatagatttcatatatccatatatttatgtctttttttttatttacaaataatacaataaaaaccaactgaaaaaatattataaaatagcatcatacatagaataaaaaataaattattatatgagaaaagaaaataaaaaaagactaaatcatattgaataagtattatattaatttaataaaactaattacttttg

SEQ ID NO: 35999 - DNA, 2238 bp, Cannabis sativa
tgtgttaatccttttgtgcaacttgatctgaagttggcacatactaaacttcaagctccttctttagcactttgtctcgaacaaaatgaatatcactctaaatgtgtttagttcttgcatgataaattgggttggaggcaagtgcacttgcattttgattgtcacactaggtgactaatctactagggagtctgaatttgagttctttgagcagtgattcaatccatgagatctgagctagggtaagatactctaacttggtgttggatcttgatacaactaattgtttctttgatgaccaagcaacaagggtatctccaaaataaacacagtatctaataatggaccatctgtcatcaggacaagaagttgaattcgcttctgagtacccaacaagagacaagtgatctctatagctgatttgcaatccatggttgattgttcctttcaaatatcttagcaccctttttactccactccaatgactagtagttggagcctgcaagaattaacttaatttgtttacaaaaaatgcaatatcatgtttggtatgacacatatattgcaaagctctgatagcacttcgatagatagttggattagacaattctactccatcagactttgacagaggcttccgtgagaccatgggagtgggacacatcttgagtatcagcattttgtactcatgtaacaaatttgagatgtatttggtttgagttagacacaacctagtttcatcccgttgtaattctatgccaaggaaaaaaagcagtgctctaagatccttaagagcaaaacttttgttcagtcttgttgtgaattcttccaactatccattatcattgcctgtcatataatattgtccacaaagattaagatcgtgataatagtgtgattagttatgtaaaagaacatggatgagtcttctcttgaatttgtaaaatttcactcaagaagggtttttttcaattgatcaaaccagacccttggggcttgttttaggccatacaaggatttatggagcttgcacacatggtttagtttcttgggatcttcataacctggtggttgaaccgtatagacatcttctttggaagttctatttagaaaagcattattaatgtctagttgcttgatttaccaatttctagacacaacaatagtgaggacgattctaattgttgatgcctttacaacaggactgaatgtttcattgtagtctataccagctctttaatgaaatcctttagctatcaatcttgctttatagcattgtattgtttcatcaacattaatctttatttcgtacacccatttatttctcaccaaattgtattcatcacttcttggcacaagagttcaagttttatttttttgttaaagcattaaaatcaacatccattgttgaagaccattcttttaagctcatggcttcttcaagggtgcttggtttagcaatgttaggcttctattttgcttgttcgaggtaaactttaggcttgaatatgcctttgtcacgtatcactattggatgagattgcactggatgaccaagtgttcaacattatcaatagctgaatcagtatgttcacttacctcttgttgattctgcgtggcagatggtgttccaagggaaggtagagatgaatcattagaattatcatcaacttctagtgtgacaatcggttgggaaaatttagtgaagtgaaatcacatagttgactttagtgggtttttttgaactattgtcactttcttttgggcataagtatttaaaaacccacatttaaagggaaattcattttcattaaaaatgacatttctagatatatatatatatatatacacactttttctgttgaactcaagcacttatacccattgtgacaattattgtaccctaggttcatacacttgagtgagtggagttggaatttgttgttttggtaaggtcttatataaggaaaataaaatgagccaaaaactttgagaaaggaatagtcaggcagcttattaaaaagggtttgaaatggtgatttatgttacaggattagagtggaaagtttatttatcaaatatactgtagtttgaaagtatcaacctaatactttaatagcatgttagggtgagctaagagtgctaatccatttctactatgtgtcagtactgttgggttttgtaccgtaaataaaactcatttcaatataatcatatttactaattaatataagatca

SEQ ID NO: 36000 - DNA, 1253 bp, Cannabis sativa
tgttaagcttgtaactaggtgtatatgggcacctcagctacaagaaaaaatatatatatatatgattatatattttatgcttttcttactgagtcggtcgactcacaattattattccatgttaagtaaagtaaagacaaagactgagctacaatgagtttagagcttacgggtgattgtacatatcaggatggttaagccagaagtgttcagagttatgtaatttatgtatttattaaagtttaaatttaatcaaaaagttttaacttgtcatatttttgagaaactctttgattagcaaatgtgggcataataattagaaaattactgtagtgtgcctgagcaagtagggctttacatccatatttttagtggagtaataatagaattaataaaccaaaatatattctttctatattgattgatgagtagttcaataataaataatcaagtgtttattgattggagctctaaaatataggtccatggtccttaagtcacctctaatcaacactgtatgggaaaagttcattttgatgaagaaatttgagagagagagttaatttctatgagaaataattcttaagggcaaaattgtaatttcgtgtaaattattattttgaataattatatcaattgtgaattgtataattagtatttaactatttagtttatttgatgaaacggtattaattggcttaatataatattattctgaaatgatattaaagagagaaatatattatttttgtaaaaataatatttattttaatcctaataaaataagagattaataagaagtaatcaattattatttattcacaaataaataataaattttattttgataaaattaaaaaatcaattttgcaccttaaaatatggcccatatgtgtaaggacatataaagattcatttggttgattattttattattaatataaatcaaattaaattaacaattatattaaataatttatttaaaactaaaaggataatattaaataaaaaaattatttttattaatcacttatatgttatttatatttgaatttcaatttaaaatttgaattaaatataaatattatcttttattttatacgaataaataaaagagtttgtttataatattatatatacgatatatattagaattataagatatatacgtgtgttgagaaagattagttttaggtttaaaaatacaattgaaatttctactttctcaggcaagcctctctctctctctctct

SEQ ID NO: 36001 - DNA, 1130 bp, Cannabis sativa
ccctcctctcagcagacaagtcccgcaaaattttcacggcctcgtccatgccccgaattcagacatgacgaacccgtgatcaattagggtcttggaaaggctggcagtctcatcagtaatatgaaaaaagaaacaagaatgaaatcagatgccttaagacaaaatacaaaagaagggaataaatcacaagaactcaccgcagccagagcagcgttgatgtcctgaacttgctaaccgagttcacagaggcacaagcagcgtatctcttggctgggaattgagtcagatgggagacaaacttgctagtcatcaccaaggcaaagggagcaagagtaggcctgacgaagcagttgaaccaatccatcagagggtctatttctcccacttgtgccatttcttaggtcggtcccggatgggctctggacctccgccgaggtgattatgtccacccagagcagcgcagcgggagtccttacattcaggcggatgaccttggaaagattgaagtcatccaccggctgactcttggatatcagcttagctttttgacagttctctgtcgtgtttaagtccccaacgttgagggccttcctgtcgtaagtagcaaaagtcttagcctgctggaggaatacttgagttgtaggggtcagcatgtatggagggatcctaacccactctgtaagaagctccgggcggtccatggcctggaagccggaggaaaagaagaagcggtggcagtactccttcacattcttctggtagttaaaagggaccgggacctaattcaaagggtgggaccgaagtccataaaatccatctttaaatttgtcccccttcttggggacggatacaagttcgtaaaaatataaaatttcagccggactgggcgaaccccagctctgggcggcgtccaaaatgaataagcttgaaagcaggcggcatgcttgaggaatcagttgatacggcgcaaggccaacaaaaactaaaaaattaataaaatagtcctgaagagggagcatagccccagacatcagatgggtctcactccaagctccgaaacccccataattgtgattgattgtctcctcgtctcgaggcagtcagtggaaggtcccggaggctggtggctt

SEQ ID NO: 36002 - DNA, 1255 bp, Cannabis sativa
gcttatagtggcatatttagcacttctattaaagcaatggtgtccctagctacaattggactgcatttcttatgctttatctaccttttttaagggggcaaatactattttagaccctatgttttgtaaaagttactaatttaaatatttattttattaaatgataaaataaaccttgtattttctttaatggtacaaataggattttgaactgattttttgttgtaataaaatttaataataatctaatctaaaagtgtcatgataaaactatttatattttctgtatcagttcgtgttaggaattgtcttcaagttggttatttagaaagaaaaaaaaaagttagttgaaaattaagttcagggtcctatttttaccattttggaaaatgattgtcatttaacaaaatagcgggtttaatcggtaacttttataaaatacagagtttaaaatagtatttatcctttttagggcatctgtcaagcttaaaaatcctttgcaatgtgaccttttaacagggttgtttttagcttttatgggatctatggcaaaatttaaaaaatgagccttttatttgagaagtaaaatggaattcaaataattttttcttgcaaaagaaattttggagggccttatggactgtgtttaaaaaaagatcttaaaagaaaaagagacggggaggcctctgggatgtggggtcttgggcaagggcaacgaccccgaccaccctaccctaaagacggtcctgccttttaacttggagtgatatgaagtcctcatcttgcaattacttgggtggcaatcatcttagtcttcttctcattgcctacggccttctctattaccatagaaacactcaactatacaccatgcagttggtgaaggagtcataagcaataccataaagcgtgatcttgcttgtgagggtgataaaattattcgtgaggcttgtaaatggagtcatgaactagttgttgtttgtaaagtttggaaggaaatcaaatttgaatttgaagcaatgaatacgtagtaatccagcaattattttatgttctttgttcttattcttaaattgaattttgaattgtaattacactcggcatcgagaattcaagtattgtatacgtcattacttcgatcctttactttgtaggaactatttataatagcgaacttgcaaaatgaatctctttatgataaagagatttgttgttcttaaccctgcttcattttaattgttatttgaacaagtaa

SEQ ID NO: 36003 - DNA, 4484 bp, Cannabis sativa
  modified_base (1203)..(1211): a, c, t, g, unknown or other
agaggtaaaaatgatagactttaaaaaaaggggtaaaaataaaagaggataatataaaaagggtatagagtgtaatttcttcctaaattattggactatgcatgtctgacctgatctgtggcttcaagaaatattttgattttttcctttttttctcaaaatcattttcttaaagacattatttttaagggttttaaaaaaaatctgaaaaatgtgtatttgataacaagtgtggtgattttacaatgcactcacttaaaaagaatgtactgatgcactgtctacttgtttcggaatctaaaagaattttttagtataattttttttatattcatatacgttatagttatttaagatatcgtacaaaattttgagaaattcaaataatttacaatatagaaaacaatgtttaaacaatctattttacatacgtatagtataaaatagttacgcgtgcaacacactgtttgaatgtaatttttgatgtgttaaattttactgaattttttaaaattttgcatgatgccttaaataattataatttacacgaccatgaaaaaaaatttgattaaaaaattattttagatattaaaacgaataaaaatgtatcgatctatctcttttaaaggagtacattatagaattttttaaaattatttataaattaagagttaaatttaattatttattaaatttaactataataatacttaaatatattttaaaaacattattctcaattctattttgatttttatttaattaaggtgacaatatacacccaataatgatagaacaaaacaagtgagctagctagctagagacttatacttatttcttcaataagtaaataaataaaaagttagaaaaagacatttagatatgtaaagtatataatacactatataatatttgaaatacaagctctgatcatatatatagtttaatatatatgtatatatatgagactagctacattattaagtgatgtaatgtcatgaaaaagcaaaaaataaaaacacaaaaattgaggtcattttcaaatgtccatttttttctttgttttcttattataatttaattttaagtgtttatatgttacaaaaagtggagtcaaacgttggatttgatggttgattcagggtatcaaaaaccatgttcttataaactgagtgaaagaaagaaatattattattattattnnnnnnnnnattattattattattattacataaataataactggaaaataacatctcatgaggtcactggatccatcacgctcttatattcccatttggaatttttgttttcccctaattactattaatttaataattttgaatgtactaattaattatttaattaataagatcatatgaatgtttttaatttattaatataaagattgtatataatttcctatctaattaaagacagaactcaagacaaaaaatgccaatacattaaaaacaatataaaatatattatatatagtacaatagatagactatagtgctgaaaagttgccaattaatatttatatatatataatcttagattaattaagtaatataaattaatattctgttttggagtatatatttagatattattacttaataacgtaattagaaagtgatgagcatgtggctttgcaagcttaatcagtacattatatatcttccttagtaagattttcatgaacagctgttatatatatactttactatattttatttcaatatggtaaaaagtatttttttaattttttaatttatttatataattataaatggttggtcaagtcaataataagcttctttgagtaatgagtaagtcatatacacatatatgtatatatgtatatacatcgattttagggcatgaaaattgaagcaatgaatggaaagtgggcaataaataattacagtgttatataccccaccatttcaacacactactattcatgatttcatattactacaattactatgtacgtgtgaatttgtgaggaggatcctaggcaatatttttatcttaatttaattaaattaagggataattttggtataagtatccaaagttttgtatttgtaattgatagtagcaggctcggttttgagcataggaagattaagcttgttcttaggattcacctagcttagtagcttaaaaaaaaaaaaaaatcaccccttacacattttttattaattttaaaaaagatcatatttatctctatataagggtctaaaaatatatttttcttctagcccaataaattttaacacaggctatgagtagtgacccatgctatatatttatgttcagacccaataatttgaaatacggaatctattttatactgacaaaactattataattttactaatattgaatacttatcaagttaaaaaaaatcatagaacttaattatgtaaactcaattttttttaattaagcgtaattaagggtctttggttcaatccaatgtaaagcacttaaaggtttgatactcgatgaagtaatattgtgtttgaagaaattaagaaggactttaatttcaatacaatacaaatatacaaacacacgtgtttgtatatgagtagttctcactagttcctatgtatcatttcaaaaggtatacgaggacatgaataattatttattaaatttgttttctaaaaattaaaaaaagaaaaaactatatgagtgtttccttgaaaagtagtgagcaaacttagcatagaagtgctttggctttcttttattttattttcaaaattatttttagaatgtactcatcaataatataagggtatctttggtacactaagttattttataatgtaattcgtattgtatagtattatattgagttgtattataataataagggaattagttcatgtatcattttttaatttacggtttgagttgttctggtagtttctatgtggattgctatatatgaatttcagttgcgatttaggttattctgttggttgctctgtgagtttcaactttcaatgtggatttctataaaaatgtaaaaaagaaaatctatttttgaagtgtaaaaataaaaaataaaaaaactcttatattatattgtatctgtatagtattgtttcaatacaatacacaatatttggtattaacttgtacttataggttattatgtaaaattatatttaccataaacctaaccctaatcctaaccacgaaccccaatcccaaactcaacctcgaaccttgataccaaactcctaccccgaacccaaaggactggtcctaataaggtatatgggacctaagataaaattaaattttagaactcttatatatagtttaattattatcaaaatgatagttttagtgctttagtataatagtaaagctcttaaaagctcttagattaaattctttatagctacacatgaagtattttttaaaaaaaaataaaaaagtaaaggttgtgtaaaatcctttgaccttttagcagtttaccaccacaccaaataatatttgttatatttttttattatttaatattttattttattttttcaagatttcagagccctaagcgttcagggcccggtgcatgcctggctcccctaccctaagggtcgatcccagagtccgactctagaccttgaccctggctttagaccccgatctcaaacctggacttcagactctagccctagactccagaccctgcatggccccgaatcctattcctagctctaaacccaaactctagaccatttttagataatatatacaagctaacacatagcatttttttatgtatcaaataatataattttaaatttatgattgtaactaataattaatacaatgcaaaattaattatatttaaatatagtatttttcttatttaatataatacaatttttatacatgtgactcgtatatagcacaatttctaatatagacaaaacgtattttggtttacttatatattattattaattaggttaatttgacataattacaaatatcctataaatcttaatataatattaaaaacaaactatgaaatagtaatacaatataattcaaaaatatgagtggttctacttaaaaaaaaaatcattgattcataactaaagtgacctagataacaattaaccaatagtgagaaattaggaagagtggatttatattattcattatagatttatagctaggtgtgattattttgtaacaactcatataattaaaccaatcttttcccttcaaattgggaaggaattaatgcaaaccaaagtagacttatatttaataattatattaataattcaaagtcatagcagtaacaaaacatattaaaaggttgtcttttcttttgacttgttctccccccaaaaaagttaatacaatattttaaaaaaaacaatcatgtaaaaaataagaagaggtaagaattagttaaactgttattggtataatta

SEQ ID NO: 36004 - DNA, 2564 bp, Cannabis sativa
ggtatcagagtaaaaacaaacaaaaagaaatcctctaatgattatccgccaaaaaaaggagccaccaaaaatccaaaaataactgatccaagagtcaaagctaaaaaaagccacttgtaattcaggaatagtgagccaaaaaaaaaaagagccaccaacccaaaaataccgatccaaaaagtagagcgaaagagtcacttgtgattagggatagtgagctaaaaaaagccgcttataatcgagttgtccaagatggtgagtaaataaaatagctaccatcttgagggggatgttagagagtctcacattgctaatgtgtagaaagataatagattatataagatgaataagctactcctcctattgccaattgattttgagatgaaatctcattcaccttatcacaaattctaacacttacagtttgttgagtagaaattatagatgcattacttggtctctatcatcatttgcactctttgattgtttagctttgagtttgcattctctaaacattgtactaaatttaatttttattcatttatctttttaggttttttatctagtatttttatttcatgtcatctggattagaaacttttttgaatggatttgttccatttttttatacactattatttattttaatgatttttaaaaaaaaaaaaaagaaaggaaggaaaagaaaaatagaagtgcaattattcgaattattataagccaaaattataagacattattatacaagcttccttcataatattttcatctagattgaccacctactggcctagtgtaaaattgcatatatcactaataaaagcatcaaggtaattgtcagaagatccacccttagcaatggcttgttgacacaaatctctaagttctccagctcttttcctcatctctttccccacatcactttcgaaatccatgaaatttcccacaagctcagcaatctcatctcttgttattatcacattttcatcactacccacctctaccttcaccctcaacccaaccttccactcctcaacaatttccctactattgggaacttggtctaaaaacagaggaaaagtaagcataggaacaccaccaaagacagcttccaaagtagagttccacccacaatgagtccaaaaccccccaatagaaggatgatacaacaccttcaattggtcacaccaaggcaatattaaccccaactcgcctgacctctccttcaaacgaagagcttcagatcgagcaatccacaaaaatctaacaccagcagtccttaacccagcagcgatttcgtccatttgggtactcgaaaccgaaagaaaactgcccaaggagatgtataaaacagacccttttggctgtgaatccagccattgaatataactttgagaagaggaagagttgttgtgttgatcatgaagatctaagtatggaatagctgggccaagtgggtaaactgggaaagaaaattctgatctaagagtgtttattgattgaggttcaagttcatagaatgaagtgaagagaagaaattgagcttttgggacctgagaaatacaatccaatgctagtttcaaaaccttttggtcattttcatggagtactattttcagatcttctatgtcaaaggatgagagttctggtatgctctccaaattcttgtcatcatcactacattctatatcacaaaagaagaatattcagcaaaatagaaaagaataaagcaaaatttacattgttgtataaagatttcacttactggataaaaggtcaggtgggctattactatcttcagagaatttattgaaaaaatgtaacattctgaaaaaagaggcagacatggtccaagacaaggccacaggaatattccttcgtttcccaacattgactccccaaagtacttctatatcagctatgataagactcaacggcgtcgtttcaaggagacgatccaggagctgatcaaaaggagcttccattttagtcatgacagcttcatagaaggctgggaagtcagcggcttttagccgctccggaggtacgacgttgggtatggcagcatagcgaatattgggcggcttgtcatcggagccgatgtagccgagccactcctgggtgacaacaaaggtgatgaggatgtcgtgtttttttgaagctagcaacttgcagaggttcatcatgggattgatgtggcctctgcccggaaagggcatcgccaccacgtggcaactggtggcctgttttggttcgatgcggccgtctgaggtcatcttctttctctaccaattataggtataaactataaaggttcaatttcagattcatataaagaaaaaaaggttggattttcagattatgcttgaagagacattaaaatgaaaaaactaataaatttatttagtttttgtcgagccatattacatgataattttcttttttctaaagattaacgcactcaatatattatatacaatattcaatcactttgtccatagtgaattctgaaaagtatatgggaccactagtaaattaaattatatgagattctatattcagtt

SEQ ID NO: 36005 - DNA, 1373 bp, Cannabis sativa
  modified_base (28)..(33): a, c, t, g, unknown or other
attagaagcttgattatataggtccatnnnnnncacactagttgagataatattagcttgtagactcaattaattggttttaattaatcaatgagaattctaaattcggctatgtcttatttatgaattttcactaagcaagggcataattgagaagaaaagagatttttggatttatttattaattaagatactttataaggtctaattaataaataagttaaatagaaattttatttggtaattaattataattactaaataaatgatttgacatttagatgattaaaattaaaatatgacatttgtgaaagaaaatataagttgttaaataaatggcaatttagtggggttcacaagcaaagccgactacttaagtgattattttagccattttttatgttttttaattccatataatttaaaaccctaaccctaaaggaatcctataaacagaatatgagaggctcataacctgataactcatccttagtctattctgttagataattgaaaataaagaggctcctctcatattttcaaattctctctcttctctctcataaaattcaaaccttatagtgataaagtaccttgcccactcatatcaagtcagtactgaatcatagtgtgaaagattgtgaagaattccaacacttaaaagagatccaggttcagatcttattattactccgcgacaaaaaggagcaaaggttagagatctgaatgaaatgagccatatattctgctgctaccaatgtaaggttttcttgaactttatatgtgtttaatcatagttttagaaaattcatgtttaggatgttatattatagaatataatcaaacatacatgttagtaaatctaggttctggtaaaaaaaaaatatccaaaaactagcctcagagccatagttttgatttactttcatgaaatataaatttaaaacgatgattttgatgatttggatgtgttcatgttggttttgtgcttaattgatgattttttgttaattacaattttttgacaaaaaataatattattttcagactgaaagtattttttttttctgaaaattagatgaaaaattaatcaatttaggctgttacaaaactcgatttgaatttatatttaattagttatgatttttcaaagttagaaaatatcttgcatagggtttcttggtgaggcgcgcgcacacgtggtgatactcggtcttgaccgagcttcagccaagaccgtgtctgagatttcttagacaagggttgtccgaagcagcatcagaccaagctttctcggtcaagtaggctgcacacagtctcatctctcggcaccatcccccatctgcgcgctttcacaattttggaaattttta

SEQ ID NO: 36006 - DNA, 1271 bp, Cannabis sativa
  modified_base (104)..(109): a, c, t, g, unknown or other
aaactaaagataattttatttaaatataacattaataatagggctcgtttcacgagtaattaatattaggtaaattagacatgtatatataataataataatannnnnnataataataataataaagtaaattaatattttttgtcttaactttgacatgtactaaattatgtacttttttaaccgttaaaaattattcctaaactattaagatcgtcaaatttaaagatttttatttaattttagtaaaaaaaaattctaacatagatgaaaattcaggggtattatttagtacatgatttagtagatatcaaagtttggggaacatggtttaatcacggaaacagtaaaattaaatgaaattagacaaaaatccttaaatctaacaaacaagagaatttttaacgatcaaaaaaattcagggaacataatttggtatatgtcaaagttcgagaagaaaaattgctaattagcttaataatagtaggcattttttttttttttaggaagttggttgttatgaattccttaatgaataataatagtagggatttaatttaggagttgtttccattaaaaagaaaagagttagttgctgcacttgttgtactgttgcacttttgcaccagctcattattataaaaaagaaggattgtttaatagaaagaattcaggtccccatgtgttttttacgttgtaatttattttatttttcttttatcatggataacacgtgacaatgatttacatcactgccaactgccacctgttatactgtttgggctcttgtgtgggggtacaacacaacggtacatttaaggataaatgtggtatacattcagtttttacctttataataatcgatagtaatctaataatttttatagaaagttatgccacgagtatttaattatttaacataaattatatacaatgataatataaacaaaaactacacgtgagatatgggcttacaaagctaacatatcggttatgtgaacactttgatagctaatattgtattgacacattattaacatagagaaatattaaacaatattaacagaaataatcgagagaaatattagaaataacagtcgagttgtgatttggatttctcacctgatgtaaaattcaccattaatagtgcagatctgatatcgttcttcaaggcgagctcaaaagaagacgtactcttgaatttagggcgaacatctataactcttgtgtttgttttttctcatctttctttactgttttacttttgatct

SEQ ID NO: 36007 - DNA, 1712 bp, Cannabis sativa
atccattcataaagacgctactagcaaagtcttttatgggtcatataactaatatgggattaagggagatgcatagtttgcttttagggcaagtgggagatttagggtttttacttggaaagcctataaatatatttctgattattaataaagagttgaatattttgatatatgattgaatattaaattattaatatttattattgaataatttacatataaatatcaaaaaaatccttattcatatatgaggttgtgacttttagctatataaaaaattaagatcacttagttatgaataaaacagtcagtaacttattaaaattatagaatctttaatcaatggttgctagtacgattcactgatgctcgttctttagtgtaagtaatctcagttcagattactgatgtaggatgacatttaagtgaaggtgttgtatataatagagattatatatgacaaggaccaatatgaataaaattttctttatctaatgtgtccttaaagacctaattcatatcataatgatgattaatagtatatcggcctaaatcttgagtaatcatgaactcctgtttatgttattagtttctttaatttactcgttaaagtttctcaaaaaagatgattcttacaacttatgttttggaaatctaataatgtggatggctggaaacttgatctataattatggaatcctgactttcctaacggatcgaatgttggtttcctttaagtgttaattctaagattggaaagttgtgcaaaaatttagatgatctaaattgtacttccactagtgaattaatggtactaaaagataaagaagtaattagaatgataaaatagttatttgaccaaaactaattacgaaccaacacatggagagttaatcactggaattgattatatcaatggacaattcactaaaacttagtaaatataattctataattactaagagtccaattccatattcatagtggagtaatcatggaattaataaacaaagattattttgttgatgagactcaataaataatctagtttattgaagcttagaattataggtccatggtccccgaactgccaccattaaacactataaaggaaagagataaaaagtcgtataatgttgctagaaaaatctattttgaattggaaagatagtaattgtttatttttgtaataaataaataaattttcaaattaattaaataaggaaacgccaaaatttgtgaagacaataattgttgagacaaaagttgtctagacaaaagacactatccttgtcctaaataagacaaggtaggcgcctatctccctatgagttttatctttttagtttaattaatataatcagataaatattttaattcaaaaagtagtttaagatattttaaagtagttaatatattctctcaagtgattgagagatttcttcataaatatcagtaatcgaattcggttatagatattatttaaatgattaaattaatatgcatttaaatactataaatagaagcctaatttgagaaataaaaataataattttcaacaactattttcaaaatacccaaggagaaaaaaattatattctctctcaaatatttcttgctcatgtgttgagaattcaacaagaacaaattatatactttatcctaatagcccacattatttcttgtgtgtggtggattaatttggaagacta

SEQ ID NO: 36008 - DNA, 1568 bp, Cannabis sativa
ttttttttaaagtatattctgttaaaccaagaaatgtcgttagatagccacttttaatatataaagatatagtattttataattgtatatttaatcctttaaaataaaaacgatatattatatctaatttcaaaaacaaattcaaatataatatcagtaacttaatatccaaattcaattaattctttattatcttatattatctttacttataaatatcttatccaataaaatatttaattcaaataattaaaagataatctttattttatttaaattttgtttaattgataaaataatcaaaacaatatcaattgggtcttatgagtcactctaaagtagtaggccatattttagagcccaaaattgatttctcagttttgtattttaaataaaatttcttatttacaataaataataattagttaattctcattaatctcttatttaatttagattaaataattattattttctactaaaataataagcttctctctcataatattatttaacaacaatattataaaaaactaattaatataattttatctaataaaattaaatggttaaattctattttaattattcaatttataattgatataattatacaaaatattaatttatttatacaaaactaatatttttcactcaagaattatttctcttagaaattaattctttctcaattcatcttatgaattatatatttccctagatgacgacactagcaacattatttatgagcttgctagggaagaattaggccttctggaaggataagttctttctgcatgtctttatctttatgattttttataagtgttccttatgtttttccatttctatctacaactaagccaatggatgtcatctttgcttccttggatgcactaagccctgcagaaggaaatattgttctgcatgctgacctctcaagggtcattatgactcacaaaggtccaagcacaaaatgagcttcagatctagaggttgtgtacgtggacgatgaggatgagtcaactccattggagagcaagaggaagaatgaggttgatgattctgcgtgtaatatcccaataagcctaatgctaaataattaggatttatatttttattatgggttaatcaagtaataagtgggattatgatcctactaatctatttcaacatgaattttaaatctgttttaagtgaataaataagcgtaatttattaattacggagaattatatagcatgtgtgaatgtaatatgagctatttttggaataaaaatatttcaagtaaataaatggagtattaatgaagactcagagcctatactaatggttgacaacactcatcatggatgaccccaattgcatagtatttagaacaaggtattattccaactgactggaacgaaactaagagatttatgatgagaaaaaaaagtaggtagctcacttccttcatcatcatggacagagtaatgtacaaaagaagcttcttaatgccactcttaggtgtatcacgaaggaagaagctgaactcctcatggtcgaggtacatgagggcttttgtg

SEQ ID NO: 36009 - DNA, 973 bp, Cannabis sativa
atatgtggctgttagaggagattatgatataaaaattgtgctaggtacaataaattactttgatatagtatcaattttaagtattgtgttctaattgtaaaatttgatgtaaaatttaaagtttaattagtgtttttattgaaaatatataaaaaataaattatatttatcattaatttttattatgtaaaataatcaaaataaatgtaaaaggttcatagtttaatgttaaatatatactaataaaatagggatgaattgaaaattatttcttttattacacataagctaaaagcaaaataatttcaattgacaaggatttttttttataatgatttaacatatcaaaagttcggggaatatgatttataaaattagttataaattaaagagtaattaaaaaaaataaaattaaaataaaaattaaaaagtaggtatatagtgtaattctttttaataaaataataaaaattaaagatggttggatccaaattaatcaaactgaatcgattcaatctaattacaaaaaattaaatattcattacaattatattggttattggatgttaatcttaaaatttcattaaaaaatacattactaaattatagttatttatatataataaaaaaatatattttaattatatttttactagctattttttttttttgtatttgtaatatttggttgttttgtatattttttgttttattctattttataatttgatattgttgttgttttagtttttaaatttttggttttattaaatttgtaaagataatatatttaggaaaattctgcaatgcactcctttaaaatggatgtattgatgcacccttatatgttttagcatccgaaatagttatttagtcaaatttgttttcatggtcatgtacgttatagttattttagacatcctacaaaattttaaaaaatttagaaaagtttaacacgtcgaaaactatgttc

SEQ ID NO: 36010 - DNA, 1894 bp, Cannabis sativa
  modified_base (1732)..(1737): a, c, t, g, unknown or other
acacgtatacattatattatttatcccatattaaattaccactacaaaaaattattatttttagtgacaattttttaatcaaaacctaattttttttaactaaatgtgacttttagtcacaacaaaatgttacttgtgactataatgtagtctttagttacaagttgtcactaatatagttttagtcacaacaattattgtgactaaaaatgcatttagtcataataaattatgatttaatttgggactaatacatttagttacggattttttagtcacaatatataggaatgataatttataattagtcacaaattttgttgtgactaaaattataattttttatagtgatatttcattttttgtggtacttataacaattaacagcttaaagtatccaatatcatatacatatatactaagtgtggagacgtacgaggcacttaaccccatcaaagtctgttaattaatcgtatgttttacttttatcaataacggttaaattaaagataatttgatgaaagttcgcttcgtgaaaataaggtatatcatcttatcgtattatttaaatgtaatctatgtaattttcccaaccattatctactaataaaataatacaaaaagattaatatgatatatataagatcatatttagtttgatgcattgaaattttaataaaatcaaaattattgttataatctttgattttcttttaaaagtgatgtaatgagatagaatacaatgtaatagtaattattacattatatattagaatctttattacattaattggaaaagttatgtaatgagaattatatcacaaatattaaaaggtgaattccattttatagactctgtgttttgtaaaaactactgattggaccttctgttttgttaaacgtcaaattgaatcctgcatttttcaaattagtactaaatagtacccctaaattaattttttgtcgaaataaaacttaataataaaataatatagagatgttgttacaaagctaattatattttctttatctgttcatggtaattagaattattttcaagtcagttatattaaaaaaattatctaaaattgagctcaggatcctatttgtactattataaaaatacagggtctattttatcatttaacataacaaagggtccaatcggtaatttttacaaaacacggtgtctaaaataatattaatctaatattaaataaaataaaattaaaaaaggctcaaataccctttttatgtaagaacaaattaaagtggggataattttgtaaattcatcacttattctaatatttattttaacaagaaactaaatatcttaatcaattctcattaccattcttatttcattatattacaattaccattactaatatcattacattccaccaaactaaacaatatcacataagctcgtataaatatctacactattatttactaataataagaagaaaagttataaatgaaaataacaaacaaaattaaaaaaaaaaaaatacatgagaaaaaagattggtaaaaaatgtataaaaaactaaaaatatatattttaaaaaaatggaggacataggaggagagaatttttttctaaaagaaaaaagaaaaaaatatattaaaaaatagtcaaataaaataattaaaaaaaacacatataagaaaaatgaataggtaaaaaaatttcataaaagagttaaaaaatatatatatatatnnnnnntttttttaaaaaaaaaaagagtaaaaaattgttttttaaaaaaaggtaagattttcttttgtctttaaatatatataattgagattaaaaaaaatgtgatttataaaaagaaaaaaaaactacaaaaacaaatcgtttttttatttttatatatata

SEQ ID NO: 36011 - DNA, 1473 bp, Cannabis sativa
tggtaaaataattcccaacagtcttccaggcatattcttcgtttttgtcaaagattaagatacaagtatttttgggaatcaaacaaagccatttggtggcaagaaatcggacctagcgcccaggttgacaccgggtgctgggcctagcgcccaggttgacattttgtcaacctaagccgtttccaatcattttcctgaaaaagtgttccgaacattttttccgtcataaaagataatgaagatataagtaaactcaggaaaaaaatgagaatcctgaagggctgaaaaatgagctaagtgcccaagttgacctagtgctaggcccagcacccaagttgacaatcaacctagtgcgctagtttttgtcaccgaaatgaaacttttgctctgggcattctctctggcatatatctcaaaagctcaaaaaagtgcacccaatgcccaagtttacgtatgacttggtgcgctgggttctgcttatccgattctaattctgtctcaagtgttcatctagtttttcatagtaaacgagagccatgatcactcagacaagtcaaattcacaacttcataaattcactttttcgacaaagtgacttagtcgcaaattaggtagtttcaagtctcatgattttgcaaaacaacaacatctctgataattggtggacaacttcaccagaacaaagaaattggctaagtgatgtcaaaatattatttttttttttttgggaaattcttagtttctttttgtctttggcccttatagaaacaaaaatgggaagcattttgagttttaatttggattgtatactcaactgtccaggaggagttgaggtttgtgtctgtattaaacttttgttaaagttagttttttattttattttaatcttgtgattttcaagaggagtttataatatgtttgtttttactaactttgttttgtaggtatttgttaattaaaaatattttgattatctaaaatgccaaagggagaaattgttaagtcctttttggcaatttagttgacaacatactttttaattaatgtgaatttttattgagcaattaaattgattttattgtgataaattcgtgccctaattgctccatttcttttatggaaagatatattcccaactgtttgtaattgtttaggaagcttttcttacaagagaataaattctctatttggaaagttgtctatttttaggaaactaattgactttctctttttctaattgtcgatatcgattttgccttgattagagcagatcaattaaactttatttggcatgtttgaagtctaaattcatgatcttggttcaatttggaaagttttctttctagtgctgcagagcccgattctgatgctacaaatcagtttaaaatttaagaaagttttgtacagctggaaaatcatttttgtgattgtctttagggttgctatgttctataaataggacatagagagcaa

SEQ ID NO: 36012 - DNA, 4830 bp, Cannabis sativa
agtgaaatgataatttcctttgagattggcttaatagagataaatggaaaagctcttatttcagtaattatattagtttactgaaaatatcaattataggaagctatgtattttaatgataaaatacattgatgggtagaatggtaaatttgtctctactcgatgtaaatcatttatagagaatctttgattatttggattgaaacaatagataattaatgacgtatctatatttagaacatatagagcgttctatgtaattaggagtacaactccaaatctatagtggagtcagtaggaattaataagttagaaaatttacttagtaaatttcgaatctacttattgggagcttggttactgttaacctcgaaaagtggccaaccgagagcggggccgtattaatcttatgtttgccacatgttacacaactagaactcaaaagtaaagaacacaaggatttttatagaggttcgacccccttagttagcgggtaatgagctactccccctttagttgtatagataccgagagataacactattcacatcactataggtgggatctgatatagctctcttaaggttacaaagtaaaaaaatcgaagatgtcaaaactcaagtgttgagagaagcttatgtgggtgtgtgaatgggagagagaaagagagtgctatcatacttagtgtttgacggcttgaataagacttaatgacttagcttttctagggttaagttaagaatctttatataggagagcttaaaccctaatttacaaataaaatgagtagatatttacatattaaattgattaaatacaaaagactaaattttcccttaaacatagatattttccatctacttcattgggtcgttaaggcctaactcccagtccaacttgtagtccacgtgtaaggttgtgcaccagaatcctactaggtctaattctggctgaccaagaacctgcaggcagtaggttggctgaccttgtgctgtccagaggttggtcggccatagggccggttaggggtggccgactagcccccttgaggtgggtggtttgtcacttgtcgtcctgtttgagtgctgagacccttgttggctaaggtgctaacttgacctccttattggtgagttgtactgtcacgtggcgctgatattatttatgtaagcttgtcatgtcaggtgggcgaaaattgggataacaattgtcatggtcaacgttcttgatgtcgtagaaatagcgaaaatcctcgatactaggtttcgcttgcatgtattccatttatttcacatagaattcaagggtggttctataactattgggggtgagttggaatggagaaacatcataatatatcaaaatcactttgacaaaaggaaagaaaccgcgacacaacagcaaatgatggggactaaaaccacagtgatgctagtcggaataattgttgggttggtgaagggtgggtgaggacgttgcatcgacatgggtttcgtacaaccaacattgataaacttcaggtttttggaatgtcgtcaaatcaaacttacttacccatgaaactaaatcctcttctgagattcatccgcgaatgctccaccctcagattcgaatgtctgattgtccgaaagattgctcatctaaaagatagaagatctcttcaacatattgtgagtgcaatttaaggaggagtttccttgcacgtataactatttcaaaatgaataaaaatgtcaataaaaataacaaaactaacgccaaagaaaacaaagtggtttggtatttcacagtgatttaatgtttgtgtagttgaataaaaatttgatcactgtgaaacacccaaccacttggtgaataattcaaactctattagtctgagatcataatttggtatatgcgaatactcaatgtgttctaactaaaagtgtgaatattcaaagttcatgacaaagaagatgcgagcattcaagtaacatgcaaaacttttccaaaaaaattccccttactcccttattcttgttagagtttcattgcccaaaatatatcccactgttttcatgcaaaatctacccgaaaaacccaaaaggcatgcgattattcaaagaaaacacattaaatagaggaagtttttagaaaagaaccaacctttaatctagaagcttgttcttctaagctcgattatcacttcggaagacccttcgaactttgaaacaatcttcagcaaaaggaattgaagttttgaaaaaggtttctcttgaagttttagagagaaaagtttcaatggaaactaaaaagaggagggaaagtgaagtgaatcaattcgtatcctagaggtttaaatacgaatcagtcccatccgttcccatctgttaggatcttaacatgtggcattcgaaaaccaaaggttacccaatccaacaattgtctcaaaacatgcctgcacgaaccccaaagggttagatgacatggcatcttgggaaaataaagtaataaatacaactgtcatttcaaaattctcgacaagacagccaaaggtcactgtcttctgacagagcaactcgcttgtcccttgtgtataattttgttatttgacaagcggttgtcatcgcaaactaggggcaaagacgtgtcaataaatagctctagtagagctatcctcgcttgatgtgaacttacgagaagatgagaagatgcgatcgagatagggtcttgtcactactatgccccgcatagtcaaagaataggtaggaccgagaaaaattaatactgatcgcgcatgtactgattatatgtgatgaccaagtatatttctcttgcgatgagtaaagatcgtctatttacataggtttggttcaaatgactagtgtgttcaacaactcgtcaaggactcgcatgtcccaagttgtcaatgcatatattgtttgactatgcaatcaaaattgaacatagacatttaacgaaataagcccaaaggccccatcttgtgagtacaacaccatagagcctgcgagctcgtgtgtatggaatatgaatagacaagttgcgacttatcaagtcgcatatgttgttgcaattaattcaagaatggacgaaactattcttcattcatttttcaaacatttatttagatttaatactgtcatttattgtaaaaacagtattaaactgatcagttatgtaatcttaaatgacacttgctttctatataaaagggtgatccaaattaaataaactaagctaaaaattattaccaaaagttgactaagcagaccaagctctgactgaaccactataattctcctgtttctctttatttctactttcgttttgtctatccagtagcctatactttgagtactcgctactttaagtaagtgcttgcatatttgcttttgaatgttctaactttatttgaatactcacacaaatttagtgttgtctaaattcttctgacaacatctacaaactccaaatttcaatattatacattcaagacgcttacatctcgagaaaatacaaaaaaaaaaagaatataaatatatatgacatatttatggtagaaccattcttttgttcataggtgggaaagtttttgtaaccataaataatccatctaatagtcataaagagatattgtataataataatagttagaaaatatgctctatcagataattttctatattgttttaataatatttaataaataaatatctttctatatataaaaataattaaatattatactttctcttgttttttttttatttatacacgatggtatggtactatacacattttttatgtaaagtttcaagaagaaaaactgtaatggttatatattagatttgtgcttttgggtaaaccataatgaagcatggaccctgcaatattgatgtatattattcttatttcatgttagaaagagataatgtttctttcatcttgttctccttttagaaagataagctcattttatctccagctcaaatcaactgtacttgcttttcaatattgtttggttcaattgcattagacaactcaaggatacgaaaagtactaaaccaaagaatataaatataaataataatgataaaaaaaaagtgtttagaagatggcttctcaatctctattgctgagaatctactcatttaaaattttaatatgcattttttttttaaaaaatattttatataaaagtttcagtagattgcttgttttttattttctttttaggtttgtcaatatttttaatacacatgtcccattttttttttcaatcccatacaatcaatcaagtatacattagggaacattaagggttaataaaatgtcccatgaagataatataaggataccgtaggacctgtaacttttacctcatattatataggaaaaggaaatagaccaatcacaaaataagaaattctaattgttggaaattgttgtgctccaataaaaataacaaaccaacaagattacaactctatgacaaataatataaaggacaaaatcataaattaaataatgttacaacactaaataaaatatacacataaaatagagaatataaggagatgaagtgacggattacaactcaaagcaataaactacatataaacacaatatataaatagtataaatataaaagagatgtgagagcaatctcaacaccacatacaccacaagtgtataataggggaatcaaaacttgaacaaggtcttacacctttatccaaaaacttattatcccctaccacaattactaagagaaaagaaaaaaaaaaagaataaaaatagctttctggatttatcaagcctaaagtgtttc

SEQ ID NO: 36013 - DNA, 2939 bp, Cannabis sativa
ggattttgggcgtggaaaaattttgccagcatgtgtactgcaaaatactcgattttcaaaaattttaaaattcagaaaataaaatggtttttgatgtctatatctatctacgatgacagccataaagatcaaaaccttaatcgcatcatagaacaaatacatgcaaaacttataacagtaaacccagaaaacacggttcacagatgaaggaacaatatacctactatcgaaagcggagatgtcaaggtaatcgtcgttgggtctggttggggaagtcgattgcacctttcacgaagacaagatgctaaagtgatcaacgaattattttctacgttgaaatttaggtttgcgatttctcatgctgtaaaagtcttgatcactgggggttgatgatgtgggaattctcgtgccctaatcatcaacaacagactaaggcaaaatcaacagcatgttccatattgtagaagacgactcatttctaaatttgggttcaaactcaaaggatgcagtatgagctttgaagggtaaaatttggaaacgagagaaaagtggtaactagagttcacaaaaggtatttatacctaaaaagagcaatccacgtgaaagaagacggatggtccacaatctagtccccagaaacacaagtttcatctaactgccaaggagttccaaaatccacgtgcatctctacaattaattctcccccaagattgaggcacaaatcaatgatgaatattccatcttttgattttcgttccaaaaagtgaacagtcgtcacaagatagtcgtttctagaaagcgactcctcgatagtcgcacccttccaccatcatgtgattgacacgtggatgtactacaatgaaagacggaagccaactttcgtaattgagaagcacctaaaaattcatgattttatccctcaacctccacatatccatattgaaggagtgaaggaagcttccactatacgaaacattccggaagcttgggggtaaattttatctgcgtttctagcaatggacacatggaatctaggtcagcatctaagacccatcagtgagtccctcaacgaagataaagtggggcaagcccatttggacaagtccttctaggaacgtctcccatttccgtgaccatagagcttctgccattggcgaatcattcccagaagcaagtctggtaccatgagactggaggggtgagacaaagtgttcttggaagactctttaaatttccttttttattcttgcgcacaaataaagaaacaactgctgccaaatatctcgacagagcatcgtactaagttaaatggggaaacttcctcaaatgaatatcaagcaattaattcacagttaatttccctcaatcaaagcacacggtgttgaccaaatcaagtcaaatccgatctgcctagtcagcaaattctctccttcgtgggctagacttcactaggcagttcaagtttgttatccaatgtaaactccccaacagaggaaaaaaagaaactaaatgtaattttcaaactactataaatacccatcaaatcctatagattaaggttgaattgtcttgcaaagcttgttgaggcaaacttgagaacatatattctttgtattcctaaaggtttttcaagctaaagaacaactgaataacactgactcatggactaaggttgattaacgacctaaccacgtaaacaattatttgtctcttcttactttttctattttagttattttatttctttcagttctaattaattaattttttttttctgaaaatcttgataaacacaagcatatatcaaaatgttcaacttttatttataaatagaaatgtctttatatatttttcaggacataaaccctaacacttaattgttcttagagtaataccatcaaagggggcgtaggttaatgccaaaaacttaagatttaacctctataaattttcttgtgtcgtttactgtttattgaatttattgtcattattttatagcttcacaaacactttgttgtaaatcttgattccgcatctttagttaaaaattgagtcaacacataggatcaagccgctaacgtatacgtttcgtttgttagctacatgagataaattcaactaaaatcctatatttataaactagaataattagtttggaaaacaaattaagtacgttagcatctgaccttattattaaagaagggtgcaacctatcttattaataacaagaagaaatgagtgagataggcgacatgtagcttgattccaagctggcttagcagcaaggaatcaagagatctttgcccatgtcgacttgtatctcaagtgacggaataaagcggccaattccggttgaccaaaaatattcaaaagacataatttaactattaaaaaaaaaagaagacataatttagtggtggtaataagttggggtaaaaaacaaaagaactgtaataatttacatgtctcatgacgtaaagataattttactttgtattagttagtataaatcatagatgtaacggtaaaaagtattcacaggcaaatttttatttcgaaataaaaaaaacttctggaaagctcctctgaagaagagtgcgacctagggttcgaagtgtagtgtcgtcgatgttgctgttttcgtcatcgtcgttcatcggcgttacagtccgtcctttgcccctccaatcaagtgacggttcctcctatcacctccagatgccgtttgctgccatcagacggaacccaacatttaatttctttgtcatctccttcacaggtaaccttctaatctgccattactcttgtgttgctgtcccatctgagattaattcctttctgcatcccttttccatttcttcaatacttacttataaaggaaacccctctctcgaattagcattaaggaaaaccaaacatcctgaaccaccctgggcaat

SEQ ID NO: 36014 - DNA, 2608 bp, Cannabis sativa
  modified_base (244)..(250): a, c, t, g, unknown or other
  modified_base (373)..(375): a, c, t, g, unknown or other
  modified_base (424)..(445): a, c, t, g, unknown or other
  modified_base (609)..(616): a, c, t, g, unknown or other
agtcgacagactcagtaagaaaagcataaacaataacatagcaataacttggattatgatccgatgcccgtacccccaatcataaccctatccccgtgacctgcacggtactgagtctagaacgttcgtacgacagtactaatgaccataatatcagcctatactcggtatgctagtcatactccagccaaactaatgtgatactgtcaagtagtacgctactatcgaccataatatcagcctnnnnnnngtacgctagtcatactctaggcatattgatgtgatactgtcgaatagtacaaaagccaacatacatatctaatgcaatctaacaggcttactaacatgcacactaaacatgtaaatacatatnnntactgttatactaatcttacctcatttctgaattcaggtgtgccggccnnnnnnnnnnnnnnnnnnnnnnggcgaattacaggctcctaaatccatcaattataacataagtaagtgacacgctaaatcactttccggggactgaaacttgaaactaaaagtttccctatcgataaacaacatataccctaaacatcacaaaaatgggaaaaactagggttcccaaaactgccnnnnnnnntagaccggttcccaaccggaattttagttctgcagggtttcctgaggaccaaccggaattccggttcctacaggtccccctgaatcggaattccaattcagtgtaggaaagtttcaaactttcatatctcactcaaaataaccccaaatcaaattaaaccttccagacctgctctatctatcccaaagaacataaacaaggaaacaaaacacatcaacatgcacagaaccaaaacatgccattaaagaccaaagtttgagttctcaaactttgtctaacaactaaatcaagccaccaactagcttccaaacaactcaaataataatatcaacctcagaatataatcccaacaacaagaattaccacagaacctaaccattagaaaaatcataaagcatataacttgaaacttaagaagaacaacaaagaatgagctagaaccttaccttgagttagaaatcactaagagtttgctagaaatccttgaattcagcagcaaaacccccaaccctaaatggttctagggagctcgagagaaagagagagagtttggagagaacaaatgcttcttcttttgtcttaagttctaatttggataaaagaaataaatctaatgtattaacctaatttaactaaagttatattcagcattataaaactgatctaaagttcacaaaaggacaaagtactaaatggtcaaaaagaccactttgccccaaccaaaaccaaaagcttctaaaccacttagggatattttggtctaatctaaaatctcaactaatcccgacattcccaatgtctagctatactgccccgctatactaaaaattctaggatgtaattctaatagccaaatatcgcgttccaatgttgccgagcacaaaacatgtaaaaatattaaatttctatatatgacatataaaatgtattttgaattcaaataaatcatcgtaaattaataattcaatattaataagtaattttcatacttaaacaatttaaattaaagctaagcagtctttaccaaaaagggcgaaaaatccttaagagaaaaagccctataattatatcagaaatatctaattagactcgtggactatgcagaattttaactgcaaaatcacgtaaaaagctttgtgttctttattttttctttattgctattattttctgtccatcacgatttaggttttaatatagttaacgaaaatctacgttaacatcactctaagatctctctaattagtattatttgttctctccttaattctcttatttttataatttttaattatattaattgactcgttaattattaattaattaataaaatatttataaatattaaaaggagattaacggaccgtaactaccattgaaaacaaaattgtagcgaactattttttttttaaaattaagatatttaaaaaaattcaaattattacacaattatcccaaaaaaaatgatcatttcacttaaaaaaaaaattaaaatacttaaaaatatatatttatatataagctaaattattatagttcaatttactgtttaattttttttaattttatttctctcttattccctcatgattggagttatttttttcttaccggcttaaatagtgatacaaatagttagaagataaatttacattaaagtttgtagaatgtgagagtcacttaatattaagtaataattttattcatactttttcctctctttaatttttttttattaattattcaatacttaatttgtctatcatttatcctatagaaaaatctaatgcatacataataataaaaaaaatagttcttaagtttaagaatctgttgagtgaaggttttttataccgtctataaaatttagaaattttggcaactacaggtgaatacataccactttcaaatgataataaattttatttttgattacaacttcagtgaagagactagaagaataaataattagcattcggatcaattggtttt

SEQ ID NO: 36015 - DNA, 1876 bp, Cannabis sativa
tatatataatttaaaatattttacatatctgccgcgaagcgcggcatgtttattagttaaaatataaaggagcagaaaagaaaaatacagtgaagtgcttaatatctttgcttgatgctcctgtatataatatataagtttgattaggttatttttgtaaattattgtagactcttttttttgcaaggaattattctagactttgaaactatcattattattttatggataaatactagtttaaatcttgtgttttgtaaaattattaattgaaccctctattttttaaaatagtataaaataatactctgagatgatttttaaaataaaatttaataataattgatcttagagattttattacaatggaacaaaattatgacattaaaattctattgcaatataatacaaggactaaaagattgattaaaaaaatgttacaacaacactacactacactacatgagcattgctattgggcaccagtggtgcctaacactcttaagacgtgtcgccttgcgattggctagcgatactccctaagggctattatattaaactatatgggacccaatattaaattagaccaacatcgatattgatacgtaggagggtgcttagtaccattggtacattttagcatttctctacactacatatataataaaggtagaaaaagaaaacctcaacacatgtattataacacacattctctctctcttacacacacaaacatatatattatatgaataagtagagaaacactcactcacaacctttagtgtagattagtcggatcactatgatttgaacaagatattatcacctttgcccaaaaatttatttttcctatttttaagcactaagaggactccatgaaaatagttttgggaattattacaagacttgtgttttcaacaaatacttgttgatagaaaacttagttacccaaatgaacatattagactcatttttatagtatttaggtgatcacacttagaattcacacacatcatacctcatggttgttataggcacataaattggtgtaaaatagattaaagaaaatttagtggttacatgaaagctgaaacgaatcctcgctcaaagaacatttttttaatttttacacctcaaggtgacatgtggtttgttccagtttcaacacaataaaaattgtgttttgtaacctcctttgaaccaaattaaacccaatcgttttgtacttcattttacttatataaatgagtattaatccattttataacaattatatttcatactttttaatctcatcatcaattttgtataacaattcttttattacactaattgtataatcaaaaaaagatttacaagtgacaataaattgtaactcctctcaaattacaatatgtaagttacaaagtgtaaattaaatacataggttacacattttatgtactatacacttaacatatattattcatataacatatatatatatagtagaacctctgtaacatcttaacaattaggcacgctatgatttccaataatcaaaacctaatcccgctaaaccggaattacaagaaataagagcgaaaaaattttaattttaaaatacttacagaataaaaattaaacttgtaattatttaaactttccaaatcattccaaaaagatttcttacgttttgggatcccataaaattttttacaaaattttacaagtcgttttacatgttgtcctaagcgacaaaatcgagaatacaaaatgcagtagctggtagacccgacccgcatggtctagtatggcccgaacatgtacaatccaccgccaagccctcgaactcatggctgatcacaaacaactttaccctttcctgaacagtaga

SEQ ID NO: 36016 - DNA, 5929 bp, Cannabis sativa
  modified_base (721)..(730): a, c, t, g, unknown or other
cacaagacacacaaatggcaaatacaaacaaattttaaataggggcgaaaccaaaaagaaactaaaatcaaactttataccgaagaagagctccatcttgttcatttttttagcatcatcttgaggaattttttcatgggcagccacctttgatttcttctttagaggagctcgcccacgtttcgacaatagaagagcaaaatcagagtcatcctcctcaacaacaggttgtttacccttgtttctattagctaaagatttcaacccaattttagaacttttttattgaacaggggaaggagttgatgaagaacgagttacaaccatatttatatatggattaagagaaaataaaaaaaggaaaaacggttatgggattcgattaatgggagttgaaaaaaaatttaaagaacaaaaagaagagggaaaatggagttgggatcatggagaaggaagtgttcagctatggaagttactattttaaaaaaaaaaaaaatgaaaagaaatggaaaataaaaggaaaaagaagagaaaaaggaggaaaatgatatatagagggattgatgtaatacatcaattactgatgtgttaaaaaagttaaattgtgtgcatgtagtaaaaatgtaataaatttaagaaaatgtgtacaaatgttaaattaacggtgtggtggtatatatataataaaattagcattttatatttttggtgtaaaaatttnnnnnnnnnnttttcttttttttttttaaattatctcattatttaattaatagaaaaacatatatatttttttttttcagttcttattttactggtggctacaaccataacaatatcacacctcgtggtgtggtgttaacgagctcactattagtactttttagcatttctcgaataaaaaatcttgaaagccagaaagagtaataaaacaagaattcaaccgtaaaagagaacccttcttttattatttagtataagagttaataaagcaattaaaacaagaattacaataagcttttaagttaatcacaagattacctattacaatacaactagtaataatataatcacagaacaagatccttaaatgagagaagaagaagatgacctttttataaccaccattttcactcattcattttcctattacacatcatcataataataataaataaattaataatgaaaaagaaacatctcatctcatcttttgctatgcccataaatattaattacaacaataactgatctcaaggatgagcttcttttcctcacaacaacaatttttgggggaaaagaagttttgcatacatggctgatatatataatacctactaaataatacttttaactaaattatatatcaacagaagaagctaacctatctccattgatttgatggactactctttttttttttcttgactgtatggtatttgatgatttaggagatcagaatccaacaacaatatgctattctttttttctctctccgtctggacatttttttttcttttctttttctgtttctttcggtcttgtttcctaccacagccaagaccgaactcttcgtagaatacgtggtggtctttgcttctcttctattggtatgattttttccattagctgcagcaaaatagaaaaacacagcatatcagttgttgattattctttattccttatattttgacctcgatcggaatactgctaaattttcttatgtattctaattttttagataccgcatcactcaaacaaaagaagtaataaaaagactaccaagtacctaacaatgttcatggctggaaacaattgacccaaaagaaatacttgtctagtcctgctaatcctatatcaaacccgaaatgaatatataaataccaagcacatgtcttccagccccttaatgtcaaataagcacctcatcaacaacaaaagctagtttgctataactaatgacaagtgaactttgtctgtctacagcacacaagtattagaggaattctaaagttctacccacctcacgaaagcattgactatactagtttaaatttgtaattgtttgcccatttcaacaatagaaaagtaataaactggatgcttcaccactaatttcatttgaaaaatcgttcaaagcatagacataaatttcaagcttaattgtttttattattccttgaatcagtattattcttactcttatttgttttattgttccttgaggatcagtataattaaatcgaacaagaaatttacgaacaaatttttcttctacaatggatataaagttactacgaggttggatcagaagtgtaataagtacctgcttaaacctttccttagttctctcagcctgcataaaaggaaaagttctgtgagaaaaaagatgtaatatctttggtttaggctgataaatagaaaattgtgatcaaagaaaagaaaacatacacatacacccactgaaaaatttatacacaataatgcttctttgagtaatcccattcccagatactaaataaataatctagattttactacctgcatcgctactgtgactaatctcatacagatactacagaatttagttaatacccaaaacaagttaaaaatacaagtgttaattccatcatcaagaattatacagtaagtaatgggaacgcacagaaaatagataatacgtgtaactctaaatatgagattttgtaagctgtaaaaagcaaacatacacaactcaaaaataaaactgtaaggaaatccatatgtactaagcaaatcatagataattcatacaaacatgtagataaaataaatagatataagtgtgtctaacttatgtggtggctcagcaattgcttacatattcaatacgttaaactccaaggaacattttgcgttaaaaattttgaacttcaagcatcataatcccaaaaaaggatcagttagtaaaaacttaaattaagtactaacgtttctactaatcttaatcttatttgatgcccattagaaaggcaaaatgctgtcacaaacatcaaaatttccccaattcgactaataatctatcatatgatcaataaaattttgacccaaaactgaagtcataagagattccagaactgaaagccaaaaaagtgcagtaccttctctttgagcaaccgatcgttctcctcctcaagttttactgctaatgtttccaattcaacctggtatgcctgcaaaattcaaaacccatcataaaaattcagccacataaacagattaagaagaaaaatttccatttctgccagattcaatcaaatcaaattcacctgtttcctttctctggaccttgcagccgactctcgattcttgatcattcgtctctgtctctgttgcgcagccttatccaacggttccaaaacgttccgccctctcttccctcttcctccaccaccacctccaccgatcacctcaacaccatttccaaaaccaattatcgaaccctcaacattgtccaacgcctgcaacggactaggcgggatcgaatcgaaagcaaatagtccaccactcaacctctctgttatcggagcaggaagagacttcacatcctcatcctcaacagaagcgatcccagttttggcaagtaaaaagtcttcaagcgtcatcaccatatcctgctcctcctctttacactccttcctatctccagacacgatctcccgccacacttcatcaacagtcttaggagcactagatgagccaatgctgccggaattcaaatctccaggagccactgccaccgcagcagcagaaatggaggttgtcggagtcgggtcgatcagagtaatttgtgcatctaaaagagtagactcagcagtgatagctgaggcttcagtgcgaaggtagccatcgacggtcatcgagtccaaagaggatttaacagtgcgatcaccaccgttaattttagattgttgatcagagatcgataatttgggtcttctaacagctgaagaagaagcagaagatgattttcgagagagatccgagtttctcgaatttgacgacgccaataccttggacgacgccatagccaaattgttagggctttttcttgaactttctctctctagaacccaaccaacactctcgattttctctctctagggtttggtgaagttaggatttgggcttttttttttctttcaataattactaattaatttaatttaataataaaatttagaaaagaaaatcagttaagagattgggatcggagaaaaaaaaaataaataaaaaggaaataaatgaataaagaactggtcttagtactgacccagtgaccacctgagtttctgcaataattcgaaaatttgtggaaatgaccaaaaaaaaaaaaaaaacagtttcgaaaatgagaaatggaataaccgggtgaaccggttgcaggttgaagcttttgactttgactatgttatggacggctgtgatgagagaaatattccgtactaataatgattattttgatagtaagtccaacgagaagagtacacaatgttattaggcataactctccaacactaaatatgcacatcattacttaaaggaaatttttacatcaaaaatataaaatgataattttattacttaaatattactacacggtaaactaaatatttatatcattcatctttattttattactattttatcacatgcacactcttcccatgcatcaaacatgtgtgtgaccactatcaatcaatcaatcaaccatccattatttccctttcttttttttttcttctttttccttttattttccatttcttttgagttttttttttctttaaaatttagtaacctccattacactcttctcatgcatcaaacatgtgtgtgactagggctgatcatataacccggtgggccgaccaacccggccgacccacaccgaaaaatgggtcgaacaaccctttctgtaatgggccgaagttgaaatgggttaaatataagtcaacccgtctatattgggtcagaatcggcctggtctatttttggcccaataaacccaatccgggccgatccttctttcacatatatatttttttttatttttttatacactgaaaaaacctagatataaaaactaactgtctcactttctttaaccctaaacctagccgctctaactcctcaccttctctactgttcttttctctctattaggtaaaaaaaaatcgcactcctccctcaatcctcatctatcatcggtagtaccaccaccaagtcctcgttattttcttcgtcaatcaccactatgaccacttccttctatagtcaccaccgcgatcactgcttccattagtcgttgccactaccattttccttagccggccgccacctagaacaacaaggaagtgcaccactatgctcgcgcctggcagcaagaaattatctccatgtgagttgttctttttcattttttgctaaaaaaatccccattctgaaatgtggtattttttttctaaggttttattagttcatagtgtgatcttctttcatatatatttattttacctttttataatatcagatttgattttgagtgtagtattattgtgagagaatattattttgatgagattaaactataatatttttgagattacacaaacagtatattagaaatgtcttctcattcttttgttttttctttaatgtttttatttttttttctcctcatatttcataaataatgtgtatttatttacatatttatataatatttctcattaaatattgtagcataaatcattagaaatcagtagcacaaacttggccaaggtaatttcaaagctctttttgttatttatgaaaatatttattatatatgtgttttgtgtaagatttaatgtactatatggttattttgttattatttttaatattagtt

SEQ ID NO: 36017 - DNA, 1267 bp, Cannabis sativa
tgggaaaaatgaaacaaaatagctctataaatgtaaaatgcttttcctaagaattctttgaaacaatgttataatgataacaaatgttcaattaccaatctacgtggtttagtttaaggaacggcatctttagacaagcaaatgacacatcgtttcatcgaaggtccaatatgtcttttaaacatataaagatcaaaacgcatgtctttctacttggacgacaaacaaaatattatatgagctattaaacgacacaaacttcactctattagtcgttttaccatctacagcaaacattcaaaaagcaaataccatgtcgtttacgaatagcctataaaaacgacagtttttaaaattcgaaggagctatcgtttttcattcgaagtttgttttttgagacttgaattatttctaattctaccataacaaaacacagttagcaaattgggcccagttcagtagcactgtagacttgttgaactagctattctaagtgtaaaactgtggtgattatttaataatcaatattggcaattggtaactattctatcttgtcataattaattagcttggtggttaagataatgacatataatgccacccactactctaacaagtagtgacttttgttggttggttattaaacatcttacttttgacattttttaaaaataaaaattctcatctgtaagaagagaaataaaataaaaataatcatcatctatcagacccattctttatatttgtccaccactgtattgtgttggaccaaagttacaagagcaggcttcaatatatttttcgctatcatgtttaattaattattttatacactttaaatttttttatatatatatttttagaaattataaatataaaccaaaccttaactttaagtatttagctatccaataaagtttaagtaatggggtaaatgctgtgtattggatagttaaatttataaaaaaagaaaggtgggggggacttgtgtttctgttttgtcccgctcatgtgtgagccttaatcccatatatgattttggtgtaattaattttatatatataaaaaaacattattatctatatcatgtctagttacttagataagaaacttagtgttaatagaagataaatttgtgactattttccattcaataattcaaatcaattcggccaagtgctaacctcaaatatgatctgacatgttgatttctttcttgtatttttttttttaggaataattacgtaaggcactattttttgtaaaa

SEQ ID NO: 36018 - DNA, 2428 bp, Cannabis sativa
tagagctaaaaattcgcataaccgtttgttattcttatctttaaggtaatggacactgacgtgggggaggagcgtcttgctagaggcatctcgctttgtacatatgacttggtttattcatatgccttccagcactggcatgagcaccagtgtactgagcaaacttcagaactgctctttgaccattaggtcttgcaggttggataatcatgtcctctgtgctcccaagctattacacttagttatataatattggattatacgctaagtatttcaacaaccaattcgcctcgtcaatacttccctacatgttgcgaggtatatgtctcactatgcattgtccgtagttccctcgggattatgccttctgaggcaggatagtttctcgtcaatacacaaattaatagtttgtgtatccttgtctcgccgaagactatttagtcagcgagttatgaatatactttattaattctatatttaatgagttattccattttgtatttaatggcataatcgttattatatctggtggttcatatttcattagttcgacacgtgtcactctctgaagtacagctgaatttcaggtataacaacaagtaaaaaatgtaatacatattttttttaaaaaaataaaatgttattttaaatttcagtacgaattttagttagcgcaccctcacactatagaattctgactttcctaatggatcgaatgctagtttcctttaagtgttaattcttgaactagaatgttgtgcacaaatttagatgaaatctatacttctactagttaattgatgaatggtaaaacggtaatttgactaaaactaattacgaactaatgctaatcactagacactacagttaaaatcatgactaaatataattttataattattaagagttcaattctatatttatagtggagtaatcatggaattaataaacaagtattatttggttgatgagactcaataaataatttaatttattagaccttaaaatcataggttcatggaccttgaattgttgccttaaaatactttgtataaagatgttcaaaaaaaatctactttgaattggcaaaataataattatttatttttgtaataaataaataatttttaaattatttaaataagaaaaagacaaatattattgaaacaaaatttgtgaggacaaaagataaaattttaaggttgttgagatattttttccataaaaacaatcttatacacttattagaggtatattttaaacttgctactttattatttggatttaatatacaaatttaaagatttattaaaatatggtacaataataatcagatgacataaaaccgtaatttatttagtaccataaaatcaacagacatgctactgaatgtgtaattcaacatcaggggtctcatgtattttgatttaataaataacataataaccacccacaacacaccacatggctaagatgttgagcaccttatacctaaatagtaaatagcaacgcttatattatatttatatggagtggtggcggtggacctcttaattggggtggagaagtgtcattattggtggtggagcccgtccaaaaccgtcgtcctcacgcaccaaaagtgtggcataattcatcggctgaagtcattcgtgaaagctgggttgcacaggacccatgtttttgggacaaatctctttcttatttcttttaatttaaattacgctatttggtaataaaatacgaaacttgctaataaaagtcaccagtatgggctgaagtcattgaaaattttgtcatttaatcaaataaacaaaagctgtgatattcactgatttcgttctccaaacgagagaacaactgtcatttgatgtgtcaaccgatctgtatgcctaacatatcgcttccggcttcctcacttttaattaccactttgccgtcaacaacaacaaaataatttacatatatagcccattaccaaataaaatgaccatcgtctctcatctttaaaaaaaattacaatttacgtcagttccatatgtaatagattcaattaaaaatacttaaattatttgaaacttgtattagcataaatacttgaataatttgaaaattttaattagcatagatttctcaaaaacttttatgaaaaataatttaacaatgagtttttagcagctaaaatttctcaactattatttaacttgcatttaatcctttaaacttatattttaacaggaaaattttccaaactactaacccagtagcaaatttaaagtgtcattaagttaaatgtcaccatagattgcttatacatatagtatttttgtatatgtgatatatttatattggtacactgaatattataatttaaaaattattttcaaaatttcttttaaaattaaataaaaatttaaaaatttaaaaa

SEQ ID NO: 36019 - DNA, 1018 bp, Cannabis sativa
  modified_base (463)..(468): a, c, t, g, unknown or other
agtattggaaagatccacttggtcaactttaacgaacaaatcaaggaacacgaataatacatttaagcagaacttaaccatcttaggattaagatctattgacctaagatcaactaagtgatattgaattagaaagatataacagtaaatttatgatatcttatctaatatcaatatcggtcaagtccgatgtatactccatacatccgatactaacatactttgccaatatcctgaaaatgacataccacttatctaaggtgtaagtaaaatttatctctaattatcatgtaagtataaattcattgtactgacaaatcagaggacttaatactttgaagcatataatcacaatcactttttagtgtgatggcatcactgtaattgtaaataactatatgttctagatttaatagaatttatacattaaacatataattatgaaagtaatcatgtgaaccannnnnnataaaatgatttctgatcttttattaattagtaaatcaaattatattaaaatcaattttatttaggacataaaatttcaacatccaaaggttagcctgacctcgcagtcactttttagcaatgcacaccgcttagtaaaatggtcataactctatcaatttttatccaaatgacacgattcaagtgcaattaaagctattttcaagatggatctaattaagtgtgtatcatacctccaccacaatattccaaagtttcgagtctcaaaattgactcgcgagttcgtgcaagatttttcagcgactttcatgagaatttttatttttatttttattgtaagttagttggaacttcgtctctataaaaggagagctccaataactcattatccacactttccattctctctacaaggacagggtttctctctcttcacacattatctcttaaaaaactgtgaagtgaggttagattgtcatttatttttcttgagttttcttgtaaggcacttattatttgtgataataaaagcttgaggtagacgtagctt

SEQ ID NO: 36020 - DNA, 1526 bp, Cannabis sativa
taatcaacatagtacttattgtcatctcaatgaccattgttttgtatcaaaatttgcagaggttccatacatgaaactagcgtattaattttttaatattgttaaacgactattttaatacacgagaacaacatataaacaactgttccataacagtgatcaatatatgaccttaaatgtatcactattttttcaaatgtgaattatttgcaccaatttatttagatcaactaatttttggtatgaatttgctttgatctgcttcaaaaacactaaataacaacctattatgaagaaaaatatttaaagtattggtaccttatatatatttttttttttttcagattcttccaagttgttcttgggtaaggtctgaatctccttctgggttgttatcaaattctctacataatagaattcgaattattattttggtttgttattgtgtgatttcaaattaatagaggttgtaatcttcttctttttttttttttttggtttaccttttgattttaaattttccaggattattttgttttgttgttgagatcttcattgcgcccttttcatttctacgatttttttggacttgaaatcgtgccttagttgagaacgaaaatggaggaaatatagaagctttggtatagctggaaatagaggagaaggagagatgaagatgggggctgttttgtttcagtccgtatatttgaaaaataaagtttataatttccttttttgtttattttttcttaataagataaaaatgtaaattttggacctagaaagtctattaaagaaaaaatccctacttttaatccatccccttcatcattctaatctataatttaaatatacgtttattttttaatcataaaaaaaaagtaaaatttacattttaaaaaaataaaaatatgttttacaatcacttttacttttaaagtttaaaaataaaaaacaaaaaatgtgttctataatttttatttttattttatttaagttaagtgtaggattagattttaattgggtcgtggtccgtctgggattgaggttgagatcggagtttgggtctcaaggtccagattagaattaaaagctaaaatattgattataaaagctatttaaaaaaaaattaaaggtaatttctttttgtttttaaaatttgttaaatttttattttcaattaaaaaattgtaaaataaaaatagttttatagaacgtgttttaaaaaatattttcacttttttaattaaaaattgattgaaaaagtattactagctttaatatttcttacaactataacttgcgaaaaaaaatactatcggtgtccaatgccttatgaaaaatagcattactttaaggactagtgttatctaacactatttagagatatcatcttgttattgattagtctacaaaatttattatattaaactagggaactaagccgcgcttcgcgcggtattccctaatattttttatttttttttttagtattaattcaatgatataatataaaatatgatatt

SEQ ID NO: 36021 - DNA, 1377 bp, Cannabis sativa
  modified_base (215)..(245): a, c, t, g, unknown or other
tttatatgtaaggagggtttttttcgatcttttttacgaaggctctcaatgaaagtactaaactgttaacgtgaattttcgttaactagatatgagccgtaaaggtgataaacttgcacaaaaaattaaaaaatagtttaggaaaaagtatgaacacaaaggtttttttacgtggttttgcagttaaaatattgcatagtccacgagtcaatctnnnnnnnnnnnnnnnnnnnnnnnnnnnnnnnttctcttatgaatttttcgtcccttttttcagtccaacttgcctctatttataatttcagagttgattgatatctttacaacaattatcccctgaaatcgtggggtttgattacatatcacgtaaaataaatgcagttaatatttgaatatcacatagctgtgattaatccgcttttactgggtcaaagtaaacgtgtattaaacacgttataaatcataacatttagggatgtctcgataggaactcactaccaatggccttgatagcaagctggagcttttcccatatcgttctgaggttgataatgttaatctcgtcgcttttactctaaagtcataacgcttcatctgacaatcgcagttcttggtaacgaggtgaacttcaacaaccaatatcatttgaatgtcagcttctatctgagagaactggctcgacggagctgtaaatcttagtgaaagatgtctggagtcgactagtgaaagtacaaggagcgtgccatcttatagcgagatgggtgcctcgctattagttgcttgggtttaccggattgttatacttagtttttatactgtatattatgagctaagtgtctttgcagtcattatatctcgcttacgtctactcatgcttagcgagattgatgcctcgccttgcgcatccactgccttatggtttctcgttaatatatgaggcaagagtttgtatatctttgtcttgcgtaagacattatagtcagcaagttgtaaatatattctgtcacgtccgcatttaatgagttattctatttttaaatataattaccgttacacgcattgatccatattctttctactttgacacgtgtcttccgttgaaatggtaggcgaatttctagtataacaatataatataatatcttaatttaaaattttaatatttctaatcttttaatttaataattaaatataacaaaaaaataaagaagattgaaaataatatattttgatggttacgatattatttaataattaaattaaaaaaaacatcctatgtttgaaaattttgccaaaattaacaaacttttcaaaatttcatgttattttgccaaaaaaaattttaattaaaataaagatctaataagataaaatgtc

SEQ ID NO: 36022 - DNA, 4907 bp, Cannabis sativa
  modified_base (2711)..(2716): a, c, t, g, unknown or other
  modified_base (2951)..(2951): a, c, t, g, unknown or other
ggaagttactcacagctttatagcatgcacaaatatacttccccccgagccgcctccactagccgaccctccataaccaccttctgcggtaacagacccatttatatatagtgtatccttaactagaagtctaatacgtccaccgccattccctccatatggagttctaacagaggtcccaccaccgtcccaccacccttactcccataactccatggctcagccaatgaagaccatgcataaacatcaccaccccagaaacttgtcttattatttttcacgcaagaagcaccgcgaccaccatgccctccaccggcacctacatagtccactggtgtaccactagtttgcgaaggtggtaatccacccaaagatgttgtatttatggaagaattatagtccatggtcagattggcggctgagaaaattacagaaccagcaacaatatttgcatattgaccaatattcacattgccagacaagttaaaagtaatcacacagccctcaattggacacgcaatggaaacatgtggaagtatttccaagtttccagtaccatatacatagagatcagattttaaaatgaagttcgaattcagcaagcaagtggtattaaatgatccaactcctaccaggtcttcacatgatactgagcctactaatagggatgatgacaaaattggaatttgttcttgtattttcgtgatgttttgagaatcattacttatatgtaactgagagtcaagtgaccattctttcaaccttaggcgtccacttccagactcaattgagctacaacaaggaatgactacatggagatatcccaccaaaatgaaccaccaaaggtactggtaccttagcaaatgatgcatcaccattcagctacttaatataaaacattccgtcatatgcatgagtttctgcacatgaatccaaatattaaacttgtcaaatcaagcagcataattgtacaatactacttataataaacttttcagaccatcagcagcaaagaaatcctctcataacttaaaatcctatagcagctgttttcaatctatctacaattaaaaccttgccctatgaaataaaaattatgattgacccttggtgtcaacaaaaattcttcccgtatacttgctagacctctacaatacagaaggagctagaaagtcaaagcaagtgaaactatttcagaacctatacattttaaggcactttctactataatacttgacaattatcttactaccacaaacttaggagctccttgtccactccaccttgtaagtaatgcccaatttctaataatgccatctgctggcaataaaccaaatgagtagaagtcataacaatgagtgcacataatgtgcctccataaggatcataactgctaagtgaaacgattacaagcctacaataagattccttaatcagaactgggttattcgctgtacaactcacatatctctaattacacttaaatagttgaatccatttgcagaacaaaaagttggcttagatatagatttggaaagtaaagcacacagttcaaagtctaggaatgccttaattattttatttccttctagtgatcacaattctatgttgatcaaataccaaaattgaaaaagtaatggttctaaatttcaaatgaaagtgcaaaccgaaattcgaacagctacaaaccagttaaacaataaaacgcatgtgtgagaaggtgatatggcgataaacttattctacacttgaaatgaataaacatatatagatataaatgtacatatgtgtatagggctacataaacaatacaatacatacggatcctaaccagctaataacagcgcaagaaaaggaaaatacaaaacgatcagacacttccaatatccaatttctacatttcaactatgaaaatcaagccccgaaaacctcataactttcaaaatctcgaaacgatctccaaaagaacaaaagcttccgaaaagcataaatcagatattgaattaacgaagtgagcgggagaaagcttaccgtatggaaagcaagaaagaaggagagaaagtaacgaagatgaagaagaattgaactgaatctgaaggaagcttcggtcagtcgctcactcactcactctctctcttccttcacttctcttctcttcactttctctctctaaagagctgtaagaaactttctgaatcgtcgttagtcagaaaatggtttcttctttgtctctttgcttttcctctgctttttatttttttctttaatttttattgttttatatatttaataattacatctcctattcttttactattacaacccctttcaacatctccagactatttttgttctaatttttgttatgatggtaattttaaaaaaaaaatacgttatcgttataattaaatttttttatataaatgtgtaaattaaaatattaaacattctaagttttttataatctttattaaataaaataagtataagtgagatataatattaaattgtatgaatagtaatattttatagtattataaatacattttataaatgcaattttttaataaaagataacattgctataagagcatttctaatagccaaataggaatgatttaaaaaatactacatgtgatgtatatattttcgatatttttgaatggatgaaaataaaaataaaaactttaattatttaatatatattaaannnnnntataatattattttaataattttatgggtacttgttattggaacattaaaaaaatgtcaaaaataatataaaagagatataaaataaaagttaattagaatttttaaactttaacatgtataagatcatgctccctaaatttttaaggtcgttaaaaatgtccctaaactattgagattgttggatttaaagatttttgtctaattttagtaaaaaaaaaatctaacatggatgnaagttcaggggacatgatttagtatatgtcaaagttcgaaagacatgatttggtagatatcaaagtctggagagcatgatttagtacataaacactcactgaaatagtaaaattgaatgaaattaaataaaactccttaaatttaataatctcaatagttcagaaagaatttttaacggctaaaaaagttcagggagtatgatttagtacatgttaaagtttaggggccgggtaaaatcctaattagtttaaaataaaatattacatttttagataacgtaaaagtttttgacaccttatcactattgaatatgttctaacgcattagaattgttaaaaaatattattaattactagcactttatttgttatcataccactattagtataattaatattaaatctcatctaacttaagaaaaaaaaaattagtgaatatcattaactaatcgtaatgtaacagtagtttttatcactacttaaaaataaggtatcagttaacgatatagaattattaaattaaattatataaatctatatataattacactaataatataagaggttggaatgtgctagaggccttggtgcccttcagtatttctcaataaaatactagtgtgtttagagtgtgtgttgtaaactacttgaggctagctcaagtggtcataggagagtgcgtgtgtgttgaaggtcttgggttcgagttccaaattatacatgattgtaatatataaacgcttaaataaaaaaataaaaaaaaaaaagagtgtgtgtggtaagagaaagtaggtacgagtccaagctacgtcttgcatagctggagtgagtgtatatatttaggcgtacgtatgattgggattggccattccttttatatatttacccttacttttaacgaaaattacgctttgcccttctatataaacctaacctaacctactctactctcctttctttatttctcttttttccaataataatattaataggactggtgggtatgcatgccatgcaactctttcaatttcatattattaattttaattttagatgagtacgtggtatagccccataagggcatcaatatataaatataaataatttaaagcatgttattgtttgttaagcaataacttcaccaatccttgaataaagtaataagttagtattatgtgaaggtagttgttgaaaaagtttcagctaaaataagagtgtataatggttgttgccttttgtgttgcaaaaattttgttttcaacctaaaccctcttagtttgttcctatataaatcaatacaataataggaattatggctaagcaatcgttcaaaaataaagctaacttttaggtagatttacatatttggatcaaatgtaatagaggataagtatattactaaagtgattacaagtaatcctaataggctcattttggacacaaaaaccaagtccccaaacatgaccctatcttcgattttgtgtctgaactcaaaccttgccctcagcttaaacttgaacccccgaccaaaatcctagagggctcgtacttaagacccgaaccgctgcaccaaacttgaaccctaaaccttaaaccttaaaaactctaatattgtgaattttatatgtatatgtttgaaagtgcataaattgacaagtaataaagtagtcaggagaccgatatcgtcccataaaaattaaaagtaattaaagcaattaattatagtaaaattaaaacctaattttatctaagcaattgatttcgaatgagttcaagaaatcaaaattaactaacaaagataaaattaaaagaacaacaataagttgagaataaacagatcaaaataattgttaaagttttgattttaattaccctattataattataattttaatcattaatgtgcctagtttattccaatatttttaagaacctaggtggcgtttggttggaggt

SEQ ID NO: 36023 - DNA, 1974 bp, Cannabis sativa
atagtcattccaccaaaatgatagaaaaattattctattgacattctaatattttaaaatgaaaccaaataaaagaattgaattaaatttgattttgttccattctatttacttccattaccaccaagcaaatgtaccttaaggtaccaaataatcaggattgaccccgatctttagtagatcataagaaaaaaaaaatattgggccattatttagaaaaaaaaaatagtattttcaaaatcaataaaaaaatatgtgaaattttaaaagatgatttttttagagattatttcacaaatacacaaaaacaaccaaaaaattataaaaatatagtttcacgaaattttaaatatttttacgatttttttaattttatttaaagaaaatacgatcttttatgctgtactcttgctaatttattgttgattttttgttatatgtatgttattttttttgttgttgttttgatgttatttagatgttattttaatgttacttttatgtagttttcttgttgtttttataaaaaactgtaaaaatgtaaaagaaaatttctttaaatgtaaaaatgtatgtaattatctttttttaacccttaagctaggtagaccttaagcgcgggcctaactcgcttatataagagacggtcatgcaaagaaacattattataaacacaaatatcaaatatgaattttgataaaaacacacataatcccagttgggtataaaccctatttaatatttatccaaaggggtaacaatagcataacattattagttttgttaagctaaaagagtgggttttgattagttagggttttgttaattatgattggcatggtttgactaccatattgtacgttcaaagcaagctcagatcagagtgttttactcattgcgtagcactacagattcaatcttgggaaaagcaacttcaatttgacactaaacatactttttttttggccacactacataaaaattatttggaattggtacttggaacacacattagggtacttttagaatttatttatgaaaagttagtaaaaagagagtttttttttgtttttgttaatatatgttttaatataaaccccttattttgtttgtcattataagtgtatttgtatttctaacaactctagtgggtggcttacaatgacatcttgccttgaagtttgtgggtctcctttggccatgaaattttcagtttcagttacatggtcactctcagtctcatgtcatttgcattttactattttttttttcaaaaataaaaatttactcatttgttacataaggttcatctacatagtttgaatataattattattattactataaacttacaaaaaaaaaaaaaaaaatgggatgaacgggagactttcctattagaaaaatgttgggactattttaggctaaagtgagctaggtttgcacctaggctcatcaactttctaaacaaaattcattttaaaaagggataattgcggcaaaagtccccaaaaacttagagttgatacagattagtccccaaccttaaaaattggcggtaatagtccccaaggtcgcattttctgtaagtccgttggtcaattttctaacttcgttaaactcaaataaaatgccacatgtcgacaaattattggtccaaattatttgagtttaacggatctgttaaaaaagggaccaacggacttacagaaattacgaccttggggactattaccgccaatttttgaggttggggataaatctgcatcaactctaagtttttggggacttttgccgtaattatcccttttaaaaaaacacgattttttttaataatttttaaaaatactacataatgttataacaggtctaatagttaacttcttcttaagacccaaaccaatatgaatgagaggctaactagtaaatatacatgtttgtaacataagatctatatattagtgacgaaatttactt

SEQ ID NO: 36024 - DNA, 1525 bp, Cannabis sativa
cttttgaattgtgcgagcagatcatgtatttttctcagatatgctatcattttttctcccgaggcttgtattctccggatgcatgatttaccaccagctgtaaatcactacagatttcaatgtgttcggccttcatttcttgggctagccttagcccagcaattagagcctcgtactaggcttcgttgttagatgctttgaatctgaacttgactgcagcgtccaggtgttgcccccaggcgtgacaagggcaattcctacggcagatagttgatctatagctgacccatcgacatgtagtttccaggtcatctatatgccccccagcctttctggatttgatgagcatatcatccacgtacacttccatatttcgcccgatttggtctttacacatttgtttaccaatctttggtatgtagctccagcatttttcagaccaaacgacattactttgtagcaatatagaaccatatctgttcgaaaacttgtatgttcttagtctggtggatgcattttgatttgattgtagcctgagtaagcgtccatgaagctgagtatttcatgccctgctgttgtatctacaagatggtcgatcctccaaagtggaaaataatctttagggtatgctttgttgaggtctgtgaaatcaatacacactcgccatttcttgttcggcttgggcactaatacgggattctcgaccaacgtcgggtagaaagcttcaattatgaagttgttgttacgtagcttttcaacttcttccttcaaggctactactcgttctttgtccaacaaccttcgttattgttgaactggccagatgtttggatcgatattcagaacatgtgaaatgatagaagggccaattccaaccatatccgcatgtgaccaggcaaaaacgtctaagtttgctcttagaaattttatcaattctgattttactttgagcaacaaaccctttccgatctttacctttctggtcgggatacctcgatccatctcgatctcttttaatttttctacaggtccaacattgctacgagtgaaatattgacgtgacagcctttaagccatacaaggtcggtcgacctagcattacgttaaaagctgaaggaacatctaatatcaggaactgtgccataatagtcatgctcgttggagcttgtccaacagtgaggggtaggcgaatttgtacttggcatgattctctcggggagcttgttcggattttctagtgaacttttctttcttcccattcccttgcttgtggttattactggaacccttgccacttgagctcgaattacttgggtagtagggaagttgggcggatgttccagtagaaggagcctttgacttgccaagcttttgctcaccttccgctcgttgaatggcttcttcgagcttgttgaagacttcgacacagtcaaggaaatcactcattgagtctaccggcccgttcttccttatatccttccaaagttcaccgaggacttcgattccccccagtatcacgaataac

SEQ ID NO: 36025 - DNA, 1277 bp, Cannabis sativa
ccttttaggcaccctaccccattcattgttgggaacttgatgcatgaatagaaaattgatgtgacaactttcaggtcatataaagtcggtcggcctaacatgacgttaaaagctaatggaacataaattatcaaaaattgtggcatcacagttatgctctttagagcttgtccaacagtgagcggtagaccaattttccccaaaggtgcaacaatctagccggagaaaccatacaccgattgggtacaggggatcagatctttgagttagagtcccattttctcatatggtgtcttgaacagaatatttgtagaggctccattatctatcatggtctgggctactatattatttactatctgtacttccacgaccaaggaatcgttgtacgagaagcgaacgtggacaacatcttctttagtgaatgttatagtgggttctcctacccgtggcatttttggctttctgtcctctacgaccaaaattacttcctttcgttcattctgtaaagttcaggcatacctctcctgagctttgcccgagtctccagaaatgtgtggacccccaataatgacttataaatgcccgtccactggtggaggcattagtaggtcttgattattgtctacttgggtggctcgttgattatgatcggccttgacgtacttctgtaagtgcaggttattctttctgattaagaattcaatttcccgcttcaaattattgcactcattcgtgtcgtggccataatctccatgaaaatggcaaaacttggacatgtctctcttacttacgtccttcttcatgggagcaggttttttgtacgggaccatagactgggtttccatgtagattgtccctaggttgtcagttaggacagagaaggcagtgaatttggaggcattttctctaggggtgtgttaggctatgcatgtgaactttcccttcttcccatggccttgcctgccattgttattggacctttttctgtgcggggttgagctgctaggatattgtgggctttgagcaggtgctcctactgaggagacctatggttggcccagcctaggtttgacatttgctcgctgaatggcctcttcaagcttgataaacccatctactcggtccaaaaactccaccgtagatcccacagggccacttttcttaatgtctttccacagttctctaagtacttcaatgcccccagtatggcagccagccttccttcttcagttaatcttgctacttttgtagcttcggtcatgaacctgcttatg

SEQ ID NO: 36026 - DNA, 2139 bp, Cannabis sativa
atagacatttataaccctgcagtacgtgccattttatttctcttgcaactcctttcgttatcgtctggtagataatttaaccttgggaatgggaattgggaagtccacatgctaagaaatttgaaaacttgttaaataaagttaaggacttgagcctttggttgcccacattcacattgctctttgttatttctggagcctcgtttcttctcgtcgaagagaaaaagatgactttttagtatctaaatttgcatttcagactatcagttaatttgatttgtggatcttttctttttgttcttcttgatgcaatacattagggaaacaaaagaagtgctggatttactattgaagaaagggaatcatttgagaaaaactttttgtctaaaggatttgtggataccttcagaagacaacaccctggcgttgtcggctatacttactggggttttaggcatggcttgcgcaaaactaacaaaggtatttgatcctcactctttcaccatgaatcgcaaatacataaatgtatcaggtttgcttgtagacatgttattcccggtgattctatcatcatcggtatcacattggcttgcctcagcttgacaagtgtttcattttgttgctatctcaacttgtctttcgatttgattcttcgattctatgttgcttacttgggtaaattaaaacagggtggcggcttgactacttcctcgtctcagaatccattgctgaccaggttcacgattcatacattgtacctgatgttcatggtagcgatcattgtcccattggtcttgtactaaagttgtagcacagaaatcagcatcactggtagcttcaacaccgatactcggtgttatgatttcatttttttgtcgaaaatttgatcttcggggccaaacatccttatttcttacccattttgctgctaatgtagatttaagaagaattaaggcaaaaacgtattttctttgttatttcgagcttttctaagtcaccaccttagttttatacacttcaagatctcccacaatgaaaaaacacatttttgagtaaactatgatgatatttaaaccaccaacaaaaacataaaatattactaagcaaatatattaacagagctaataaattacttaatccattctttatatttagggtctgtttgtaacttaaaaaataaaaaaagtgaacaataatgattttgtttgtttggagctttgaaaatctgcaagaaaaaattttaaatagaaaaaattgggggaatttttttttaattaaaattgaaattttactttccacatttttaattgaggaaaatttgagaaaagtggagaaagtgtatcaggctaagagagcaatagtagtagtgaatcctcttcttcaccattgctgctcgacgctttctctaacccaatgtaactatcaactcgaatttagaacctttcagagcttcactcaatggcgtttctcactacccaacttccttgttcgtaatattcatatacgattcgaattcgatttgccatcggaggagattggtctccatttcaaaccgcaactatttttttcaccaacttcaaagaagtcttccatgcgaagaagctctaactaagtttcgggtcggatttcgattagttatcgactctccaacttaagagatctcttgtttgcaactcactgactgatctttaatgcccactcaagtttatgcacagtgtgctggttattggtaaagacgctgcaatgtaggagaaagggtatgtgattacactagacgatagcaacaatactaatcatcataactccaccactactaatgtttctcactgagttaaattaaaaaatactttttaataagcatattatgttctactttacaatcatatattgatattaaattggaagataaaaaaaattaatatgaaaatttggattaaaaatgattattttataaatagtttgtttaaaaaataaaattaaattaaaattatatcaacatttttttcccatataaatcataaagaaaaaaaatatatggaaatcaagatgctatttggctgtatttttaatttttagtttttagaattgtgtttcaaaagtaaaaacagaaaacagtttttcgtcattttaaaaatttaa

SEQ ID NO: 36027 - DNA, 1111 bp, Cannabis sativa
caagcagcggtgttccagcaaacagtgatgtattttcatttaagatgattagacataatgtgcataatttatttaattaaaaaatatatatataaaattaataaacatactactaaacatatgaaatttgttgttaaaaaaattatttaaaaattttattactgaaaattaagaattgttcttatatttattttattcatgtttttttttaattcatttttttacaatattattattcttctccaaaaaaaactctttcaaaaaaaaaaataataaataaataaacattaacgttaacattgctggataaaaagactataatttgtcatttattttttatagtaattttatttttgtttttagtgtaaatgttaaaaaaaaaatgctcttatatttaagtaaaaaaaacacgtggccttattttcatcataatcaacgttgaaacttttgttggacaccaaatttaaaatattgggtccaagaaaaagaatactcagtctgtgaaactcttgaatttgagattagtgttgtttgtattggagaaagggaggttgagtttctggagttacaggggatgatgaagctagtcttgaagatgaaaaaaaatatgttgggaagacacgtgatcaagtacctgaaagagaaattgggaacaaacccagatcagatgtcaacctctacgaaaaaaataaactccaccgtgtaatcgatcatatgcagttaaatctcatagtccaaatcggctccaccaccggaggacaccatgaaaccccaagttttgcgcctccattatcgaacctgtaaaaaattttattatattgaaaatcccaaaatcccaagacaaatcatagccaaacactctctttctttctctttatctgtgtgtgagtgtgattttctatcatattttctcatgaaccaaacagaaatataattaaagaaaacagaatgaatgaatgaatcaaagtattttacaataagtctattaaatttcacacttacttctccagcataatgataaattgtgaagtcgctgctggctaattttggcttgctaaatcgtttgtggtctttataggttcgatacagctgtgaaataattgaatgttgc

SEQ ID NO: 36028 - DNA, 1021 bp, Cannabis sativa
actaatagtgatgaagatatttttgacaatgttgcactaacctcagtttcttctaagtttgtttgtgactcataggtgaaagaaagattggtgtgcttgagtaatttcattaaggaatctgaaatctgtgaggagtacccgactgagtcttacaagattatgtataaaaagtggatacatgttactcctaaaaatagatcattgtcaaaaataaataaacgattgtctcattaaattaaatctcttgaattaaaaattaaagaatatgagactgatttttgtttaaaatatgaaaaaattattcaagtaaggaatgaactaaaaatttcaagaaaatttttcaaatacttaaccctaaatctctatttttgaggaagttaaaaatgcatgtcgaagaggcttcgctggtcttgggtcaaatggtactgacagttatgtaaaaaaattgtaaaatccagtgttccggcaatttacctgctactgcaaattcaagatctgctattgcaaagatgtctgcataagcaaattctccagtaagttcaaaaagggtaagatctcagataagaaagtttgttctaatttgtcatttttgtggtgttaatgggcatatataggcctaaatgtttcaccgtgaaaaatatgtacaaaacaaattattttggtaatttaaaaaaaattcaaaagaaacatagtgctttgaaacaaaaatggattgaaaaagaaaaatatctagctggtttttttgataaaagtgttgcttctcaaatgtgttattttgactgtagttgttctaaacatatgacaactgacgaggattgattcgtgtcgtatgtcgtatcaaatttactattattttgattccaatacttccaattattttagtataaatgtaaataagggtcgatcccacaacgactatgtttattcaattattcaaaaattagtgacaagaattagaaaagaggattttgataattagaataaaataacataaataaaaaaaaaatgtgatactacgata

SEQ ID NO: 36029 - DNA, 2814 bp, Cannabis sativa
tatatactgacaggggtgagaaagaattgactttgattaaaatataaatattggtttttttttttttggactgagtcctctttaagaattggactaaaagggcaaactgtacttgcagagaagaagtcaagaaagaaactttgtaccattgttatttgtggaaagacaatagtatttagtttctgtttaatgttggaaacctagttggttgtttattttccattacaataaatgacattgggtatttagtgtgtgagaagttgagaataaaattggacccccaatgaatgtgaatattgtacccattgaagaaagcatatagctttatttgagacagaataaaaagtatatttcattaagctggctaatttaattgaggattatgctctgtaaactcatggtattgcacatttattgataaaataaaataaaagattgtttaattgcagcagattgttcacccttccatttaattagctattttcactctgcataagtggaagggtgtaaattgagtttggacccttgacttggccccccaagtgcagaagagagattgcagtgagtgtatataatgtaagttcatattagtggagatctaagtgcaatgaagaacttggttggttaatgaaattatttgtttttgtttgaacattatacttgtaatttattaactttcattggaaagagatttatgaacataatgtggtggttcaaagttgatgcctaatatcatttaggtggtagcttgaggatctagtcaatccttctcttgaatttctgtttcatccataatttagtgtcagaatcagatgtaatcatatccataaactctgcttatatcaattttcaaatgtatattttgctattgtggcaaacattcaacttatttgtaggataaaatatgcattgctaactttatgtgtgtatgctggcacatacagtttgtaacattcctaatggggtttcgtttttcttctttctacaacagcattacagttatgtttttcgctaaagaagatctagattgcaacctcgaggttacaaaggaaagcttgcttaaaccagtcactgtgccttttgagcaagggcttggtcagaagtttagacaacctgctggaactggaattgacttctcaatgtttgatgagtctgagttgattaaggggaatgataccgagatctatcctcttgttgtgagggctgaagcatgcccattaaaccagaatgagcaagaatctgatgcaagttcagctggaaattctcagatcactcaggcagtgtttgaaaaagacaaaggtgtataccaggtgcgggtgatgaagcagattttgtgggtgaataagatgagatacgagctgcaagagatctatggaattgggaatacagttgatgatggtgattttgatgggaatgattctggaaaagaatgtgtgatttgcttgtcagaaccccgagacacaaccgttcttccttgtcgccacatggtacacaaagtttataccttttatcatctctctcttttatatttggattaaatggatttattatgaatagatgtcagtatgacagcatgttagataaacaagtcttttgttaatattgtcttgcaaattagatcagaatttccaagtcttctcgcactcggactatattgaatgttggaaagcatttatgtggatttttctgtcaagtgattaatctaactggaaagttgcaactcaacttctcagaaatagaatgcccccactataaagaggggcctgtgtagaagtgttgtgttcaaactattactattttcattagtactcttcctttccccaactattaagtgttagaatgaattaccaattgttttaccatagacttagactaatatctgtgtttttgagtacagtgcatgtgtagcggctgtgctaaggttctgaggttccagacagaccgatgtcccatctgcaggcaaccagtcgagcgactcctggaaatcaaagtaaacaatggtccagatgggtgaggcccgagtatgatctgctatcaattgaattctgtaaagtaactatagatttttctttaccttttaaaactctcctttcacagtaataacaaacaggcagtcccggattcaggcacagtatagagacattatttcagtgcaattaatatatcgaactctttgtttttgtaaatggttctcgcgctctctctctctcgtcctgttctcgacttgattatctgcagctctttgagattgatgataaagcgaccgaaagatgatgtattcattcctacaaaggctaaggctaaaacactctgatgctttgaattttcgaagttttctttcgggcgtcggttgaggtctcatgctctaaaagaagaaagggaaacatggatttgttgtgtagaaattagaattttctcagctttgtgcttctttagttgtctctggatttggttttctcccttaatctctcaattctcatctagagactatcaatgaaaaaagagaagaaaataatgcatttttcagttgaataaaaagtcgttttttacagttattaagagttgctattttattagtattttacaagtggctcgtaaaaatataagatattatatattagaattgaagaaagaactttaaaagatgtaagaagattagttattattctgttaagattagttactattctgttaagaggcggttaaattttcgttttatttgcatataactcttcaagtttaaattttagttattcggttaattatgtgtatattcttgtataaatgacatacatatttatattagtacattta

SEQ ID NO: 36030 - DNA, 2949 bp, Cannabis sativa
cggcaaccactctctctctctctctgtcttgctctctctctctctctctctctctctctctctgtctctctcatattttctcacatcagactcagatggcacgtccacccacacgagccccgtctgacacgagctgccaaggaggagatcgacagagtccaaaaactttcaatcaatttttgggtgtgattccgagaccatttcctataaagagcagtatgatggggcttagaagctctaagagaacaaaatccctcaaaattttgggcattaacatcattggaatcgactattgaagtttgccagaatccatggagttcaagatattcgactccgatctagtcgcttttgaacctcgtgttgaaaaataggctatagatccatgttctccttcaaatgggcttctcgatcctatgattcagtgcccctttcatcattgttaaacctggacaacaccgcacgtgttctccagcgatgaaactagtgttcagttagctttttctctctcacccttgcgattttatttctctttaatgtgaatatttttttcttgtggatttaatttgtgtttgtttgtttttgtggaaagggacccgaatttcggttggtgtttaggtctcagtttggatctgagatgtggggttttgtttggatctaaaaaagaggtttcagtgacggttgtggtgcgcagatgtggtttcggtggtggtgggaatttcgattgtggtgcgcaaatgtggttttggtggtagtggacagtttggttatggtggatgatggtggtgaaatttttaaagaaaaaggaagaacaaaaattggaaaaaaaatatgagattagaaaaataaagatggtggaagaaaaaaattaattattttttgtgatttatttttaattaaattatttttttaataatttattatgtaggccaattaaattgtgccaagtgttaatgtgtccacgtggataaatctatgtacgcgtggacaacccaacatggcagttaactgcataaaatagatagaaatagctaaatgctaacagaatgtaggtttggggggttttaccgctaaaatttggattttggaggttatatgcaaggaaaacaaaaattttgaggattttgccgcaattaaccctattttaaatgaaacttttttcatatatattagtaaagatattttttttaaagaattatcaattaataatgatatttatatctaaaaaaaattaatcctttacgaatcatattttaatttaaaagttttattaccctgatattattattcagcacctatatttaaactataatattatgaatgagttatgtttttttttttgtaacaattatgaatgagttatgttggtttttttttttttaccaattatgaatgaaataattgataaactaaactaaattaaactaaatcatatttttaattaggggatttttttatatatgtacgtgattagataattatttatggaaaaagcaaaagtaattttaattgttaaaacaggttagttttactgaaataatgtacttaattattcatatttcttgtattattatatcattggtagtgccgttgacttttttttttttttttcttttaacgtcaatttttttgtccaatttcttttcctttctaatatttaattttatcatttttttttccaattacaccattagtttggtgggaaataatatcattttaattttttttagtgtaaccattttaatacgaggaaaatatatatttaaaattcaaattaaatttttaatttattaaatgttgttaataaaaaaaattatttaaaattaggagatgttattaaaaaaaaataagacactgagatactaaatagtttgtaagataatattatttcatatacatatttttgttacttattctagttggttaactttaaaaattataattttagattgattaatttatatattattcatcattatgttatttttataataacttccacgttacttttaaatatatttaaaatttaagaaggtataataaaatacaaaaatattaaataatttatattagtaaaataagcgtaatttttttaaaatacatataattgtataatagttattaaaataattctataaaataaatttacatagaatacatactatatagtaacttttatatataaaactacaaatagtttttaatgatataaaatcagttgacatattaaattttgtttaattaattgattattttttttattaaatatatataagaaattataaggttacttttaattttaaaaattttattcgatgaaaaaacatgtggttcccacatatcaaaaggatcatctcgaaaagaaaaaaaacaaatcatagtggtatgactgatcttggctcaaatgaatagcagtgtagctagattttttccttaaagggtttccttataagttattttaaaaaggaatttttacagttggtgtccttttttaccatttttttttactttttctttttatctattctcgattatttataatttttattgcatgtgtcatgattttatgcattctaatacgccacctcctccataactgccttcttcttctttttttttgattctttttgattttctgtttctctttcctccgttcttcgttgccataaatcacgatcacccagtcgaagccctaacccacgtttttgtcaacctcccatctatgtcactatctccattttgttcgataatctctgtaagttcttccttccccattgtcttctcttcttttataaatggccaccactagaaagggttccaagtcaccatcgccagctaaaattttttctaaaaattctaagaaacctcctacaaattcatctaaagttgatcctaagattggtttgaagcgcattgctaagaaagtaatgggtgatgttccagagccatctg

SEQ ID NO: 36031 - DNA, 1242 bp, Cannabis sativa
  modified_base (1215)..(1217): a, c, t, g, unknown or other
gttagagaaaacagacatcagaagcataaagcataatagtcaagaagtttaaaaataagacggagtcgcctgcaagacgattgtccaggcaagacttggaagtccatcatcacctgataagtcccttatctccgccataacaattttaccttaacctatcacgggagatggaggccgagcaggtgaactgggttccctaatgcaaattgtatgttcaacgggccagggctgggctggaagtttcttcctcctcttgagcggagtcacctgctcttcctcagcctcatcttcagaattcaagggctcttgagcatactgcttggcccttgcacctcccttcaacttagcctcacgcttcagttgaatcagctcatcctcctaatgagctctctcagcccgtccagcaccagatttcctcttcctccccttcactcgcttaggaatgaaatccttcggattgaccttgtacttcacaaagttgtcctcggaggtcaactggatgatattccggtcatccccggcagttgagcaagccattgagctctatctttaagagcaagagtaataggagggcggtgatatgtggggatctgctggaaccgagtatgggtggtgcccatgccatccaccatgaagtactcatcaacaaaatgcctaatttttctaatggccttatccccggtgcccgttaaccacttgaagtctggttaagagacatagaggtaccccgacctgccttgcttagaggtggaatacaattcaaaacaccagctaacctcgtgggtagaaggcatatcccacttttgggaggcatagaggacgaagagggcagactggtatttaatgcccttgggagtaaattgggtcagacagaggcggaagaagtctgccacattcctaaaatacgggtgcaaaggcaacaacaccccttactgggcatgagcactcgaccaagcgcacattcccctctcagggtttgtggctcggttattgttggcgggaatgtaacagtccaattcgccttagtagccatcctggtcgagatcccgcaggcgcgcctcagtaaccttggacgaagggctcacccacctagcacccaaggtaccttaccatctatgagggaccgcgacaataagttcctcaatggcgtagtctactgttgcatatatttacaggatttagatttactaccatgtatgtttcattaacatcctnnnatgaattctaaaacaatgaaattaa

SEQ ID NO: 36032 - DNA, 3752 bp, Cannabis sativa
ttaattaaaataatgtatacaaaattgtaaaatgccctaaaatttataaaccgctcaacccgaagaaattgtccaaattaaaccaaataaaccgataaaaaatacaacccgaaataatataatgaaaattcgaaccgctcaatgagtatattaagtaatttacaaattattctaaaccgcttaattaactcgaattaaaccgattaatatatattttttaataaaagtgtatataatatattacataaattatatttattagtcaaactattttgtatttacagttttgacattttattgtttacctttaaatctagactttataattaataatttttattgtatttggatattaaagatgaagtttaaaatttatacaatattattatttttttattattttatttaattattttatgtttactcaattatatttatcttatattaaaatttttaaaattattttagattaaatttttttttttaacttcaaatataaataatttatttttattttttcaaatttaattttttgaattagaaaccgataaaatcattgcacgggttaaattttttctaatttttaattgagcgaattacacttgaatatttgcaacccgatatttatattagcttagttaaattatactataacccgactaaaccgacctacgtacacccctaaattttgaatgcatcctcgctaattcactttgactcgttaccaagcatagtaggcaatccgggaattatcatatctttgcacgtagaaatgtttttcctacttttcaaccaaaaaaaaaaaaaaaattaaagtgtttgtctttcattctatggacttatttcaccgagaaaaatgctatggtaagtggtaacctcaccgaccacgccttgcaactcttattcttgcctatccttctctttatattcagcttgggctttgtgctacgtggcagcttgtaattcatttgtgtttgaaaatttcccagttcaaacatctgataacatgaagcaaaataggcacacaaaagctgtgcattgtactcaccagtgcttcaacttacatcttaatagttaattacatcatcggaagaccaataataaaattacagaattgtttctttaacttcaatttcactaaaactacaatcacatataagttttttaactcactagtcatactcataataagcagaataatcattgccaaagagaaaatacacaatgaatcatgaccagtatacaaatggaggtccataaaaaatcccgttttctttccatagatttacctttgaataatccagttagaatctataataatttttttttgttctggagcaatgcgatccgtacacaaagaacaaaataaaaaggaaaactgaaactagttgttagcagcctaagtttcgattcaaactatgatgtgagatccaacagaatttccaagatcccatatttcaaaccacacaatactgaataatcaatgagttaaaaatttgcttcagaggccaagtacactgactacattttttttcttttttgaaactaggaccccacctaaccccctatctatcatacatgtggatacatgcttgtctatttgtgcacgcatattatgcacatgaatattaagtatgtgtttttatgctattcagtgatgtgatcaattatcctaaaaaacagagagttagaaaagaaacagaggaaacagagagttagtattaatgatgtgtttttatgctattcaatgatgtgatcaattatcctaaaaacaaagagttaggaaagaaacaaaggaagtctctagcttgtaagattatgcccgatcacgtatgtgcacatatgcattaagggattaggcatacatgcacaataactaggatgctcaaagttatgctatgaaatgactagaaatgtacaacaaagcaagctttcattgtggtttcagactgcctttaccttggccagcaaatgtttggtacaagtggtaaaattcgaatttacataagctgcagagcaccaaggcatgaccatcttacacattatacaaggggagctgaatcaaatgaatgaagaacttgctccagtactgttcttgtgtgggtgtccagcgggttctcaggtttatcagagtgagaaatattgagaagatacagcttctttgaagcaacaaatgccgcagaaaagaccctcttcattcctcccctggtgctatcaaccttgtactcaaactcatacacttgcaaacctcccttgcctaatctttgtgcaactgcaatcacctcagcctctttggtactttcctagataacagaaaatatattgaaaacgggtaccaaactttttagagagagagagagagagagagagaatacataagaaagaaactagggaaagctaacgtcagtatcactctaccaaacttatttacatttactacccaataagattaaaaatgttagcaactatctacagtcttataagtaccagttgcaaaagcatcagttgggcagtacatacatgccatgcccatcaatcttaaatcaaactgacactgcactttatccagtatatatctactttattttttttcaaatgagaaacaaaaaatggtaatgaagatcccaaaagcgacacctaatagggataagatatccccaagagagaaacattgagaacataattactgaataaactccactccataattaaatccaaacacaaaatattatcctttattgtcggacctgatttttactgtgcctgtgccatatgctatgtgctaagatatttagattcgaaaatgcttggctaaaggacccaatgtgctttcaaattgagacagttggatgtttgtaaagattttgatgtgcagagcagctgacttaccttagcaatcctttggaaatttgggggaaataaatcacaggcaatttcaaacagacaataaatctttgtaaacaagttattaaacatttgagaggtagaagtgatgaagaggcttgccaaagaataagaagctgttactgaaccaaagagagacatttcggggactgatatcacaacaacagctgtggcttaaagaaggaaatcagaatagcaaatattttcatcgttcggctagttgtagaaggcagaatgattagattcaaaaattaagaaataatgatgggagtttgttgattcagagggatgctatgtcccgagtattttcgagacaagcagctggtggcaagttgcttgagctgcttggaatttatttcccgggatgttgcacttgcttgtagcacgctgattgcgagcgatcgaggaagcgtcggggcacaagcaatatgaatatggagcaggttagcaagctgctggttttggtcatggtgatgtcactccaagtgggcaagatgcaaaccccaaattgatgggacactccccatacgcccaaaggagctgcattaatgccttggaggatgtaaagaatagtgaatcgaattgtgtattgtatttcataaaatagtatatatttatatacaaagctaggagactaaatgagaaactactaaatacaaataagaaactattaaatacaagttactctaagttctttacaactaatattctaacacttcccctaaagctagagcatagatgctaatcatgcccagcttgttacaaagataatcaactcgcaccccattcaaagcctttgtaaaaatatctcctagttgttctccggtcttcacatattctgtggagat

SEQ ID NO: 36033 - DNA, 1418 bp, Cannabis sativa
  modified_base (67)..(68): a, c, t, g, unknown or other
atatcatttacacaacatatatcagtagggtcataaccctaggctattaaaccgctcatgttagggnnataaccctaatcccagttactaattacttacatatatcatttccagtttaagtgccaccatgcataactctacgtgctaagtactgtcttacctgatgtcccgcaatagaagagattccaaatccccgagtgctcctgaccaagtgtcgataatcctagtaacaattttgagatttacacaaatagggttaacccttgagtccacatttataaagtatatacatggcatttaaaatacaaataatctcatagagctcagaacgagcttttcaaccatatatagaactccaaaaacggagttcggatcataaagttatgcatgttctaagtttgcattcaattctgcccagaaatacgaggcaaggcctcgacactcaaaagctatgtcgtggcacctggattcaattcccaggtcaccagaataggggcaggccgcggcatgcaaaagcattgccgcggcacctgggttcaaaacctagaaaaccagcagcaagaacttcgaatttcagcccctaaactcatccaattcaacccaattcacaaccaaaacccaaattcatcaaatagattttccactaattaaacagagagtttagaatacaattttatgcattaaaatcaaataatataactctcaaagtttagcttaaacaccataaagcataagctccaacattgagttataaagcaactaatttcacctttaaatattcacaagatcaagtcaagaactcatgtataagacaattaatttcagagaataaaaagaatataaacactacaagaatccctaaaattctctctaatctcaatctaaaacaaaacccaaaaagctccaacacaaatcatgctctcaacaactagaacaactcaattatcaaccacatgcatttcatgagtattcaatatcttttcatacttaaaatcaatacaaactcagcaaccatcttaagtaaaagaacaataagaatgctacctcaagcctcaagcaagaagatcaagtttcacacctccaagcttaagcttgaattcccagcaaacaccacattttcaatcaagattgtaaaatgtatagagagagagggaagggtcggctagggcaaaacaaagcagaaaaaaatgattttctaacataccaagaatcccattttttgctaataatcaaattgcccaaaaagacaaaaatgcccttatggccattaagcaccctcataaacactcaagggcaaaatagtcattccacataacaccaatacactcaaataaaatcagattattcacataaaatgataatgccaaaaattaatcgcaaaattgtatttcggccccgaacccggttcggtccgaaat

SEQ ID NO: 36034 - DNA, 2258 bp, Cannabis sativa
aaaaattaaagtgatgcaaacttgcggttaacagtggtgtggtgttcactggtggcaaccttccctaagaaaatgagtgacgattaacaaaagcatcaactgtgagataggtatatatacacaaaaataacagtgatgtgagagtttgagagactcttaaaatgagtttgagagcataaaaatggttaattactttctaacgtccaatttttaaacaaccatattataatactatatatattccctatatatatggactgttaaaatttagtaaaaattaatacagtcattatttttattattataacgtataccttttttttcgtaatggacctatccatatgggttgttacctttattaattattaattattaattaattaaaataaagtatattttttcttttactaataaataaaattataaaaactcagaaaatagaaaaattgaaattctaaatagttaggctgccacatcatctggttttacaacaggattatataagtatatagattgactattgtctaatagtttcacacacgcatatcagttgtttgttttcaaaccggtgattttttttaaaattagactaacacatataccaatatactttagtggctctcttttagacttcagcgtctacacatttttttttgtttaactatgtgactcatgacatatacaatatatattttttttaataatgattataaacttgtcaaatattttctttttttttctttttttttattaaatgttttagattttttttttatatttttttgaaagcaggtttttttaaatattttgttaatagataaataaataatatttaaatttaaataaaatttagtatatcaaacaagttaataaattactaaaaaatatattttttaaaatttttatatttaaacattacaagattaaaaaaaaataaacttacttttataaaattaatttaattgatttataaaatagtttgtaaataaattgaatagtatctgaaacatcatgtgagttacataaaaaataacctcaaagtatcttaaacaataaaataacataatatatagcttaaaaatataaaaaaacaatttttttttttaatattagtcgtcattttttagagatagaaaaatatatgtttctcacatattaaaatagttattttattatttatatatgtgtaaaattctgaaataaattttttaatagaaaacaaccaattgatatcttattcacatcaaaagcaactaaatagttgcttttttcaaaactcctaaaacccaaaaatttttggaatgagatgtttccagttgtttccattatcagtcattgttttaaatttcggtatgtatgctgatgtgaaataatggtatttatgaaaataatttttttaaaagtatttttataaataaaatcaattttaagtataatattaaaaataggaaattacattgtatacccactttactttacttgttttaacttttacctttatttttatattttttaaaacatactcacttttatagataatgtccccattagaccccttaggttaatgtaaattatatgctagatttaagtagagagtgagagtatattaggcaacccactcaaaaaaaaaatggataaattttaataaaatataatatgaatatattttttattaatagataaaaaaatatatatatatttttcaatttccctattagaaaagccctttgtaataaccaatgatacaaaataggttgggcctcttataaagaagaaaaagcccagtacaaatataatcggaattagactaactagttaagtaacaacttcaggcctcaggaaatagaattctatcccaaaaaaaaagcaaaagaaaacttcaatggtgtgcgacactgctacatagtaacatagttgcgagctctgtaaatacgtgactggtaagttagtttggtcgtgtcgtgctataaaaaaatacagattgtattgtgtctttgttaatatttttaaaaggtaaacccatcaaagttggtagacttgtattttcgtattgtatcgtcttttactcgggccaactcatttttcttaagtaaaccggtctatttttttagagattattttacaaatacacaaaaacaataaaaaaaattataaaagtaaagttgcacgaatttttaaatatttttacaatttttatgattttatttatcgaaaatacgatatgttgatgtatttttatgctgtactcttattaattt

SEQ ID NO: 36035 - DNA, 2480 bp, Cannabis sativa
caaaggagatgaaggtttgctgaaaacaaatgaatgaaaaggcataagtatttttgagggttattggaataaaaaggcagaacgaggagaaaaaagaaactaaccgagagaccaaaggcaacgctcctttcaagcatctcgttcagactgccattattgattagatcccaatcattaggcagaaaggatcggagatggcgccagcaggccgcaacgtatttcgcagagtgtttcaattcagcgctctcaccctcgatgggcaaaatctcaggtacttggctcaaagaggctacaacttgacttgttttaggaacgggctcttcggtatgtgcgagggtaagaggatgagtttgaacttggttctctggagcgtcgtggtctatggtctacgaggctcacttctagttgatcgttgtcttcctgggccttttgaggggctcacattgacatctgacgaggtttctgaggcaattaacattttattccccattttgcttgaagagtggaggaggtcctctagatccatatttgcgagacaaaacaatgtgttaataattgtttaaaaatagataaagggtaaaatgggaaattatttcccacttaaaggatttaccataatcataagaagacgaggaaggaggactatagtattcgctaaattctctagatcctgtgatcctgaatatgtcataggagttaattggttctaaatcccaactcgaatctatatgacctgacctatctagcatagttccatagtgctcgacaatcccatactaggaactagtatagctaatctgaacgtgaaattctgggtattaactatcgaacctatgtgttatgcaatctatgagaaaggagttccatgtgaaaatattgtactgactatctctgaaagacactaatgtactatgctcggccctaagcactgtgggtgaccatccacattgattacctcaggatacttcttcttcagcttcccaagagactacattttggagataatgcacttgggctacgtagtcttgggattcctcgtcgactaggaccgaaacttgctaccacgacgtatacttgggatatttataatcactagtatactcgttctcagcgaggaggcccacggacctcaggttggcctcgtttaaaagaaactcagctgatcagagaccaaagggaagacccagtaggaacctgcgttgctcggccatctcgggagtaggatttggtcttttcgagaccgctgtcaaaagaatgaaattacaagtcagcgaggccaaagttaaaaaacatggaataatttaaaaccaagtttggagcagatttacttacgtattatgtgaaacatggttgtgttgattggagagagcccagttgtctagaagaactcttctttgaaaggggtcttgtttggcaacccaacaataatcttacgatcacctgtgtgagtcccaagataataaaaaccccctacaacattcttcctcggccttgacagagtagaggtagactatctctagaggagtggggaactcccatcctaaaattttatacaaaacccttaaacttgcaaggattttgtaagaaatgggaaccagctggaatggggcgattccaagatggttgaggaagtccttaaagtaatctcgcagggcgagaatttttctggccctgatatgttcgaggctccaagtgcctatccctatcaagccatagtactcgcctcgccactagtccccttggatgcctcgcgagtaagtcgttctggtgggtaacagctaagcttgccaggggctgcagatcttactcggctttttcatttttgatcaatgccataagtccttaggatgctacctacatagtctttgatggctcgtaccctcgactcaataagttcagcttcgaaggtaacgttggggtcttggggagtctttgattgacgaggcttggaagtcattatttcgaagtccaggtcacctagtgaaaaagcaattgtgactaggtaaaaataagggcttagctaaaggaatagatgataaattgggaggttcaggccaagcagcatcttgcaagaaacgacatttactctctattatttcttgtaagaaacgcctatgacgactagcaatatcatcctgatgggtttttattaaatggtatctaatttttgcatcattcatttctaatttggacttgggttttgaagttttgcgtttgtatgggatggcaagttcactaggacactcgatttctaaggattctgtgagataaacttctgaaccaaattgggacaattttacaaaacaaaaaaaaaaaggcaatcccaagtcctggatgaaatttatcaaactagaaacttacaaatatgagaaacacaaaaatttgcactttgcctaaaccctaaaaaattacccagacagttttaaaccaaaatcactaaaactaaatagaatggcaaaatgtagactataaaaataatg

SEQ ID NO: 36036 - DNA, 3069 bp, Cannabis sativa
tgggagcactattgttgcttatctcactggttttttgtacaagtaatgccataagcttctgacattgaacacttgacaagctagagacaatgtctctttccagtggcatttcctcagattttccttcattagcaacagagaaatcaacaccagcaaacttgcctagggtcccttggcatcacgattggggaatctgccatgaagtttgtgaccaaagggatatccattgagtttgtaacatctttcaatcgagtgtccattcataccacagtgagtacaattgtacttccatcgaaatggttgaacagctccagcaagctgtctagcattgctcgatgtggatttatccaagtcagatgagttgctaattcactacttaatccactttgcctctcttcttgaaccacaacaacataagccttattcacacttggaagaggatcacgcatcaagatttgagatctgacaaagctatacgaatcattcaaaccaatcgatcttcttcctgatattcctgaataattctcattgcaccacatatgcatggagattgtggtctaaattcccttatttgatcccacagaaccttcaatcgagtatagtaggtagtcacagagttcgatccttgagtaagactctgcattgtctttttcgcttcaaagattcgaggtgcattcttctcattgaatctctcatgtagttcagtccatatttcaacagcattgtcataatacattatgctatctgcaatttcatcaaagatagcatgaagtatccaagaaatgacagtgctattgcatttacactagctatcgtagtcttcatgatcctcatcaggttgtggaagcttccattgacgaatttaatcttgtttttagcaaccagagcaatcagcattgctcttctccaagtactgtaattctcactccccttgaggattttaggaacaagaacaataccatgattgtcgcaattggagagaaaacatggatttgatagatcattagcattggtcaatcgagaattttctccgagaacagagaacatgttcgagtcattagaattgttttcagatccacaattagcacgagtatgaactcctcctcgtgcttgatttcctccacctcatgccatgacatatcaacaacaaaccagatccaaatcaggaagaagagcttgctagctctaataccatattagctcgagtgagttgaaaacagagtaagaaagaaagagagaaagagaagaagaagagaattgaatcaacagaactattattcatcgaaaactgaaatgatagaatgtgtttgacagcttatataccagctgagattacaagagaaacaaacacacaaaccaactaaccgacatccaaccacctaactaactttctaactaactaactaattcactaatcaagtttaataaatccaaacgataccatatttaatatttagacacttctggcgtcaacattcagaacttaatatttcccttaattgtcaagagattcgacactgattttcttaaaatttaattttttttataaataattttttttttgaaacagcaattcttttattcatttagaaataatcatttgttgtgagcactgaagagtacctatccttgtaactattcaattgttgtggatattcttttttttttatttaagcatatatattacaatacataacttgggactcgaattcaaaactttcaacacacgcactctcctatagccacttgagctagcctcaagtggttgtggatattcaattaatattcactactgcttcctactttgcaatttcaaaataagtcaaaccaaatactatggaaaacagatgtcttccaccttcaggtgtggtttctcttccactaattttcttggtcgtgggcaaccaacaccagatcaacagtcttacctttgtccttgaccgaccctgcaatccttcaactggttcacatctctctactcagcttcaagagtaaaactaacaaggacctctagtatgttttgttttcttcaagcttggacctgcattttatttttgtactcctaccataatatacagatttcaatacccctaaagatgtcaacttttccgagtgtcaaaaggacccttcgactgtgggaagaaaattaggcaagttcttacaaaagatgatggtccttaaccacatttttagttgatggtgttaatcttctatgtatcggactattcagctaggatcactataacaattgattaatttttgtaagcttctatatttggaggcatcattctcttgattcgccctcatggcctcaagaaagtatcctctcatatcaaaagacgtgtataatataaatgcacaaaaaaaaaaattgaaatagatgaagatcattatagttcgtaaaggggaaaaaatcatgttttattttttccactattccatacataactatactaaccaaccagtcaatggaactacataaatatataaatctctcaagtcaaaaatgctccagcaacatgatggaacttcaccttagttccgtccgccatttcaccacaaatactttgaaagcaacattccaaaccaaatcataagaaaaatctcctccggctggtgtccatttccggctaatattcaataaggagtagaagggtcagaccaaaaattgaataaaccaaaccaaaagaggaagtcaaaaagaaattggtttaagcagaataccttgtgaacccactcgtattcgccacctttggtatcaaatgttccatgctgcaggctggttaactttaaggtgaaacgaggtccacactcctgtgtgtatgataagatgataatgcattgcatcaacaattataaatcatataagctccaagaaaaataagcagcatatctatatggccaatatcattacacactaaaacacgattcttgataataatcgccaaaaatagatgatccttgttccttgtactgacctgaagacgagcaattactttctgttgagggacctcacccttagcatcctttgacttacctttcgattcagcctgcttagtttcttttgaa

SEQ ID NO: 36037 - DNA, 1905 bp, Cannabis sativa
  modified_base (1289)..(1290): a, c, t, g, unknown or other
ttaaatctaacgatctcaatagttgagggggcatgatttggtacatgtcaaagtttagggagaaaaattactaattagccttatttaaataataaaagaaaaaaaaatagtaacttttatatattcttaatgaagcatagaatgaccatcaatataattaatttttttttttttatttttttacatcttatctatattacaaacctttttttttttttttttgatgtataatctttcattagagatgatttaagatggcccgtgccatttttcttaaaattatgtaacaactttgggtagtgtgacgaaatgaagtaaagcccatggacacctatagtgtgtggttgaggcctagcgaagacatgagtatagcgctatagcacaacccaatagctctaacctttttgtctacctctttgttcatagcagtctttggtcagcattcctatatgagatagtaagtgctattaaaaatcactacacttcattacttttcaagaatttttgaggtaatgtagaatacaatatgaatttctagaaaatttctaaatatattttgttattatagaaattaaacaaattaactagagaggtctaggacttataaagtcttggcaaaattagtaaataattctagatatttgaatgtgcatgtttaccatagacttttgctagtataaataggataacattgaaaaccaaaggttgtgtaaagaagaaccaatcactataaaccacttagtactttactacttcccataacatactaattaatctacactcccccttttttttttaattatacaaaacacaaatacaacttttttaattttccccatccaaaccatctatcatcagcttatcaacagtacctatacactaccactactattcagcataacaactatatacctctatattatcatctaactcatcataaattaaatgtaaaattataactattttatttttatacaaattatcaaaccaaatggtattagagcttcattcgatcatattactaggagtaatatttttgactcaagtcgctcttaattccttacctcttctaattttctatagagaaaactataatttttgatccattataataacgacttattttttatcacaaaaaatatgaaaaattaatgaagagagattcactattctgaaggacattacctccatttcggaagattaaaagaaggcattggaggataaccaacaaaaagagtttccacccattatactgcatacaacaagtcattgttggaacttattttacnnggatctagatttactaacatgtttgtttgattaaccataaatatgaactctctaaaacattgaaataaacacatataaagtttagaaaactttacattgatgcagcagaataatatgactcattccgctcagatctctttaacacttgttattttctatcatagagtaataacaagatctgagattggatctccttctcttcttcactttggttaaccaccgtctttagcactatgattgagtacttgacttgttatgtgtaggcatggtactctatcactaaagacttgaagattgatgaaaaataataataaggattcgaaatcactatgaaagagtctctcatctactagttgtctgacagagttagaaaactaggtttagtttggttgagataggatgagttggatgagaatgagagcatcatgttccctttatagtatttcaactagggtttaggatttaattatatggattaaaaaaaaaaataatgggggaaaatcccttctagtggccggctacttaatgggcctcactagttataattttaccactttatttcaaccaatcatttctttcaataatgtcatattttccaattttaatcctataaat

SEQ ID NO: 36038 - DNA, 1039 bp, Cannabis sativa
tgtttattatctaacccaaaaaaagaacatgtataattatgttatgaaagattttattaaagttagacaagcttaaataattatatacaaatgcacaatatataatttcaaaaacttcaatagattctatgcattcgctagaaaataataataaaaaaaacttaagtaactaatacaattccttagcaaaagaatagggattatgtcaaatatttttacaatttttaagattttatcgtattttatcgtatttttttatttttttatgttgtattcttgttattttgttatttatacattatttttttatgttgtttggatgttgtttttctattatttttatgttttttttttttgttatttttatgatcaccgtaaaaatttaaacataaatatgtaaaaagtttgccatttatgtaaaattttcaaaaaaaataatattggttaagtaataatattattaataataatcttataaaaagtgagataatattataaaataagatttaatttaaacacccctttttgtcctatactaaaagaaaaaatagtttattgagggtttggtgtggtgctaatccacaacataaaagagagattgggcatatcgttaccatttttaatttttttttaaggagtttgaactaaagataacaaccgatttaggtttggatatatgagattaattatgcacttataacttcacgaatactttatagacttcaaagttgaaaaagttagggttaaattaactagttaaataatattatatccaaaagagattacatgttatatatttcttagaaaacaaacaaaacaaaactataatatcaccaattaatctctttcaatgaatttgagccaaaatgcttttttctaaaattgttgacaaatgatctttggtgtcaacaagtgtcaccgtatttgtgacttttaattactctatcttagcaaatatattatgacatcacacataacataagtagtagcaaattttatgacaattctttctaaaccatatatttttttcagaaaaaaa

SEQ ID NO: 36039 - DNA, 1797 bp, Cannabis sativa
  modified_base (122)..(132): a, c, t, g, unknown or other
tcaataataaatgaaataaatactcataaatgaaataaatactcaaaaaagtatcctatattattaatcaaaaaaatcaataaaatgctttaagacaacataattactagtaaacaaaatcnnnnnnnnnnntaaaattaattaatacaattaatataattatataaaatagtaataaatatgctttttgaaatataatttgtttgactatagatattaaattaaaaaaaataaataataatagaaagcatttaatagctatttaatttgaattaaaataaatctctatgtaaaagtttgagaaataatgaagctacttaaattatattaaatttaataccatgcaatcaaattaaatgaaaaaattgacaaattaataccgacaataaaattaaaattaaaaaagaacaaactactaattattacattgcaatacaaaattacttcaaatatcaaaaacaacaaaaacgtttaaaaaacaatataaatactatacttaaaacagtagagaaaataatttaaataacctaatttattaataaataaatataaaatttaataccgaaacggtaatcacgcataaaactcggctcagccaaccctctagattccagctgtctttgttgaaaagttgttaatactaataaattaaacaaaactaaattattaattaatatcatataaaacaaaatcaaataagattgaaaaattaatacagataaccaccaaagaggccaaatcaaatcaagacaaatagaaagaattaggaaaaacaaaacctactaaaaaggaaagagaaaaaaataatattaattaataacataaataaaattacaaaaacgtactaaatatatataaatattgcaatcaaaaataaaattaaaaaacgagaaaatgtgagttaaaaggaaaaattaactatataaaactgaaataaattataattaattagaaattaaagtttttcaaaaaggaaagaagttaaagcatacaaattatttgtatactaaagagtataaaaagaataattcttaccttaaaaaaaataaagtaataaaacaatcaaaatacataactcacgcatatgccatcatgaaattgagtcaccgtccgctcatatacatggcaacccaaaaattactcaacatttaagaagctaataatggtcaacctgcaaaaatctcaggccacagagtgacaactagcgatttgcgccatcacttatggaccttcgactgaagtcgctaccacctccagtcatcggaggcaagggataggactgagagtttccaccggatccaaaataaccgtcctttgtacaatcaaccatacagtttaataaaatcatacacattggaaaataaacaaaatagaaaaaattgtgttaaaggaaagaaaactatggtagagttattaaaacataacagaacagtaagaaaacactaaaaataatgaaaagaagaaaacttatcagcctagtcgatcgtagagaagaggcagacatgaaaacacagagattttaatggtgacaaactacataataattcattgctacttactcgcccatgatttccctttgcacgtatgtcatgtgtacttaactcattggtgaagataaatcggaatgacgcagataaataactaagggtttaatgcttatatacaaccgtatgtttgacggtttggtcgtgaataaacttggtccttcatctgcgtcacttaataagtcctcattcttaagttggcttggcccaatctaagcactatcttatattttggggctattttcaaaaatat

SEQ ID NO: 36040 - DNA, 1149 bp, Cannabis sativa
ttgaggttgaagaatgacgacgatgggaagccatgtatctgtaggctgtagcagcgtctcttcataacagagttggtttgtttaatgttttgctgctgcgattagggtttttagaattggaaagtgagtgagagagggctgagtgatgagagattcgtttacggattaattgaaatgagtaattaaataatattaattatttaaactaacagaaatctcaagatgattttttggtttaattattgggtttatttattaacggagatcaaacctattaatatcgttaaatttaacagaatattctttaatttttaaggtatattctgttaaaccaagaaaccaaaaaatgccgttagataggtacttttaatatataaagatatataaatatatatagttagtgcccctattcaactcttttagccaaccctagttactcattccatgtcttttagctagcataaataaatgtcatattttatcatattctttatcttttacagataaaaagtctagtaatctatattatagcttcacaccccaaatacatatatttagggatacgattttctcccgttattgtactttcacggattgtaatccatgatgtacggcagccgtcagatgagggagttatttgatttaacggctgagattgatttaggggtaattagggttaaaaagtagaaacctacctaacactcatttaatgtaccctgagacccatctaatgtaccacataatacattccgtgaaagtacatcacaagacaaaatcatattcctatatatttatatatttactaatatcctagcgatcttgaaatcgaacacatgcccactctcattttcttatttgtctccctcaccactagagttgaacattcttctaatatataatactaaatgtagatataatacattcttttaaggttaattaagatttttactgcttaaactttgacatgttacatatgctatcataaaaaaaaaactgaaaataaaacaccagaacatatttatgggtgactgaaatagttttttagaagggtatactaaattttccatatttatatacatactacaaaaaattactatttttagtgataattttttagtcacaatatgatttttttgtaactaaatgtga

SEQ ID NO: 36041 - DNA, 1368 bp, Cannabis sativa
tggacttgcttgacgaagcacaagagaaattttttaatgatcctgaaaaatttgataattttctaagaaatgtagataaacccctattcgatggctgtaaaaaactaagattaccaactatggtaaaattttacaacatcaaagcaaaagatggagtgagcgataaatgttttactcaatttttatttgggtttaaagatatctttctatttgacaattgcttcctacaatctacatatgaagtgaaaaagactttaaattacataggattgaagtatatgaaaaaatttatgcatgtctgaacgattgcattttatatcgtaaggaatatgcagacatagattattgcccaacttgtgatttatcttgccatgaagtaaacaagattaaagagaataagaaacttatcccccaaaaagtgatgtggtgcatgccgtggattccgcgacttaaacgattatatcgtagtgtagaacattctaaaaatttgatttagcgtgagaccaagagagtgaaatatggaaaacttagacatcttgcagatcctcaagcttaaaaaatgtaaactacataaatcctaaatttaaatctaaagcaagacacattcttctcggtttgtctgcggatggagtaaatccacatagatctctatgtggtcgtcaaattttcattgggtggttaaggaataccattctagcaaagtttaacgaaccaaattatggagtattcgatgtgttgagtcgtattgcccttggaccaaattttgcagtagtaaatcataaagcgtacattgtaaagggtaaatgttttcatacaaagtcaagagatgatgcttgagaggttcaaaatagtggcatacgtagtatcatagaaaccattcattttgcaagtgcaaaagatacaaaccgtattttaggtaccatgacgtattatggggttattgaaaaaatatgggagctcaattattttgcattctaagttccactttttaaatgtttttgggttgacaacaatgttggagtaaaaactaacgtgcttggttttactttggttgatttaagtaagagaggaagcaagaatgatccatttatcatggctagccaagcaatacaagttttttagatttcttatccggctaatgataaatggtccattgttttatcgacaccagagaggaggttcttagagaacgaagaggatgaggagagtgctgatttatgtcataatgacttcattgttgggcaaccaattatgaacaagttgtgaaaattgatcgtaaccctgaggaagataatgctgaatacattattaacgatatcaatgagggaacatgggtcaatttttattcaggaaaacataaacaaaaaa

SEQ ID NO: 36042 - DNA, 3628 bp, Cannabis sativa
ttggatgtattggagttttggacaacccatccaacatccgatccgatccaatttgatatttaaaattaacatccaattcgatccgatcacaattggacatccaatttcgacggtcgattgtaattggatcggtcgattctcattggattggattgatttatgcacacccttaagagcatgcacaagtacaacattatttgtaatctcataaatattacgactaaataatacctcaaactcttaaggattataattttagtgttatctttttataaaacaattgtaaaacaataaaatagaacaattaaaaacaacagtggaacaattaaaaaacaaccattggaacaacaatgaaaatttaacacagtacacagtataaaaaaatgcatagtatttttgaaaaaaaattccaccccaccatacaaaataaaatgaaaattttcagtatgtggtataaaaactcatatatcctataatgagaataatgtagcatacacgttaaatttaattattttttatttataaattaattttaaattatttattagtagaaattacataaattataggaaaaatttatttttttatgacagttttttaattcatttaagctatggatttttaacaatctttacctttttatgggttaatatataccatatttttgttaaaatattttgaaataccatatttaatttgctttccaaaattctcgcagtcaattaaatcccttcatatctctcttcatgcatcattctaagagaagtgatctcatcattggagagctgataatcacgaaggatctcatcattgttgacatccagctcccacttgaggtgtttggtggtggaaccgatgttgcttgtagaagtagtacaagtggagagagccttggcaatcttgttgcaataatcggcgagtgcatcgacctcgacctcgacctcgacgcaatccaaggctttctgagcagtgacgaaggcttaaagatacttttggttgatggagagagatcgattgtggatcaaagattgcagcaaaaatgaggtgtttatttacgtagaaggaggagagagtgttgagagagaccaacagacctgatgactagttctcgtggtttccaatacttttttcaaaagaactgcgagtgaaaaaccaggagtgtctgcgatttttttttcgggtctgacaaactgaaacccaacgattctccacaaccacaacttcatttttctatgggtttgaaaagattttagcaaccatttatccaaagtgcaatcatcactatcttcatacttggttaactactctaaaacttattttacactcaattatatagttcgttgtttaataaacaacctactttttgattcaatattcaccaaccacttgaatacatgtccattaaattgcatcttagtttataagcttttcccattctggatgagcatacatgttcatcattacttaataagacaatatttttttgtaatttcaatagtcacctcgtataacagattgtccattcggtcaaatataagagtattctctatcattactgcatcaccatgaataatttaagaaatcttctttaccttagtgatatcactattctccctaacgttctgttatacgttatctttgtaacgtccctacttcaagcttctattgggccttctctccacggactattggcttttatatacaggtacgtcactctggctacgtcctggattgatcactgacccttcaagtcaactcgagtgttcctaacgtgctttgttctgactcccaagcttcttgaaaaaacttcctaggaactcgccattcctgaaatgacatcacctcagatcaaggactaaccgtaaaaaaaatttcgtgataggctaccaaaaacaagatacaccttgctaatttaggtagtcccaatcaatccattcaaatcccttacaactatgtagtcccatacctacatagtgtcagaatcatcatatacgacattccccaaggcgatgtgagatcgtatagctcccagactattcctatagatcacgggactctgactgtcacagtttgactcatgccccctttgatctcatttttcccccttcgtagtgaataggttaacccacataatcattgcctttaattcatctaggattccagacaatactcataaattgtcccacctttaccaatactggatcacttctaaacaaaaagattcttttctctgaatcaattaagtcgatgcctgcattggctactcatgtcccatgtttcgcttgggaataacatcaaatttaactcatactgtcattcctctaatctgtctaccctgtcaaatgagctaccattaaataacatacatgcacagtccattcagatttctctaactgaatgcataatgtttaatatcaatatcaatcgaaacaatacttataatattgcccataaaattctaacttgaatcggtcgaaggaccgatacccgagtccccttgagtcataaccggcacttgggttggacccatatactcttctattttaacatcaatctttcttaattgtgggcagattctttttagatgacccggaattctacaataaaacaagatttggctttatgttggctcaaatggtacatttttgcatcttaaacactcaggataaggtcgccattttttagtctcacattgaccgctatcctggtcaccctagaagttccatcccacaattggtggtttatttagtttttgccttctgatctgctcgtaagttggttccatgagtttcaccacatccagtggtacaacaggaagtgtcggtggtacaggaatagacacaagacgagcatgttgttctctcagatcttgaatctttttccccttgttgtctaatcatatcctgcatagcagaatttacatgtttccagtattgcagcaataaaggattctcttccttaccatttgtcccgagcccagacagctcgctaatcaggctattcgattgcccttactgtataatgtgtcacacatttaatccacatctttcaagcatttaaaactcatccagatatcaatatcaatatgcatgtaccatacacatattcttatcataatcatcactatgctacctttcccaacatactttctgatagtctaggcacgtaatctagtagcaaataatataaatatttgctatatcatgagtcgacctttcttcacagcaattgtacatattcgaccagtctttaggacctttaaaagtatggcagctctgataccaagttataacgctttaatctatagggacaccatgtgtgtgatttgataaactaatttaatactaatagatttatttaattattaaaaaaaacgtgataatataaaaacttgactaaaataaaacattagaaacgggcatcataacgacattaaaaatgttttctagggatccccattatgaaaggtttataaaaagactatatacgacgacaattcaaaacataaaatcaaaatacgcagcagatacaacctgaaaataactcttggcaactcggcacacatgctgatatggtcaacatgtacattgctggagaagattgtcacctcatggttgatctagctttt

SEQ ID NO: 36043 - DNA, 1149 bp, Cannabis sativa
cctcaacctcgtcttcctgctcaaaatgctcctgagcatactgcttggcccatgcacctcccttcaacttagcctcacgcttgagttgaatgagttcattgtcttaaatgagttcattgtcctaatgagctccctcagctcggccagcacttgatttcctctttttctccttcacaggctgaggaatgaaatcctttgggtagagcccgtactccacaaagttgtcctctgaggtcaacaaagtgatgttccgggcaacaccccacagctgagcaagcctttgagcactatccctgagagcaagtgtgaagggtgggcggttatatatagggatctgctagaaccgagtgtaggtggttcccatgccatccaccatgtaatactcctcaacaaaatgcccaattttgctaatggccttatcctcggtgcccgtcaaccacttgaagtctggctgagaaaaaaagaagtaccgacctgccttgtttgggagtagactttaagtcaaaaaaccagctcacctcgtgaggagaaggcataccccctttctgggtggcgtagagaacgaacaggacaaacacatacttgatgcccttgggagtgaattgggtaggagagagacgaaagaagtctgccacgttcctaaaatacgggtggaaaggcagcagtgccccttatttagcaagagcacccgaccaggcacacatccccgctgagggttggaaactcgattgtttgaggcaggaacataacagtccagctcgcccagatagccgccctgatcgagatcctgtaaacgtgcctcagtgaccttggacggagggctcacccaactggcgcccaaggcaccttgcctcctgtgaggaactgcgggagtaagttcctcagtgacgaagttcactccctcgaccaagatatcgccatccgcgtcaactggcttcccagcctcgttgtatcccccaaagtttgggggtgcaacctccttttcttcctccgcctcagaaggactaccaagtcggacatcgccctgttcctctatctcttagactttggcgtccccttcgtgatccccctcctcccgcacgggtggatcctattccgcgctaggcaaagtggcatactaggccacatgagggtcagacgcgttgactt

SEQ ID NO: 36044 - DNA, 1351 bp, Cannabis sativa
taaactatcaaaacattcaaataaaaaaaataaacaatatgaacaaatttattattaattgcaacactttaggtggattaattatatttaggtttaaatgctgacgctttacgtggcaacatctaataattttgttattttttttatttaaataaaaaaaatcacccaataatttttcataaaccaagaattctgttatatagccacatttttaaataaaaaaaattacccaataatttttcataaaccaagaattctgttatatagccacattttatatagaacagatttaaaaattcaattttctagtaaagaaactaaaatgttacttttgattctaattatttttttgataacagtaatgaaatatatgcttcacatacgttaaaatgattcatttaaaaagtagattgtgctgatataaaatttgatctcaaataattgtaaccattttttttttttaatttttttttaataataaaaagagaaagagttattttttaatgttaaaaaaattatgaatataatgtaagaaaattataagtaaactatgcaaatatggtgtatatatattgttttaaacctagtacttccttttcggttgaggctactgttgtggaatgaaaaggccagtggaatgaaaaggccagtgaaatgaaaaggccagtggaatgaaaaggccagtggaatgaaaaggccagtgtaaagaaaataatagatttaggttcattaaaaattgtacgtcttgtctattgacatgttttggtatgttgctgtttgagtgaaagtttatgagtgaaagtgtgttcttgttgttttgtggtacaattgaaaggtgaaaaggctgatctggtcattattttggatcgttatggcttcaagcagtcaacacgaagaggatctggtagatcggtatgcgcagattcaattggaagaggaggaggggggagtgttaatagctgatgaacaggagaaggaaactcaagcgtttgatgataggtggtgtttagttgggaaatttctcacaggccgtactattgactttgatgttatgaggcatatgttggcatccctttggcaaccagggaaaggagtttacatcaaggaattggacactaatcgatacttattccaattttatcatgaacttgatatacaagctgtcattgacggaagtccatggactttcaatcggctacaactcatttttcatcgtcttaatagaggagaggaccccagaatggtacgtttgcataagcttgacatgtgggttcaattacatgatttaaaatatggcttcatgtctgaatgggtagtgaaacatgtgggcaattatattgggacgtttgtt

SEQ ID NO: 36045 - DNA, 1790 bp, Cannabis sativa
  modified_base (1379)..(1379): a, c, t, g, unknown or other
  modified_base (1537)..(1543): a, c, t, g, unknown or other
atataagttttctaatggaatctaaatctatcatttttttttacaactccagcttcaataatagcaaaacaggttacagtggatcgccacgaacacgaaacgatttttcacggatcgagtgagggttgaaaaaattagacacgagtcgacacgcctgacacgaaatatagaagtggatcatataaaatatgacacgaactcaatacgatgacaggttttgccactcctacatcatattgtcgcgtgttgtgcgttgtagcacacacaaaatacactactttttgttttttatatttatttaatatttatacatgtttcattgttaatagtatttatgaaattataatgcatacttttaaaagtagtgtactgattcactcctacctatttatttcggtaataaaaaaaaaattagtttatttttttttttcatgattgtgtatattatagttatttaagacatcggtaaaattttgaaaaattcaaaaaaatttaatatgtcgaaaacaaagttcaaactattcattgcacacgtcactcttttagaggggtgaattgtaaaagcacattttaatttattgtgtgtaaatttaaatataaatagcataaataatttttattctcaattatgatttaagtaaaaatttattacatttttgtaatttttgaaaaaaatatattataaatttaaacataaattaaaataaaaattagacacactacacatcacattcttattttttagatataataattatggtagttttaataaattaatataatattaagaaatattttttagtgttgtgatcggagtagaaataattttttacaccaaattagtgctaccgtggcactaaatttaatgtgctccttgcagatgctctaagatagtgtggttggagtgaaaaattaacttcttacactaaatttagtaatatcatggcactaaacttaatgtacttaatgtactccttgaagatgtcctaagactatctctaatgggagataaaaaagttgagctatattttgtacaaaaagtaattttgtgctatttttacatcaacttttattattgtgctccaacacataattgtaaatcttgatacaaaatttaatatgttatttaattctcactgaataatttattaaaaatataaaataattataatgcaaaggtaaatgtaaaatttaataataataatgtaagtgatttaatgtaaaaaaaaatatgttagttaaaatttaatataaaatattaaaaatggcataatagtaaatataaaaacataacatttattgtgatgtaaattttgcatcatgctatattgtgatataaatttagaccacttttgatttaggggtgtgcataaatcganccaatccaatgagaaccgaccgattcaattacaaccgaccgctaaacattggataaccaattgtgatccaatcggattggatgttatttttaaatgtccaattggatcggatcggatggtggatgtggtgtcgaaaaatccaatacatctaacatccnnnnnnnctaattagtattttcatttagtttgcatgagtaattaaattttatattgttatacgtcaaatttatatgtataaatgaaaattaacattaaagttttactttttttttcttggattggatggatccagtccaatccaatacatgctggatctaaaatattggatggatccgatccgatccaaaaaatactaggtctaaaatattagattaacccaaaatacacaaaaatatatatgaaatacatcca

SEQ ID NO: 36046 - DNA, 1634 bp, Cannabis sativa
  modified_base (155)..(156): a, c, t, g, unknown or other
  modified_base (468)..(474): a, c, t, g, unknown or other
  modified_base (1413)..(1415): a, c, t, g, unknown or other
tagggatttcactatatcacaataaatcatatttatttaaacccatatatactaatactatatgacattgaacttcgagttcaataaacttcatgttcaggttcagtagttatgaaattatttcatttctaagaatgagtcatacatgtataatnngaaatacataaatttataaattttgtaaatacatgatcatatgatcttatcacatcgataagaaactatgcaataaaattctaacaatggctcaagattgttaaaataatttaacttaaatattttcttcaaaaataatttaagatatatttattttctaaataaataaataaaattatatatattataataaattatgttagaaatataattatcaaaaaaatataattttatcttataaacaaatataaaagagaaaataaatgaagttatagatatatagcttgttttttgacaaagtgattagaatcnnnnnnnaatttacgacgcccacgtccgccaccggcgctggaacctcctcgaaccaggatagctcattctctaaccgtagagcatgcttcgccaataagtgtgtctgtcctatatgtacgcgaccactattattcaattctacacatgatatataggtttcatgtactttgattgtgtgtggtatttcatcttcttgttatttctaatttcaactggaaatattttagtagtaaatagtaccattgattatttaaaattattacattcacgtcgaagaatgacgttaaacaagaagaacattattataaattttttaagaacttgttaatcatctataaaaatataaaaaattattcagtaatttcttttacaatattttaatgaatttttgaatatagtttttgtataatcttcaagatgtatgtgaaatctgatctttaatgtatgtcacttgcaataatttttaaaagaaatattgtaagtaataacaatgtataataatatgactaatatatagaatatggacactttttcaaattaaataaattcaattcatatcattctttgtagggaatgatgaacaataaatacatgtctcatgtatttaaataacattagtcatgttcattattattcttatactttgatgttttaatgcaattctctcaaaattctttttgggtattcaaaactcactataaaattacgtcaataataattattttaatgattcaatagttttcttcacataaatataatatttttttgacaaatttaaaatattttctttagaaaatgtttgcaaaaatctaatcgatattagattattttttactgtcctaaaagaatacaagaacatatatatgaatatatattcatttcttttgttatatttccgtcagttatatgatgaatattatgcttgcataatcttcaggatatatnnnagattttattgaggacgcataatatttattggcacaatgacagttattgaatattgtatgcatgacgtatgtactccccaatatatgatgatcacttttttttgggggaaacctaaaatttaattttaaaattaccaaactgcccttgtaaccacctatataaggatttaaaaattattttatactcttttagctatttttattttcaaagaaaaccag

SEQ ID NO: 36047 - DNA, 2017 bp, Cannabis sativa
  modified_base (776)..(779): a, c, t, g, unknown or other
aaataattaaaataatagtaaaatatcaatttgtagatttatgttttaataaaatattcaaaattgagataattaaggagagaagagaaaaatagtatatattagacttattttagaatgtcatgtcacctcctcatacttctcctttatatatagatatagattgaagaaaaaagtggtatatgtgcttgttaattaaccaataatgttgtggcaatcaattttaaattttggtccgttgatgcaattaatttttaaatttattagtaattcaatagtttaaagaatttgactattaaaatttaaatttaaacaattaagtgtaagtagattaataattgatagaatttaactataaaacactaaataaaaaataaggatgctaatacaggaaatgtttgtcagtatgtgtgtatgtggccaattagggtgatgtgtgtcaattagtctagtctttattattgagtactgttaatgggcaccaatggtgtctagcactttctttgtctgtcgtcttgcaattgactagcgatatttcttaaaaattattatattaaactatatgagacctgatatttagttagaccaatagcgatattcagtgccagggtcgtgggggggaagggggggggggaatttgggtccgagtttgatcggagtccaaaatattgattaaaaaaaataactgtttaaaaaaatattgaaagtagtttttctttttaaaaaaaaaaaaattgattctcaattaaaaagtgaaaatagttttatagaacatnnnnttgaaaaatattttcacttttccagttttaaaaacaaaaaactgattaaaaaatattaccaaacgcaacctaaaagttatctcacttttagcgtttgtaattgcacaagcaaaaatgtgtcactacgcttacaactaatcccaaaatcgattttttaacgataaatcctcccaaaccagtgttctattagcagtttaccatttttattcaatttcagttattaactgtcatattgaattgtccacgtgtatacaatatacatgtgttgcaatcatattagtctatgtaattactttatttaaaaattaaaagaaaatcatattaaaaataaaaataaaaaaatacataattatattttttcctattctctctgtaactccctctctctcccccaaaactactacctattatggtttatattttgaaaagtcgataaagatattttaatttataaataagaattgattattttgatatatgtgaatgaatgtcggattattaatatttgatattgaataatttatatataaatatcgaaaaaatttctactcacacatgagattgtgagttgtattatacgaagaattaagattacttagccattaataaaacaatcaataacatattcaagattaggaatctttaatcaacagttactaatgcggttcactgatgcccattattgtgtataagtaatctcaattcaaattattgatatagtatgacatctaagtgaatgtgctgcatataaaaaatattatatatgacatggaccgatatgtaattaatttgtctttatcaaacatgttgtttactataaagacctaattcatatcataaatatgatcaatagtagattgatatgaatcctgagtaatcatgaactcatgttcatgttattgttaattttactttaattatttgttttctttgttcctttttaacatagataattttttttcttatttttattgtcaccaaatagaattaagaatttaattaattgtttggtaattaagtacagttcttgtgggattgaccttattcctgtaagtttattacttgtgaacgagggtgcgtgttgaatttttcacaacaaccgaataatggtcgttcgctcttcgagcatctacccagatgaaaagcgtttgattctcgttccttctcgtcctctttgccgatcaactatctcatcctctcttgacatttttgagcgagaaatcaccatgcatttgtcc

SEQ ID NO: 36048 - DNA, 1786 bp, Cannabis sativa
aatcaaaatcaagataactataaaacaaccaaaacaattacaacttcataataacaactataatacaattataaataaactacaaaacaaaatttaataaaaatgtatttttgtaaataataaattttaaagagtaaaaataaaaaataaaatcgtgtgaacgtatttttataatttttttcaaaattttttatcttataaatttttcattttaaattgcgttatgtccaacatcatttattttgtatgccaaatatcacgtaccaaaattcataatttagcatcacaaatgttttatagatattttaaataataaaatgatactacatgagctttacagttatgataaaaatatggtaaatgtattattatttacctcatttttggtatttctattagtgtgtatataaccaataataatgctgaacatttgtcatggagagagaaaatactgggcctaacaataagtgccttaaagttgaagttgaagcattgtcccgacaaaactagcccaataacaattacatcatcaaacttggtgaaacaaaagtaattttatcagtaattgggcctaacaatagtgcccacaaatgctagcattagttggatatacactatgtttagtatgataaaaaaaaattaaaaaaaggaagaaatttacatcaagtattattttttttaaattaaatatatatattttttgtatttttacaatgtcaacgaaaataacacaaaattacgtgaaagtaatagaaaaataacagaaaaataatatacaaataataaaaaactaacaacaatacaataacaaaagtacaatataaaaataacatgaaaacataaataaaaaaaaatctatattttcaacaaataattatcttaaaaaccgtaaaattatataaaattttgtatagtcatatttttgtaaattatgaacttcgtgttacgttttattttatggattatttaattttgatttagttgagcaacttgttttaattatgaacttctctccccaagtagttgccatttccatttggctaaacaaatcccttcagaattattttattttatgcaccaaattaagattgtgtccataattattggtgcagtatgcaaactttggtatttgattgattgtagaatttgctaaccacaaacgtgagacttccaaatatcttattttcaatgcataatttacttattaatataatatttaataaatagccgtgttgattgaatttattaaaacctttttgcgttaatcattacattaaaatacattttatgttttagtcctgctatgttgacatgcacaacaatagtccatatgttcaatcattgaattaaaaaaaaaaaaagcctattttgcatcatcaaagtatgagtttatagaactttcaatcaaagttgaacaaaattggtatcatattccaattatttaggtatggaaatatagtacagtatggctttccaatgtttttgcttataagtcatcatcattttttttattaaataaattatcatcttacttgttccatttcttgatctggtcaagtttggtggctccattaccattataataaatttaaaattctttattttgtggtcccaacttaaattattattacttcttttcaatcatgtttctgtactaaaaagtaaaaaagaaaaagaaaagaacacgcatatatataaacagtcaatttaattaattgatttgttacttgtttactagcaccaaaacaaactctccacttgcaattttaaaaacttttcttttctt

SEQ ID NO: 36049 - DNA, 1020 bp, Cannabis sativa
  modified_base (949)..(957): a, c, t, g, unknown or other
aactcccagccattttttgagatattcttctagtcgcacacctgcgattttatgccttggtgggctgattggtttttcacgagaatccgaatcagccttccaacaagatcttgaatttttatgcgggtgaggtcacttatattgttttcgaacattcaccacactgaaaagatcttttatctttcagatgagcgatttttcggacagccagatgcttggctctagaggcaatgctttcgacagcgacaaggactaggaggatagctttatcccaacctcgatttcaaaagaggagacaccaattgctggagatgcagagttaggtccgttgtcctctgcagatatcgagaggatggttcaagagctcgttgaaccatgaactatcgagattcgtgatagcgaatcaacaatatcagctcgcgaacatcttgttcactctaggcatccccctaacaccgaagtcgaagagatgggcgaggactgggaggttcctgatcgtgaatcagatgaggatggagatgtcgaagggagcgggacggattcagttgataacacgcaactgaatgagtcgttctcctgcgaggacttagtttctcgagtcactaaatctgacttgtccaccttttcgaggttaaacttattgcgactcggcaccatgcgtcctcgcgccactcaaagactgcaccttcccttcaccaaccccgtgatcatacccttagaggacgtcgtagtttccattcccattcttcgatgtggagtatcaatccctttccatccattcatctccgctattctcaagcggtatgatgtgtccccttttcaactgaccctaaatagctatcgcatagctttaggtttttatgcgatgtatatggagtacgcgcatagggagccttcgatggaggagttcagttacttttatgacataaagtgttgggttttatgcccnnnnnnnnnctctatttcaatgtaatccatattgttcaatatcaataaaataacagaagtatttttcattca

SEQ ID NO: 36050 - DNA, 1656 bp, Cannabis sativa
cgattgggtccaccgtgggtcaaagtggtgctgctccgtcaccgtgactttttggtttggttttgagtgtgggttgagcgagaggatgagagaggaggctgatgggtttgggatttcaaatgtgaggggtattatggggaatataataatgtggtcatatatggccaattttaataagtatggatttaggaaaaaatattagggtattttatgcatatttttttttttaaatttcccaatggtttcttgtcaatacgcgaatcaatagtttgtacatccttgtctcgccaaagactgtgcaatctgcaagttataaatatgttctattaattatgcatttaatgagttattctattataatatttattgatataattattaatatttttgttgattcatattccctgagattgacacgagtcaccttctgaagtatcaaccgaattttgggtataacaatttccccttaagaagttcttttcaatgaaaagtgctttttaaatgattacagatggtatatttgtcataatctgttttgaaaaatgcatgccttcggttttggcagttttgtggttttaaggcacatcatgagcattaaataaccatcttttccacttctctcttatttctatttgttggatcctttgtatttcaatctaacggagtccaaacgcaatggtataaaactaaaaaaggaaccaccttttcatcatctttgccatttcaaaagttttttaagcttttctgtgaaaaactccatctcagctttacgaagctttgcatgccctcactgtcactcactttctttttgcaaatatatttagatctattctttgacctcaaggattcgcgaagatcatcatgtcattcgctccatcactagttgcaaaatcgctcatcgcaccacaacccgatttcaaacagtaagtgtcttatccttttttttttgtgttttcctttatatttttgggtatgatcattatttttattgtctacatttttgccattacgtttagttttagtgattttggtttaaaactgtctgagtaatttttttaaggtttaggcaaagtgtagatttgtaggtttctcatatttgtaagtttttggtttgataaactttcatccaagaatcgggattgcatttttttgtaaaagtgtaccaatttgtctcaaaggttatcccccagtttccttagaaatagagagtcctagtgaacttgccatcccatacaaacccaaaacatcaaaacccaagtccaaattagaatatgcaaaaattatagaccatttaataaaaacccaccaggatgatattactagtcgtcataggcgtttcttacaagaaataatagagggtaaatgtcgtttcttgcgatatgctatttgacctgaacctcctaatttatcatctatttctttggctaagcccttgtttttacccagagttataattgctttatcgcaaggtgacctggactttgaaattatgtcttccaagcgtcgtaaatcaaagactccctaagacctcaccgtcacctttaagaccaaaattattgagtcgagaataagggccatagggaactatgtaggcgaagtcttaaggacttgtggcatcaagaaaaaacaaaagtgtcggggtcgatctgtctcccg

SEQ ID NO: 36051 - DNA, 1313 bp, Cannabis sativa
gttaaaattctttataaagtaaggatgtgattagattaatagtctaacatatagatatattctatttgtggatgttcgattaagatgagatcttataagcctcataaaaggaatatggattccaaaatagtaaggaaatatactttactgtatactccagtaattaaagagttacaaattttgtgatcccacgctatggttcaattttgagatgagaaactttaataattttgaggaggttgagtttggaggagaaataagattattatagatattgttcttgagaaggaaatgacattaaactcaattccaactatcacgtttgacagtgtttaggtttccatgactttcattgatcaataagtgaatccagaaccttaataagacaatattaaacaacttctcatttaatatatgataaatatttcagataatcaaactcaaaaacctcaaagatcagtgccattaaagaaatccatgagagaaaggacataagaaaataatggaatgatagacaataatccaatcaacttttatcatgccatgaaggttccaactctcaaaaccggattgatatcataaataaggaatacaaattgatgtgagacaataattttatggtatttttcctattgctatatggtgtaaaaccaattggttataaatgaatatttataatcaagagggatacaaattgcaatgtggagaagatgcacattatgtcttgtacgtaaagaattactcataaagtatatattcattttaaatagaatttcttttgttttaattgaaatactatttcaggacaatcatggcactgactgcttattatagttttgaattatatcaaatagattattaaagtgtcatttctcaatgataataatgatgacaaaagttatatagttcgacaagaaaattttgtatccaaagatctaaagaatataatttgaaaattaggaaaattcatgtataaactcaagtaagcttcttgtcaatgattacacaattttcattaaatattctcatttggttttttgatataaaagcttttgatgattgtgtatatatctgtaaagattgcttaagatcaaaattttggatcattaaataattagggttaattgcaatattgagttattaattatgatttacatgcttgtggatagttatttagttcaaaatgtattaattatgctatatgtggaattctcgttttctgtgaatgggttcggtggtagtggaaagcgacgttgggccagtagagagtcacgtttcgtgtagtataaaattattttaatagcggggtatta

SEQ ID NO: 36052 - DNA, 2082 bp, Cannabis sativa
ataataatattgttattagttcgccctcaatcctagaagttttggatgatttatggctggtagagaatcagatcattgttaaccctagtacttatgatgatgagcaaggaatttcaccattattgagaattgagaatattaatggagtatccaaacatggctatagtcaccaaaatcatcacgacagccttattcttcaagcctcatcagaaaatggaaatgtgttcgatgttgctcatgatcaacaaggtaataataatagcattaacatatgtcccaataataatgtggagtactactcaaacatgtttgttgatcaacaagaaaactcatctatagtgaatactaataatttgagcactggaaaagatttgatcattagctcaaaggtactgaagggaagaaaatcaagcaagtgtaataagaaaaatttgaagagtagtactattattgaagataaaagacagactttgattcaatccgaggttgaagaagaagaagaaaaagatacactcatcaaaaaacaagagcataatgctaaagagaggataagaaggatgaagattagtgagacttacatggcccttggttccttgcttcctagtactcgactgtcaaagctcaaggtataatttcagtgttttatttatgagcactagctactattatagagagtggtgtctaattagaactaataccttgcgattggttaacgatattacataaaagtcattatattgaattatataaaatttaatacttaaatgcatcaatatagcgatatgacactttagatagtgctaggcaccactaccttttagtatttgtctttatttatagatattttgtgtgtatggagaactttagggattgattgattcatgatttaaaaaatgtaattttcaaataaaattttaaattttgtggctaaaaatatgtttctcaaaatattcgaagtgtacacttgatggaagagaattatagccttattttgtcgaaaagtggagagaaaagagtagagatcagaataagatataatttggtgcatgttaggcattataactaaaaaactattttttatttttaaaaaaattaaaaattattttttgaaaacaatttggctcgtttggccttgtttttttaaaacagttttcagaaaacaaagttacaaaaaataaaaattttgaaaactacaaaatgttgatttttgttttaaaagccaattcacttttagttaatattgtttttaaaaacactaactaaacgtgacttgtgttttaaaaacttcaaaaactattttttgttctcatttttaaaaacaattttttaaaacaaaaaacagaaaataataccaaatatgttcttggtttttaatatttttggaaagaaaaaaaataaaaagggagaattaaaatatggttttttattttctattttcttgcagaaatttagatagtaatttggatttaattttgaaatacaatctagcaatcacaaattttgatgggtcatgcataaagttgtatttgaaacagaatatgaattagatctttgttggcatttggttagaggtaatgaaatagaatgaaatgtaaaagaaacaattgttatcttttgtttggttatataatgtcattttaatgaaatgactattctataattttagtgaaataactgttctattttaaaattgaataaaaaacaaatctaatgcaagagaggataagaaaatatttaattattttattttaattttgttatgcattttaaatttgattccattcatattcatatttctttctcattcttattcgattcatttcaactaaacgtcatcttaggttgtgtttggttagaggtaataaaatagaatagaggaatgactattttatttgaagatggaaaaaaaaaaggaccaatctaatgcaagattgattatttttttttacattttaaattttattccattctatcttttcatccattctaatgtcattctcattcttatattttcatccattctaaccaaaaacaaccttaaattatttatcaatttaggttaaagcattagctgctagggta

SEQ ID NO: 36053 - DNA, 1074 bp, Cannabis sativa
acgtaatgagtttggtgaagtgattgcagcactttcaatgctaatgaagggcaacttcttgtcgcatgaaatggaagctaaggctttggtttttggcttaaacatgattttgcaacaccaattgccaatcgattgtgtggaaactgatgctctcttggtctcaaatgctctacgagctcccttcaattcaatttcatcttttagtaatttaattgtcgatgtacttagtcttttatcctttttcccaaatgtatttgtttctcatgtcaagcgtgatgccaatatggcggctcatagcttggctaaacatgagttaggggtggatgaggcttgtttttggttggagactatctctcctcctatttactctgttgttgtaaacgaaactcttttctaatttataataacaagtatattttcctaaaaaaaaaaaacaaacaaactacataagccaatataaaatttatattttcccttttgttttttcttagggctgaatataaaagtgttttgaaaagaaggttgtgaagtgatggacatgatatttcaaattatttaaaacgacataggctagatgccaagaagactaaaagtggagtctacttggaaggtatcgtaagattctcatgaagaaaacatggcaatgtttagaaaggcctttgtggtatattgttaagaaaacacgcgcagtgagtaagagacagaaatgagaaaactaccctacgttagacaagagtacaattattagatactttgatattggaccaatcaaatgcgtcgggcattatcttctcaatattttcttaaatcctgtggctaataagaaaacccctttcagtttctcattctttagtactttagtttggttttgtagtgggatcctattcctatcccagaacgaagatattataatttgttatggtatttattaattgaagagctcagatagattcattaagtgagtgagtcactcactatctcccatctctcttcaatcacaccatgggaagcctttcatgtattcaacttctccaccatcacaatccagtgtacgctctctctctctctctctct

SEQ ID NO: 36054 - DNA, 2383 bp, Cannabis sativa
ttttttttttttttttttttttttttttttttttttttttttgaatctaaccattctctgtgacgctattatgtattggaggtcttgggtttgagttacaaattatgtaaacgcttaaccattctctgtgacgtcattgacaaatttaactctcctttttctaattggtttcattagaagataaaacgaaaatatgtatatgtgtcatgtgaatgaaagggtgatcaaaaaatgaaggtaattaactacttttctattacctgaaaatataggattatttctccagtaatgctattgctaagacacacacaaaagtctgattcatttttattgtcatatatgaggaccttatcacttttattgcttttaataaaagtgtgtgattggaataaataataaatctttttttattgtaaaattaaaaaatcaattttagactttaaaatatgatcctaaagtcatatgattaacataatttaaattaagttaatctaattttcttttaattattaattaaataaattattgaataattatttaattaaaaagataataattaaaataaaaatctaaatgatatttgttattcagttattagatatttatatttgaacttgaattctaattcaaatcaaattagatatttttttattttaaataaaaaattaaaggaatttatttataacattatatataggatatatagtaacataaaatttacagacaattaattagaagcttgaaagtaagcaactggaaatagagagaaaatagaaattgattttctcactcctactctctctcttgtctcacacgcccacacctatttaggtgtgtgagatcgaaaccctaactcaattacactgtctcatgagttgagtacatactgtaactcctaatttgtcatcttaattaagatctaatatcccattccatttcttgagtgttgagtctgacttgaaagaacaaggtgtggattcttcaataaagttcttagattggatgatcgataattatatgaaaagaaacaaggatactatgaggctttaagcggtataatctttcttttagtagtttagatttaatctatatgaattatgttgagatcattggacttattatggttcatattggataaaaactatttttatcaaatttttcttctacttttataactctgatatggatcataaaaactatcattagtgacatgctaggtgggtcgggatacatttacccaatcgtgcttagcgtgtcactatatgccaatattttttaaattgataaaaaaaaaaatatttggatttcactttttagtgaccctcagttacacaccttataagagactaacactgaatgtttagagtctaattgtgttggttattaaaattactcctaaattgttagtgacccgcactttttgtgtgatcactaaatagtgtagtgtaattaaaagaccaaattgtagtactggttatgatggggaaaagttgcatgggttgttagggttgtgtggagaaatgttaaagattttccaaatatgagtgagagaggaataaaggtgaacagagcagttagttcatgacgtaaacagtgaataaaatcttttgatgacgatagaaattgcttggtaaactgctcccatgataaattctccatgatgaatttatgaacttgaattaagaattttataaacatttaaattttaattttattcaatattcatagatattcagatatttataccaaattgaagaggctagataaattgacaaacaattaagtttaaatttattcaatatttatagaaatccaagcatttataccaaatcgaaaaggctagtcaatttcaaaaataatcaaattttgattttatagttttagatttaaactgaaattctaatcaatagcagacaatataaataagcaaaaaatattgcttctgaaatcaatgaagaagaaacaatagaaaaaagaggaacaacagaggaaaagtaaagaagagacgataaaaaaaaagggtggaaagactgcatgacatcatttaatctgacctatctcacatattctaatcaaattgacatattgaagcgacaattttaatttatcctatttgtaaagataaataatttaacagagaaatattgatctggtggttgaaagtccaatttatgtttgtatttttcacaaacgtgtggtgtgctatcattgattcgttctgtgtcgctttactgtgaaaagagagtgtggcgcatgtagattttctctatatgtaactaggtaatatagttgctcttcgaacgtctcttataatacttttcaagtatgataacaaaaaagtaattatttatgaatataataattaacaaaataaaatattatt

SEQ ID NO: 36055 - DNA, 1723 bp, Cannabis sativa
  modified_base (1697)..(1698): a, c, t, g, unknown or other
ctcataatggtaacccaacctaatgactggaaatcccaagaattaggttcaaaaggtaataaaaggttatgaggtgatatgtgttgatcacgctattgttatatgagaagtatgaagtcttgaagcgataagaggatgagttagtagaaactcttaatgagatctatactctagctaggtggagtggagtattgagctgcaggagtactcttgataaactcacctatgtgaatgtgggagtggggccgcttcctatagaatttggggcaaaatttctagagcgttcactatactgggataaacatgcatggccattaacgcacatgcttgtttgaatacacccttgaaagattggtgtgtggtatgatattagagatagatttcaagacttcgagtcactatagtaaaatctaaatcgtattcactacgcaagattcaaatcgaaagatatctttgttgaagcattgtcttatagttgtctgataatgctcgagaaaatatttttaaaaaatttcaagtgggggattgttggaacctttgtgaaatcatataaaaattgaaaatagaagtgtgtgaatgattggagtcccacatgggataggaacacttcattagaagtgtatatatagtgcatgtttgagatttgggtatgggccccaaggggtactaagttttgtgtgcataggtgaggactcacacactggaccaccacacgcgccgccgccgtccgactgattcgggctagtctgacgagtgaggtgtcacttaatttttttaaaagaaaaattatttaattaaataaagatttattttttatttatttattaattaattttaacgttattagaagtagtaaaacgcgatcagtcaatgatccgctttttactgccacgatccaaatctttcacgataatattaccgtttattcttagatcgacttccccatataagtcgtatcagaacaacggaagaacatatctttttcaacataattttttttctttcttctttacgatttttctcataacaaaatttagagtgtaatcgagcgatatagttcggtgcagagaatatcatatacagagactgttttatcctggggatgccgtggttgctagactgttgtgcacactttgggcagagccgcgaaacgtcttaaagaaagcgacattgtctgcgactcaaccaaaatcttttatcggtaatttattccaattttattattttaaatttggtataacaaataaaagtgctcatattttagctaaattagccttatcgtttaatgcttctcaagtttggtggcccgatctcccttatgttctttatttataacaactggccaatgtgagcgaatgactaaatatttctttgataatataatttttcttacgtatatttgttgcattccacattacatgtttaatttctatatcatagtaatcatatacttatgattcgaaatgcatgtgaagtacttaaaaacttctctccaatttatgaacaaacattatatttaataactaattctaagaaggaataagattttgtttttcttgaatatcactacgatttaataggaaggtcttgatgaggagtcttttgaatagtataatattggctaattaggatttttttttctcatggaactttgacatgtaccaaatcatgtctcttgaacttttttggccgttaannattccccctgaactattgagattgt

SEQ ID NO: 36056 - DNA, 2378 bp, Cannabis sativa
  modified_base (657)..(683): a, c, t, g, unknown or other
gaatataatattgcaaactggcactagcagccttcacttgagaggaatgaacctagatgaatgggtagcaccgatacctggtctaccgtgcttgacaggcttgtacgagatggaaaactcggcaaggtagtgtccaatcatttcaggcttgatctcgacctggttgaaggtcttgccattgtacacaccgatgatgcttccaatcatctctggtacaataatcatgtttcggaggtgagttctaactggttctggcttctcaccagctggggcctcccttttctgcataaacataaattaaaaagaattcagttcatatttaacattaagaaaatatggcacatttaacttccatttaaccatctctacaacttgagctataatcacaaaaaacaagtaaaaatgggttcaaccaggagacccgcctgtgctagtggccccaaaccttggaacattgcctggctagccaacattcctcctcaccattagacactaacccttgagtttgaccaataactttacataatgtcaagaccccgaaaaatagacaaattccttttcttttcttaggaaaagatacaaaattcatcactacaaaaaggataatggtaaccccgccattaactacttcctttatgaatttcatagcaatagaannnnnnnnnnnnnnnnnnnnnnnnnnncaacagttcatcatggaagaaaggctaataataggcatatctcattcaatattggaccttggacatatcatagttccgaatagaatctctttagaaagaaaatcttttgccccatacactagttcatacactaaataatgtaatacattgaacatatatataaaccattatccattcaagcagaggacataacatatttcagaaaagcttaccaaattcaaaacatcttaccaagacataccatattttcaatgaaatacaaaatctaaaaatcactccaaacttaaattcaacagagatatactttcaactaaaatccaatatttaatgaaactggtgattttcaagatccatagttaaaaatcttaccgccttcctgagcttcttaatcaaagccattggcttacgcttcaaacctctctggaaccttctgcgagcacgagcagtgaaaagcttaacaagctcatcagtcgacatgtcgaggagagcatccaaatcaactcctctgaaagagaacttcttgaacgttctcttcttaggaactcctgcaacagcaacatcagcagcttcaacttcggcctgaaaagacaaaaggaaacaacaatgttatgaattgtaatgaaatcgaaacaagaaaagatgaaagctttttgaaatttgagtgatggttggctcaccatgattgattgcagcagctaccctgtgaaaccctaaattgaaagttggagacgacgaaactcgatctggtgccgctagggtttttaaggaagaaagaaaaaggggttttatattatatgtactactctacacccacgtgcaacgcacgagcactcatcttagttagggtattttaatatatagtgaattttcaaaaataccattttttagggaaaaaattgagaaatattcttttttgtatttattaatcaaaaacaccttcatactatatttcattaaaatatagccacttttgtgagtgagttttttaatatgccctcactcttcacttaagtttagtacataatttacacaggaccggtcctgagttgaaatgggtcataggttaaaaaaaaaattgggcccttactataaaaaaatggtattttaaaaattattaaaaaaatatatatttttttaaaaggtatttttttatttgggcccctaaaatgagtgtgtcctaggcgtgggtctagcccgcctatgcctagggccggccctgaatttacattaacctaaggggtataatgaagacatcatctgtaaaagtgagtatatcttaaagaatatggaaataaaggtaaaatttaaaacagatttaataaagtaggtatataatgtaattttctccaattttaaattttcttttacttaaatatgatagttttaagtttgttcattttttatgatattttttatttttaaattattgttatggtatttgatatgtcatgtgtatgtaaattaaatttttaaactcatatttaatttttagaaaaattgttcaccaaagatctttcatcaagaaattagttttttcattaggtatataacttttctttttctcctatatttttgtaaatatcatttttttatgttttatttataattttactacaacctaaagtttttatatattaaaatatatattttttaataaaacatattattgtaaattaaatatattcatttacaaca

SEQ ID NO: 36057 - DNA, 1166 bp, Cannabis sativa
aaattttttcttaaaagaaaagagaggaaaaagaccatattataatatcaatattacacataaattcaagtaattcatggactaaggctaattaacacatgaactgcataaagatttcttcttctatttataatcaattttcataaaagaagattaagtagttcccgaaaatcttgatcaatattttagtactttcggtgataattgtacgaaacattcactaacacaaaccttttgttgcaatggtgatgacgagaaacaaccagcgacctccccactacgtgatctttaagaaagtccagaagaagagatagcatcccgagtgaaaggagaagagggtgatactaatgatccagattactcgagagacgatccccaaagactatgagaaagactataatataaatatacaaaaatgaaaatatgagatatttatgccgcaaatatctttttttattcttaaatatttttatttttgtccctataaattttttttaggtgattagcagcgaaactctttatgttttaatttttaaacacttaacctcttgatcttattttttggtggcaggactccattaactttacttttgtttgtaaatttgagatatcagtttaattttattgttaaatcccaactggaactgtgcacacatgtatatacacgacactataatctcgaagtcaatgatatcttccattgaagtggagggagtgtacaaaaaaaaaaaaatctcaaaaccaataaaaacatgtcatgaatatacaggtgtacacatggatgatttatttggcatttaagagtagaatttaattgacacattaaatttgcaaacaaaagtaaagttaaagaggtattgccacacaaaaaaaattaagagttaaagtttataaaattaaaacataatcgagtttcctcgccataattttctatttttttctttattatgtgaaattttccctaataaaatttatattttttatttttatttatcttataaaaattatattttcattaatactcttttagcaaaaaaaaaaatcccctaaaatatgtggttgacactaccattaattgggagtaatattcaaatctatagcctaaatgcaaatttgactgaaatctggtagaaaaaatagtaaaactattattttaagaataatag

SEQ ID NO: 36058 - DNA, 1221 bp, Cannabis sativa
agaatctcaaaaggccttgtaaatttaaggcataactttctccttttttcgaagcgcttaattcccttcattggagatacgtaggaatacatgatctcctacattaaactctacatttctgcgtgtcagatttgcataacattttgcctactctgagaggcgagcatcctaaccttaatcttctctattgcctcatatttggtccactaaattgattctagacccaaatacttttgttctctagtttcatcccaatgaattggagatctatattttctgccatacaacattttgtaaggagccatcccaatggtactttgataactattgttgtatgaaaattctatcaatagaaaatacttactccaatagccttcaaaatctatcacacgagctcgtaacatatcttctaatatcttgattgtcctttcggactaaccatctgtctgtggatggaaagttgttctgaactttagcttcgtacccatagcacgttggagactttcccaaaacttggaattgaatttcgatatcctataatggacttcggagccccatgcaattttactatttcttttacatatagtttcgcatactgatctactatgtatgttgtttttcactagtagaaagtgtgctgacttggtaattcgatccacaactaaccatatagaattgaacatacccgtgattctacgtaatccaacaacgaaatttatggtgacatcctcccattttcattcaaaaagagtcaaaggttgtaacaaccctgcaagtctttcgtatttagctttaatttgctgacaagtcaagcatcaagatacattcttccacgtcctttttcataccgaaccaccaataaaagggttttaagtcatgatacattttagtactgccacgatataatgagtagggagtggtatgtgcttcattgaaaatttcctttctaagttctacactactcgtaacacaaactcgagtttgtaaagtaacgttccattatttgacactgaattctttagcttggccagctaaaatttcttctcgcgttttttactaaatctggatgtttgaagttaaattttagtgaataaagaaaaaatgttaaaacaaagaaagaaaaataatattaagaataaaatttatatttaatgtggaattaatgaaaaattgtatggaataaaatttgatccaacaaaatttttcataacaaatataaaa

SEQ ID NO: 36059 - DNA, 944 bp, Cannabis sativa
tctatttgttttatcacttgaattttaacaaattaataatcatcatttatagatttgaatttaattaaaataaatatgttaaataaatataaactaatttgtccaaatttttatttaaaatattaattctatttttaacatctttacattaagaaatatatttcataagttcttttttaattttagttgagttgtatttttattttcatatatttgtatttaattgattgatttatataaagtataaaaagtgattagcttttctatatttaaaaagtttatcataaatggtaagttttatgaataaatcaatttctatattccaatcgtgttaatctgatcctatatgagtttcttaattagtttgatcagatttcttgtactgatgtaagacttttcttttttataaaaggaaagtcgcacttactactcacgattatgtaggtacagaagtagaaatccctacgctgattgaagatctttttttaggaaagttttttgtgaattgtggtctcgttcaaaccgtgtaagaattttctataaggtgtgtattgattataaatatacgtttaacacctaggtttagtatctcttttattcactttaaattgtcttcatatatttagaaaatagagtctttgttttgaagaaaagagtgtgttcgactttctctctgtgtgtttgaattttgtatttcttgagtctgtaatcaagttctttaaaaaaggagaacaacagtgctacctttgggagaaggttctacaagctttcaggagatatctttttaagtcttgcctcataaggaatcaagcacccttcaaggaggtcgaagagattccgagcacttgaagtttcaataagattcgattagatggtggaatacatcaaccttacagcatacaataaaagagagtttatttatgcataagtcaattactttgtat

SEQ ID NO: 36060 - DNA, 1090 bp, Cannabis sativa
aatattaattaattatatatatatggagcaaacattatgactgattagattttttgttttgttaaataataaattagatcctgtattttttaaaatattactaaatcatactttaaactgattttgtttatataataaaacttaataataactcgatatatagaggtattatgaagtttaaatcttttgtatttttttatgctagaaattgttttcaagttggttattatattaaaattattaaaaattgagctcagattcctcttttcgttactattttaaaaaataaaatttgttatttaacaaaacagaggatccaatcaaacccgactatagatataaacgagctaagtctgtgcttagggctccaacaaaaattttctttcaaaaataccacattttactctaaataagggtccaaatatttttttttttataacactaaattttaaggtcagatccaattaataatttttgcaaaataatattaactcttatataatattgtattataggaaagaattcatggcctgagcttgttggaattaatggagaagaggcatcaaaagtaatagagaaagagaatgagaatattgtggatgcaattgttgtattggaaggaacttctgtgcctgagaatttcagatgtgatagggtttggatttgggttaatcaatgtgccatagtcactcaaattccaaagattggctagatatatacaactatacatatataatttcatcaataatatgtagtttggttaattaatccaacaaaaataaaagaccatatgtccccatttatacatatatagtgtttcgactaaataaaatattgtaaggtacctttgcccttttattttatttatttttgttgtggttcaaaattagaaattcttaatattattatacggtaatcaatttttaaattaaaattttattacttaaaataaacatataaatataaatagaaatagaaataatatatatagttgcatggtttttactaattttttccttaatttgacaaacaatatacatatttgatcactcaaatatggattatgtaaaatttgtactataaatttagc

SEQ ID NO: 36061 - DNA, 2039 bp, Cannabis sativa
  modified_base (55)..(55): a, c, t, g, unknown or other
cttttttaattcatataattcaaccctaaggcctagttgaaacactataaaaggnacatgatactctcactcatccaattaatgtcaacttaactattcgaccaaactcgattagagagttccttcctaagtgttttctcacctccttcattgctcttcaccattcgaacctactagtcccactaactagtagtagctcacttagcaacatatatgatttttgctctgtagacatatggtcaaaccatataccaaataacagactttcataaatccgattgcaccattatattcatagacgcaaataaatggtgaataccacgtctcgtcgcgttccggacaatattgaagatatttatgaaaatgccacagtcgtacaaactgagcatgaacatacaaccagcatgcacacaaacatgcgccacaacttgaccaccacttggccaacttgtgggaatcaccttgcttgtaacgtgccatcttggcacgtacgttacattctcccccacttcaacatgtcgatgccctcatcgaccgaccacaagcaaatcttcctaatctcgactcctaagattatacaagcttcatctgaatcctaggtctacacttgtccctctatcttcgttgaaccactctcttggtgacgatctctctcgcccactcttgaacttgatcaaagaacctatgtaactatcgctattcagaaccacccatggagtagttcctacgcactagaatacatcccccaacatgaactccttcgagtccatcacaatggccttttagtcaaccctagtctccttagaatttccaacaaacatgcaaacatcagttcacgcttctagtttgccttctttctttcttaagacatgagcaaggcaccttcagattctataatagtgtaaactaggtatatgaccattccatagttgtacaggtgtcttagggattgatttagatggaacgacatttggaatgtcattggccatctgaatagcatatccctagaaggacgttgatagagtttaatagctctgcatagacctacccatttctaaaagtgtgcaatttcttctctctacaactccattttgttgtggagtgccaggggaagtatattgtgattcaattccaagatttattaaatgatctttgaactgcatatctatatactctccacctttatcatctcggaagatctttaatgttttacctaaatggttttgagccaaagcatgaaatttctgagacttctcaagtgtttcagatttcttttgcattaggtaatggaaactatacctaaagaaatcgtcaatgaaagtgacaaagtactcataacctctctagcttttacatttagaggtccacagtcatctgaatgcactaaccctatgttaggatattttaagcttattatttttgttatttttagagttaatgttcttatttattatcattttcttgaatagaattatgcttgttttctttaatttcaagtttcaacacttgaatgtataattggtcaaatcttacaaaaagataatctataaaatagagaaaattgtgcaagaaaatatagctgaaaattcaagcctaaattagacaatgatcttatctgaatttggaaaaagtcaaaacataaaagttctagatctctcttttatgttttggaaacatcttcaaatagtctaatttcgagcaatatcaagagagttatggcaaaaatacttttagtcaacacagtaaaaaactcactgcccaaacaaagcggtgtcatgcctaggcatggaaatcccatgccgtggtccgcgcctcctaatcctgaaaaaataggtttttagcgtcttttatcaatttttttggctataaaagaagtggactttaatagttttcaacaagaaatcaaggaatatgaatttgagagagcaaaatctattgcgaaggcttttccaacagagttttgatcattcttttcctctctattttcttcttctattctaaattaatatgtgtgaaattgctacgatgaacataagtag

SEQ ID NO: 36062 - DNA, 1659 bp, Cannabis sativa
  modified_base (1415)..(1421): a, c, t, g, unknown or other
  modified_base (1494)..(1513): a, c, t, g, unknown or other
aaagctctttctccacacaataagaatgcgacctttaatgtagaactagtataataatcccaattaacaaatttattttccatgaatttcctgactttattctctccgtcaatttagtttccaaccaagcaccaacccctatcttatttttagaacaaaactcataaacagtttcctgctttattattaatacccatcacattccaacaagctacattacaactagccatgattaagtacagaatgacccctatcttatttcacagggaatgttttctttggaataatctaatctttactctgatgtcgtttgttctctgctagtttcttctcttaagcattagcagttgctggtttttttctctttaatttctgcttttttcaagccttcaccttctttcttcttcttattctcacatttccgacattcagccatagtatgtccgtaattagagcaacttttgtatttgactggcaaccatttatagtcaatattttgctccattaactgagcatgttcatcttagaaaggtgtgaatcgaggagggtcatctgtgattttcatctcaacaaggactctagcaaattgtatccttctacgctccttggtatgttgatcaactataataggttttcctattgtactgaccaaagcactcagactcctattccccaaatattggaggcctaagtcgtaatatattctgatccacaatggcaccgagtgaatcatcttaacagcattcaggtcagtcgtccagggccttactattacctgtttcctgtcgaattgaaggacccctgcctccagcacttgatcacgagaggcttcatcattaaacttcatcatgactaatcccataatcattttagtaacttgcactatcccaagatatcctcagacacactttaagaatcaatcaaatattgaatttatatatatatatgtagtgattttaaaattgaattgtaataaaatcgtgtatgtgaatattttgggatattttttatatatgtacaatttaaactcattaggtaaaaatatctttctattatcatttattttataaatatatatttaaattattatttaaaaaataaaaaaaatatatgatattttaaaaaaaaaattaaaaatatttctgtgaaactaaaattataattaataataaattttgaattattatattttacttttataaataacactggaattaaatattttttttaataaaaagtgttgcatcttgtggtgtctttgaatgcattcaagtaaaaatatatataaaaaaataataattatacaattaaaaatagggtctttttcatttttacactttaaaacagttttttttttttcatttttacggaattttacatagaaatctctattttgcaactagcgctgcaacttnnnnnnnaacaaaaaatcgtacagaaactcctattgcaactagcgcttcaaatattttagaaacccaaactgtaaatttnnnnnnnnnnnnnnnnnnnntagtatatggagtaattctccttaaaaatatataatacctgcacagtggacctaatattaatatagtatctattctatataaagtgtgcctatataataaaattcttggtttatgagaaatatatgggtgactttttatttatatt

SEQ ID NO: 36063 - DNA, 1369 bp, Cannabis sativa
aaccacttctttatgtctgataaacattttctacactagtacgagacaaatagttagtgcatgtggtatagatgtcatacttttactaagaacgttcttgatgcatctgaagccttgtaaataggtgtatgggcgcctagatacaagttggtatcatgttttatgtttaatatttttcttactgagtttgtcgactcacatatattgtttgcatgtgtaggtaagggaaaggcaaaggctaagaaccaatgagtccagggtttgaggatgattgtacatatctagatggttaggcctgaaatgtttggcgtcgaaacgacttgggcctttattttgtagtcgcaaggtgacatgtttataaaatatattttgaatatgattgtaaattttaaagataggatttcagtttttgtgtacgattatacatttataaaagtttaaagtttattaaaaaatttaaatttgatacgattttcgaaaaactctttaattagcaaaggcgtgcacagtaagaaagaaattactatagcgtgcataagccaataggatgttacaattattgaattatttatttcaataataagtttttaatttgattaattcagggaaataattttttattttgttattttgggaactattttttgatttagttaattcaaggaaccaatttttgatttaattattttatttaactggcttttgtgtgtaaatttttatcttggttgttttacggaaccaatttctttgtctcaaatttataactagttgatacatataatgagtttcttttatcttaaattttgagttattgtgtgttatttgtttttacttaatttgctatgaaaccgattttatttagacttatgtctcagtatttttggaattaattattaattttttttaattgtaactgaaatctgaggtattatgtgttatcatttttattcattttatcgtggaagtagttttaattttaatttatgtttcagtgttttaggagttgattttctatttatctttttatttataactgatttcagagttattgtgtgttatttatttttactcattttattgtgaaactgattctattttaatttatgtctgagatatctaatttcgatgaagatggatactctgatgactttatcgacgacgataataattccagtgacttttttgatgaattttccgatgacttttcggggacgatgaattttttagcaacattgatttttccagtgacgacgtatgttcgatgattttttcggttatatttgttattagaaatttatcaactttatttatggtcttttgtttggtttcttatattttaaattttatttattttttaatctcatatttt

SEQ ID NO: 36064 - DNA, 1006 bp, Cannabis sativa
cagttttggcgcttcaaatgttctatttagttctcgaaaatagttgaatcataatctttgctgaaaataaagaacatgatggaaataattctcaaaaaatatcattagaatcgaccgaggttgacaaaatgtcaacatggcactgggccagccccaggtgtcacctgggtgctaggcctttgttttggcacccatgaagtgttgtttcttcctcgaaagtgctggtacttagaaggcacccagattgaaaaattttcaacctgtgcgctgggtgcctaggcaccggttgctcaaaaataaactttctctgaatttgattatgatgtacgtctcaaatatctttgtggtatgtctagttcatgtcccaatgaaaagttggacccatttacactaagacgatgtgcctaggttggaagggtgcaggttcatgtaatttcagcttctggggcttggatttgattgctctatgtattcatgatacgaaatactgaataatagtgagttggaaacaatgttttaaaatccaaacttctattttagagttctcgaagtcaacttgggggcaagactaatgttgacttgctatgactcgggactactcggctccgaaatgtaatatttcttgccacgtgttaaacattgatgtccatgttatcagggctaattttggtgtaaacaggaagtaatccaagttatatctggaggagtgtgcttgaagctcaagatgtggtgagacaaggagtagcgtcggccctaggctaaggcgggctaggcccgcgcctagctagggcccactcaatttaggggctcaaattaaaaaaaatacaatttaaaaatatacatatttttttaagaatttttaaaaatatcatttatctttatagtaagggatcaatttttttttttgcctatgacccatttcaactctggccggccctgacaaggagcaaggcatggtaatggcactggggtttgttgacacatttttttgttaatggatctaaga

SEQ ID NO: 36065 - DNA, 2962 bp, Cannabis sativa
aaacggttgagagtgatttattgtggacattgtcccacatgctcatatataagaacatgagctactccactcattgccaattggttttgaaatggaaccacatgattctcaacacatctaatgatataataatataaacaaataatgacgtaatgcatgacaacataaataatcaaacataaattaaagtatatatatttaaatacataatggacataattagaggttagagcacaaaacaaaaagtaggagagattgtcatttgtcacctcttctttccattacacaaaatctaattaataatattaaactaaaccaataattattattacaaaagtacatttaacataatttaaatatatgttatcattgcatataaatacatccacaacaacaacaaacaaaaaacaattgaagagaaatggatcaaaaaatcacccacatagctattatgccaacaccaggaattagtcacctaattccctcaatcgaatttgctaaacgcttagctcttcacccaaattttcacatcacatgttttcttctcaccaccatggaagaacacaactctccattaccacctccaaaaaaagccattcttgactcactacccaattccatccacacagtctttctttctccagtcaactttgatgacctttctgaagattcaatttctgaatttaaactcactctcaccataactcgttccctttcttctctcaaaaaagaattggaatctcattccttttctgcttttattgctgacccttttggttttgaggccttagagctcgccaaagggttaaagattccatcttttgttttcttttttacgaacgccatggctttggctttgttcttatacttaccaaagctcgatagtgaattacctgactctgttcggttcatgaaagacttacccgacccgatccgattacccgggtgtgtacctctttcgggtaaggatatgattgagccacttcaagatcgagaaagtcgaatttacaagtcattttttgaaatctcgaaaggcttgtatttggctgatggtataattattaacagtttttgggaaatggaatctgaagctatgaaagctttggaagctaatgagaaagtgccacgtgttttttcagttgggccaattgtacaagcaggtttaagtgatgtggcagagtcagagtgtttgacttggctagatgagaagccacgtggcagtgttttgtatgtttcttttggtagtggtggaactttgtcgagtgatcaaatgaatgagttggcacttgggttggagatgagtggtcaaaatttcttatgggttgttagaaagccagataataaatcttcaaatggtgcatatttgaaagagagtagtgatcaaagccaaaaaaatgatgcttttgatttcttaccaaatgggtttctagaaaggactagagagagaggtttggtggttcagtcgtgggtcccacaagttcaggtgctggcccacgactcaaccggtggattcctgacccactgcggttggagctcgattctcgagagcattgtgaatggagtaccatttattgtctggccgcttttcgcggaacagaagatgaatgcagttatgcttgtggatggtttacatgtggcattacgaccgaaaaagaatgaaaataacattgttggtcgtgatgaaatttctagagttgtgaaggtggtgatggagaagagttgtgaagagggtatggaaattgggaagtgtatgaatgagcttaaggataatgctataaaggcacttggtgaagatggttcatctactaaagcattttctgaattagcatttatgttgagaaataatagtaactcatcctagtaagaaattaaaactactatatggatggaaaataataagtacttttaataaattaattttatctaaataatggaaggtttttggctttgcttagatcaaactgaagtgttgtttgtataatggtacacactccaaaaaaagatgcagtcactgataattttttaagcacaatataaattttttgtgattaaatgtaacttttaatcacaacaaaaaattaattattgctgatttagttttagtcataacaagtattgtgattaaaaacacatttagtcacaacaaattgtgatttttgtgactaatatttttagccacgaactttttattcacaaaagaataataatttataactagttacaaattttttaatctcaagttattttattgtgactaaaagtggatttttttgttctgatgtcttttatttcattaatttcaatttttttaataaaaactattttactttattggtttatatataagaatcaaagttcaagtcaagttaaaaatttggtttaatttttgttccttaatttacaagtttggaacaactccccttctaataaaattgagttaattaataccaaattaataaagattagttgttggaataatgtgagattgttagagcataatcaattaataaaaaaatataatatattatataacctataagaataaaagtataaaagatttatatatatttttttaataatagtgctacatatttattagtaaaatataaataaatagaaaaaaaaaaaaaaaaactacaaacttatataatggagaaaatactaatggaagacagcataattgtgtctctagagaatagtgatgactgtatgaatatgattttgactttgcataggctagccaaatgatcttagtaccatatgcattcattcatttgtacagacacagagtagaatattgtttattcttagatatttatattattatatatacacaagagccacagaaaattcattcacagcttattctgatttaatgactatatagattgtgttttttgttcttttagacaaatgaatgtatagatagaagagagaatgtctgttatattattttataata

SEQ ID NO: 36066 - DNA, 1611 bp, Cannabis sativa
accagcatagtttgttactgcactggtttacttttatcagtgcatgcatttcgcaaactacgctgataaaatagtcaaaattttaccagcacacatttgcagtggctaaaatctaacttttatcagcatatttatgtgttagaaaaagtcttttttgccagcagtttttattttttactggcaaaagttctaataccaacgttaatttaccaacacatcagaagtaaattctattttaccagcgcaataccaaacttttaccagcacaaaaatgtgctggcaaaaataaccttttttatagtgaaatagtcattcggttagattttttatttattttggtattttaaaaaaaaaattatttttttataattgcatatgttgtaattttttttaagattatttataaatttttaaaattttttaaataatttaccatgtcaaaaataaaatttaaacaaatatttatctcaagattaaaaaattaatcacacgtgtaaaaaatatataaattttatttttctgtattgcaaattactcagaattttttaaaaatttacctaaattattacaacatgtatacatgatcataacaaaaaattaaactaatatatactactaatattatatcatgattattattatgaatatatactactactataatagtagtactaaatatatatatattaaacacataacttatcctattatcttttcctttcctttggaagagatctctccaaatcttactaactacaaaaaagagaaagaaagaaagaaagaaagtgtgattgggtttgtaataacatctcccacttcaatatatataatgtatatatgtagacaaattcaaaagctcataacaaagtcttgatcacaactcaaaaacatgacccaccattgtctcctcttttatatattctcatgtatgtgttgatgatcgatatctattaattttcaaaccctaataagatcttagtcaaattttcccatataaagaaaaaaaagttataattattctcatttgatatatataatatcttcttccccatgatctggatccattacctttggagactagtactactataattatgtactaaagcttatattcttttctgaccgttagattccataattttaatttattatctttaattaatcaaattagtcatggcaaccagtggttgattactatttttttttattgattaattaataagtatagtagtttagttatattaagttgtagaagcaggtagatgatgtgatgattttaaattattttattttatttttttcaggtatatatataaataatattatattattatggggtccataatttaaattcccaaacatgaatgattggaggccagatattatataaaaatagatttagggacttagatagggacttagattaggacttagattaggatctctctctatatctctctctatatatataattaattaattaaataaataattaagcctataaatgtgttttgattgtactactaaacctaacctcttttttgcttttatcatatgtacatggatccaatgttttttgtaatttttatttatttatttattaatgatctt

SEQ ID NO: 36067 - DNA, 1254 bp, Cannabis sativa
tataaagaattaattttattttgtatttttacactataaaatatgtaatattttggcatttaacataagcttatgtggattcacaggtgatagtgtcgtgacttaaggcatcattgaacttccattaactgtaggagagccaccgttatcaacaacgctaatgcaggaattcttagttgttgatcttccatcagtttacaatgtattaatgggtcgtcctgcattaattggactaggggtagtaagctcaattaagcacttatccttaaagttcccaacataagcgggagtaggagtagtccgaggtgaccaattactggctcgcgaatgttatcgcatagaacttcagaatagaagagacaatcatcaattgatgttagtcataccagaagaagtcgagaaggaagatgaggatctagatcccaggatccaagatcaaaataaccagctcaaacctattgaagaattggaagaggttattttagatccaaataatcccataaaatgtgtatacattgggaagaatttggatgaaaaactaaaatagcaattaattgattttttgaaggcaaaccaggatcaatttgcttggagccactcagatatgtttggaatataccctaaagtgatctgtcatcatttaaatatcgatcccagttaccctgtaaaaagacaaaaatagcagccattagattccgagagacaagaggcagttaaagaagaggttgataaattattgactaatgactttatacgcagggccttttatcccttgtggatttcaaactcagttcttgtcccaaaaccaaacgacatttggaggacttgtatcgacttttcagacttgaataaggcatgccctaaagactgtttcccattacccaggattgattagttagtggatgcaatagtaaggcacgagctgatgacttttatggatgcatattctggatataactagattaaaatgcatattcctgaccaagagcatacaagttttgtgacaaatatgagactttattattataaagtcatgttgtttggtttaaaaaatgctagaacgacgtatcaacgactggtgaatggaatgttcgagaaccagattggacgaaatatagaagtatatgtcgatgatatgctggtaaagtcaataaaaagtgaagatcacatgtaggacctcacagaatgctttgatatacttaaaaagtataatacgaatcttaatctgaagaaatgctcttttggggtttcctc

SEQ ID NO: 36068 - DNA, 1516 bp, Cannabis sativa
cgatctattaaactattacacatcatctactattcaatatactagtttacacaaaacacagcttaaaaaattataaaaataacactaatatactagataaatacaaactcatattataaaattgaaatgtatgaaaatattaaattacttgaaaattaaaatattacacattatttattattcaatttactaattattataatcctttcatcagtgatatttagaacattgattttccctgttttttctctctagcagctgaagctggcgccatggccaaaactaggtcgaaacaacaagggaaatcgaaagcgtctgttaacaaaccaagaaagaaaggccctaattcagaatcagatgtcattcggacgaagaagatggatgctgttctaggaattgctcccctggagctttctgaagaagatgaagagccagaggatgcgatggctaagaataatcgctcagatggatgttcagatttctttcgagcccctctatctcccactgcatcattgaatgagatcaaacgaacggaggaggttaggtcagtttttctgcagtttgtgcacgcgaataaccaatgtaacagtagcttgggtcaaggtatgtcttcgatccctcctgtgctgcgttctggatctattgttaagaatttagatcagtcttttgttagatctgagaggcctaataaggtcaaaattaatttcgaagatattgaagatgaggtgaatttttggagtccctccattgtatgctatgttttagggtctaatccccctctgcatattttggaaggatttgcaaaaagaatttggactgataaggttgacaaggtgaaattgcttgcttttggtatatttcttattcagttcaatacaatggagattagggatcaagtgttaaatggaggttacatctttttcaataaacgtcctgtgatcatgaaaccatgggatcctaacacaaatttcaggaaagaagatgtgaaacaagttcccatttgggtgcatcttgaagacctcgaactcaaatactggggccagaaatcccttttcaagattgttggtcaagttggaaaaccgattatggttgacagtgtgacaagagagagggagaggctgaattttccaaggattctcattgaggttcagatgaatcaagagcttccaaacttattggaatttgaagatgaatacgggtcggtttgtcatgtgggaatccagtacgaatggaaacctataacatgttcaaactgttctggattgggacataagactgaggactgcaggaatggtagcaaggcaaaacaggaatgagttataaaagaagatcataggaaagctaatcctattgttgataatgaaggttttcaggcagtgagtaaagggaaaagagtcagagagcatggacaagtttcgaccagaaaggtgcagaatgggttccaagcactggctgataatgaagagttgggaaatggtgactgtgagttagttgcagcaggacccgtggctgatgc

SEQ ID NO: 36069 - DNA, 1153 bp, Cannabis sativa
  modified_base (428)..(431): a, c, t, g, unknown or other
tggagcgttatgtcttcaatagcataaacgacgagacttacattatcaacctcggaaagacatgggaaaagctctggctcgctaccagggttaatgttgctatgctcctagcaagatgtcctagaatgatacgctttacgacttatttaatgcatgtatgcactgacccagtaaaagcggacaaatcatagctgtgtgattttcaaataataaccgcatttattttacatgggacgtaatcaaatcccacaaattcaggggattattgttgtaagatatcaatattatttgtaattaactgccctcctatgtaactataaataggagcagtttacactgaaaaaaggacgaaaaaattcattagagaaaaagcgctagaattgtatcagaaatctaatatgatttactcgtggactatgcagaatttnnnntgcaaaaccacgtaaaaaaactttgtgttctttatttttctttactgctattattttttgtgcaaattcatcacgatttaggctttaatatagttaacgaaaatttacgttaacaacaattatttgtttcattaaaaaataagttgtaattaggttgtttttatgatgttttttctggttataaagtatatatcgactaaagaacaaaatttaattacaattcgtctatgattgtcaatataatttgatttaaaaaaaaataacaaaacaatccgtccgttagttgaaaacaacaaagacataactaaaacaaattcttctttggatccttggaggagcctcatcatcactatcaacaaaatctattttttcatgcgagcatacttgaagaataacacaaccagcctatcacggtatttttcatcatcaaatatgaaggaataagttttatatcaatgaagtattcagcaaacgataccacaaaacaaccgcagttactggaaaacaacatcaaaaaatcacataacggaaaatacctagaaaataacaaaacaacactaacaaaaaaactttaaataacttacttcagtgattattgaggtgaaccatcaaccttaacaacattaaaaggctccaaagaaaccgatttgttatcctttttaaactcatcaaacaaagaaaaaaaaattcgacaatagcaccgaaaatggctgacaagcttt

SEQ ID NO: 36070 - DNA, 1672 bp, Cannabis sativa
tgtttttaaaaattgaaaatgaaatttcccaatatatgcatgtcaaaaaaatgatttatttggtatatagccgtactgcaatttgaattctatatgaagttgactgaactaattaataaccataggaaaattaaataatatataattatatatatgtatacagatacacagttgtagtcaactattatatattttaagtcaaaattttgtagagaccactataccaacagtatttacataataataattaagctgaggtggatttaatataaataaatgaattaatatacgatcaaattaaagtcacgtagtctttatccactaaaagtaaaacaaaatattaattatttaaccaagtcacttatatgtatgcatgatctggtcatgatgcacacacatatatatatatatgacttattattaaattccaactaaactataatagttaaatcatattattgatattggaatgcacccctcttttatgatctctaaatttttaaatattaattatatgataaaaggaacgtgtatttcactataatatttaatgtattatatatagcgatatatgatcaaacatgtcacggtgttgtacgtaatctaataataaatcatttacagttagatatactatttaatattcacgaagcaaattaatttaaataccatatatatatagatagataatgtaatattacacatttaataaatgatcaaaacattcctatacatatcaacaaacacgacatatacattaatatatgtatagaaaagttaattaacctatattaaaatgacgtgtctttaaaatattttaagatgtaaataaaaatttctcaataattatttataattttttgaaattaattttcaaaatattctaaatatataacaaaatagaaagggtacatcatgcaactatattttcgtattggcatgcatatcatatagtatatatataaattgaagataattaaaaaataatgaaaacattctctgcctaattaaagtactatttatatttatacaaacaatttggatcttccaaaggtatatgcatgaatgctgacatgcatgtatatatatatatataatataaactcaggccaactagctatagttataaaaacatgtttactcaatatatgtacgatgatcaattaattgacaaagacaaaaagtatgtacttgctttttttggttggctttatttactcatccatcctttgtgctatatcgatcactatatatatatataaaattatttattcaaatttatctataaatatatatatgttgaatttgtatatatgtaattgatacatatatatgccgtgtatcgcactatgtcatgttgtaaggctgcatatgatcaagtttaaaggtacgtggctttagcttatacatatatagttatatatattatattaattatacattgaagtgaactgtcaaaatggaatatatatagttaattacctgtttaattgttttgtactatgatatttcatatatatatatatatattattttttgataaacatatatattattaattagtttatatagctagtttttcttattcattaagtaatgaaaagataagtttaataatagagcataatttcgatcggaactcggtgagaaaaaaccaatctttaattataat

SEQ ID NO: 36071 - DNA, 1523 bp, Cannabis sativa
  modified_base (29)..(35): a, c, t, g, unknown or other
gtcccatgttcctgatttaggttctgacnnnnnnnctcctctaagagttgtggagattgctggtattccatctcagcagaaaaagtgagttgttattattaagtttgtcttatgttgtataagagttgtttaactgctttgtttttctttctagataatagtgattgcggagcatttgtggctgcatttgtcgagttcttcatccgtggaaaagatgttccttgtgatttttacattggagtttatcgcactcgacttgctgccctcttcttctcatatggtcaaaggaaaaatgatgaaagtattgatagcgaggatgagaagcaaagcaagtcttccaaggcttctaaattgaaaaagtagggtcatttttatgtaaactttgttgttattggttaattttcatttgagataatttttaatttttttatgtttgtaggtagtctatgcggtttatattctggaactggttataaacatttaggatatcattataatatgttcatttttttttatattttaacagcaacggtgttatgattttacatttaattatgtttgtttttctaagtcgtacaactatagataaactattatgcaactgtctccaaactatttttagtattcaacgtacttgtcatttaatttctgacatcttatctcaatatatttcttactgttatgcaactttatccttctccttattatgcaacttataaaaaattaattctgacttttaaaaaatatttctattgaaattctttatgtaataaattcttaataagtgtcaaaaaactatcttgaaactattatgcaactattagcaaactatttaaacttttccaattaatagcaatctatcaaatataacatttcatcatgtgaaaattctcatagagacttaaacaattcaaataattttgttgcatctattttattgcttgattgttgcatgtctttcggttgtgaccgtgttgaccacatttgatgcacctgttctatttttttatatcccaatcagctataaatattcttttccttggtcttctagaccttattttctggtttggtggcagaacaaggataccttttatgttatgtggtacatcccatgttgtgtgattgtgtaccggatatgttgagccgctgtatgtttcaagccatgttcttgtcgtgtaataatttgaatagtagttgtaaatattcaagttcatctcttttatcacagcaagcgcatgagcacacggtaattcgtcaatttggaatcggttgcaactgcatgttttttcctttagattgatcacccatgatcttgctagttctaccacttcaaacatgctctcgttaattggctttacctgcaaattaggtcaatataatcaattgtcaaactatacagtaaacttaaaaataactattaggaaactgtaatgcaacttaaagtttaaagagattttatattttctgtcaatgagttcacaaagttgttgactagcttctctctgctgtaggtgtcaaaaatg

SEQ ID NO: 36072 - DNA, 1605 bp, Cannabis sativa
atttatcttatgttttagtacttagagcatcaccaaggaaacggcaaatcctttgtttggtgatgatttgttatgcaaggacgctgcatatatttgttgaatttggagtggatgctacagtccacggtatatatgtcgtgtactgtagcatacactattttttttttatatttaattaatgtatatattgatattattaattgtatttataaaattacaaagtattttttttaaagtggtgtattgatatactcttacatgtttaggtattcaagagacttttttagtctattttttttttatgatcgtgtacattataattatataagacatcttgtaaaatttcaaaaaatttagaaaaatttaatgcgccgaaaataaagttcaaactatttgttgattgtgtgactcttttatttagaggggtgcattttagttaattgtggtggttttagttaattaagataatatattttcttttattttattaaaaaattaatataataataagaaatatttttttagtgtaatttttggtgttgtggttggagtgaagataatttttaacatcaaatttggtgatagtgtaacaccaaatttgatgtagtccttggagatgctcttatttgcatttctaactaatttcattttgcatgtgttaatattttttattaaaacattttatttgcatataaataatagttatttagttgtatgtgttttctttccaaaaacaaaaaaagcttctatggtctaaataaagctaatttttattatagttttccgattaaagaacatcaatttagttaattttgtttaggctagctaatgtaggattttcactttgcactattattattatcaagatgtgttatctacactttttacttgttaatttttctttttaaaattatttacagtgttgaaatttaaattatgcagacatcagtcacttaaaaaatacatcaatattagtcacattagataaattaacttaaaagaagtcttatcttacattaccaaaaattatgaatagttcagagtaaaattttacgatggaaaatttgcaaaaaaaaaatcaaacattttaaaaaaattacaaaaatacttaaacatagaaaagttttatttttattttttgaatttttttatttacaaaaatacctcttcaataaaaataataaactattttttaattattttataattattatgagtttatttctctacttattttataattgctttatagttatcgcaagtttatttctctgattgttttataatttatttataattgatttatagttgtcgtgagattaaattctgattatttttttaattgttttcttactttttgctgaacaaggtctatttttgtaattttaaaattttgaaattgtatttttgtagataaaaattttaaatcgtaaaatagtaaataaaacataaagaaagagtatttttaaaaattttcctattttgaatatatatttatttgatttgtaacttgttgaggtttgaccacttaaactttggtgttactgtcagttttgacagttggtaactatccaactaacataactgtttttacagttaagttag

SEQ ID NO: 36073 - DNA, 1585 bp, Cannabis sativa
gagaaaaggtaagatagtactaataaattgaattgacaatatgtacgtatagatacaacaatatattgtgtacgtaatattggggatacccggcaaaccaaaaaaaacgtatattgaatgtttaagcaaaacttagtttggtttgttcatcttttatttttttaaaatcagtttatttctgaaatgttactcatgcacgtacgtttagaaatgcaaatctcttcattaatagattttccatcaatatataattaaatgttactcatgcacgtttggaaataatattataagtttaccaaacatgatctagttaagtaagcaattaatatgactatgaggcaattgatcaactacaatttaaaatttattagtctacaaaatggaaaattcccctataaattaagaatcaataagtccaaaacctttttaggttttgactaaaagtatatacatatgttccttaaaaaaaagtatatgcatggaatccatatctgcttctattctatatcaataattaatttacaatttcaaaagtgctaatgaaagggcatgaaaaacattttaattgccatggaaattcttggtatatattatttttacttaaatcaaatgagggattgattaatgaatgacccattaattatatgattaaattaaattgcatattgtatctaggcaaattacttaaaaagtaataattttctgccaagataaaatcttaaagtgataatattaagataaacagggttcacaaattaaaggcggtggaaaaaaaaaacatttgaatgactttaatatctaatgacctaaatctaagagccttcatggctctttaacaaaaactaattatgaaatatatacttgtaaaaatttgctccatatttagttgtccacaaactaagacaagaaagaaggagaaagcaaaaacaaaagagccattttgataacaaaaggctaaaaagaaaagcaaataaaagtaagagggataaatatatatacatatataatataaattttttggtcgaaaacctttattagtggaaagctagctagctagagcttgtgtgaagataacttttttttcataagggccacataaaaaatgttagtaggcaaagtgggggcacgttcatgctcatgacacgtttaactttatttagtgtttcatataattaatataaataatcaactttacaagcttacacatatatacctaccgagctacccaaataattggtggcaaaagaaagtactgaaacatttacttttcccaaacgtggactatatataaccaatagaagaaaaatatgaaaggagactaactagtaacgaaggaagtaatgtattataataataatgcaacttgcatatgtatgctttttcttcttaatttcccttattggtagacgctttccttcgtttttaagaatatcaaagaagtatatatgtatatactatatataatatatatatatacatatgtagtgtttttaattactaaatgatatgttaatcgatattccaatatatatgatcgatatgaattttataaggtgtgttttatatctatatatatatatctata

SEQ ID NO: 36074 - DNA, 2606 bp, Cannabis sativa
tgaagtgagttggtttcctccaccgcaaaatttcattaaaattaatacggatggcgctgcaaaaggtcgttctaacgaagcaagttgtggaggcgtatttcgagactgcaatggcacaattctaggagcatttagttcatttcttgggaataaaacttcactcgaagcagaactctatggagtgattaaagcaatcaacattgcctttgctaacaaatggcattgtgtatggttagaagtggactcgattctcactttgtctatgatagccaataacaaaacagatgttccaatcacaattcgagaagaatggttgaagactttacagcaaattcaaacgatgaatctaatatattcacatatataccgagaaggaaatcaagttgccgatctactggccaaccacggttttttttccagagacgaattttcgtggttttcagaagctcctaactttattataaaagaagctttaagggacatcaacggtcctgttagatatagagttaaggcataaagaattttgaatgtaattcgtatataaattttatactttgttgttcagtatattataatgtaataatacaacatattttttaaaaagagaaatgatatgaatgaaattattaaaactattttaaatcatgaacagttctttacatgtagaaaagttatagtatggtatagttcacttaattggctgggttgaaacaagcttagtatgattagatcataggaattagagttatgtgctatctagtagtggtgggactatagggatgattaggcataattttggtagagttgggcatgaaaaacactcctctgtttagagcgaacatattccaattaagacttctaaatgagataaagcacaaacaagaatgttgttgtattagtactattcacattcattcacctaactacttagcttaagagtgtgaaaatcgaaattaagtaattcccaagtgcaaagattcatgcaaatttagattgagacttgttcatgactgtttcaccacaaacaaggcagaggcataatgacacaactaatcagaagacaatacttgagtgcataaagcatgtaaaatggcacaatgaacttctacgcagagctggagtacaagtatattatattaatacttataaatggccagttcaaaatagtttctcaacaattaatacagatgaatgacaacagtactatcacttaaactactccttgaatctcatcagaagggggatgagatgaaagaacattatctgggtaagcctagatagcaatggagatgcttaatatggtccacatatatatgagtatcgatagacttcgacatgcccactctatatacagtaatgccatgaattgagtaaatctctacttgcatcaactgatggaagcatagtcataagcactatttgatagagatatattgattgtataaatctatttttttgtcagaatagaaatgtagaaattagtccaggatttttttgtgtttactctttgattttatttcccttgtaagtgtatatataaactgttcattataaactattattagtgccttattgcactctgctcacttctttcttgcataaataagctagatttcaaaaaaatttgaagctcatacttggacctatgtgaatcctttaatgagtaaagaagatctaaaagtgaatctatcatcatagcataaagtttaggattatgtcattttcgacaaatttgttgagtaaattccacttaataatttatccacattaacagacagcaagattaaaacctaggtggttttgcctcacatgaccaggaactagaagttagttacaactgtttttgtaactaagttccagtctgatcaaccaactcattacactataaataagctatagaaaaataacagaagagtatagaacagaaaaaaggtgagaaagaggaaacccttattcaagacttttgctccaagattcaggcgaggaaagctctcgtggtgaggaggtagatggaaggaagtacatgcacagaaaaggaaacaaagttagatcgagttgttaacagagaagaaaaaacaaaaactgtaaaagagaatcaatcgagccttacctgatcaaattgtgtgacaggaagctccaaaaggctgtaaattgccattgtcgatagtggatattaagccaaatctctgagatgagcttgacagagatgtagccttaatttggggtgaactctgaaataattttttggtgttttatctcctttactcaatttttgtttcttgttttggtaatgtgtgtgtgtgagggtgaagatcctagggtttctacttaggatcgagcaagttcttctctgctagggttttgagggtgtgagttctgtgtttgtgttacaggtgtacatcggtcggtttggtcgggttatagtgtatttttaccaacccgatataaatatcgggttgcaaatatctaattgtaacccgtccaatgaaaaaaaaagtgtaatgtgttagacatttatatgtataatataaaatatatgtatgtgtatataacatgcggaataaataaacatatacactatatgaatataaggatcgaaatacctc

SEQ ID NO: 36075 - DNA, 1234 bp, Cannabis sativa
tttttttttaaatttagaatttatagttgataattttgattgtatttaaatattgaagttgaaatttagaatttacatatgagtatattttttttattttattttttgaaaactattgtgtaatactttaatgtttattcaattcatatttattttttaacattaatttaaactaaactattttaattttgaatggcatatactataatcaattatttgaacaccaaaaactaacaacaataaaaaaaaataaaaaataaagatcggtttaaacgggttaacttgaccaaaccgacaaaaattattgggcgggttatactttttttattttttcattggacgggtttcaattagatatttgcaacccgatatttatattggtttggtaaaaatacactataactcgaccaaaccgaccgatgtacactcctagctcacactgccaattcctactccaaaaaattaataacataaataaataaaattgaaggtaatatgatgtggaaaaatcttttatgtatgtaaaaagaaatatttgaattaatatttagggaaaaattggttcactaaatctaagtatatcaaaattaattagattaattatttttttatataacccaaaagtactatctcataattcacttttcctgtctctctcttcctctattctctttctctctcttgctctcttcttctcacacatacgaagaccctaggaacccacaattgccaactatcgtgcctacaatcgcagatcaccaacccaagactcaggatcttcgaaccacgactaccacaccatgaatataagttttctattttattttattgtatatagtgtgatttaggattaaaatgtataattttatttatatgtttattgatttatgaataaattatatgattaatgtctgttatttgtaagttaatattagattagggtcaaaaacggtcggaattgagttttggtaagacaactagtatttttgtcaggcccgatggtggtctaatggtggtcatatggtggtctgatgtcttcctattgttaaatgagtaaaggttgaagacgaaagttcgatggtagcccgatgctaccaataaatgtggaatatggtccgatggtagtcctcagctcgtccatctcctcattccgtagtcgggttcgtgagctagaactcaatgagtaggctcgcttttccttccctggctgatggtgcgaggttcttgggtctct

SEQ ID NO: 36076 - DNA, 1962 bp, Cannabis sativa
gacgaaaacaggggtttttaccaacgaaatttgtcctcagtaatgctcatttttcttgtagtgactctttcaattcatcaatcaatggtctcaagaaaacatccatgtctttccctggggtggtacaccttaaaataagtagaaacaacatcaacgactccgctttcatgcactaccaaggaggtaagttatatgggactaagatcaccgatcacatgatgtaagcgttgctcatgttaccaaacagattgaagacatcagtggccaaaccaatctcatatttctaggttcaagtgcaaaggatggatgtcgaatgtcaaatcacttccactcttttgcatgtacaggatgcctaagcacgccgtcctctttgggtcacttagaataatgccacatgtccttggttgaatgtcttaaacattataacctcatcagtcctgaagttaggggaaagtaccgcatatcttgtcaggcaaccttctttcggtctccctttctttttttcgaacgattttctccaaatcaggacataaatctttcttctcattatccttccaaatcaaggcacatgatgcttgcatacgtcaattgaatcttaacctaaactaaggttacacaacttcatctttgactaatagtgggacttgggtaattttgtgccttctagaaataactcaatcaagatggatagtaacgttttgttgaaataactgaatagagataaaattttgtaaaaataacgggaataaaattatgagttataatttcagttttacgcgtctaactaagcgtaaaatattatcagtagacactacaaatttaaaatggtatagtttagcaatttttacttgaagagaaatttgtaatatttaatatttttgcaaaaacaaaaatagtaaaatactatatttatatattaagtgagtataaatataacttctcatcggacatagtgatatgtgataaattacaaaatattaatttccaactaaaaaattgatagttttacaaagtatataaaattaaaatagggatgaaaaattggaatttaggtgcgggaaggaataaggttgtgggcatctatggcttcattatttaatgggagaagatactcgcataaatgcaaggaaacagatcttacaatattcttattgtggataggatgactaattttgcccactaaaaaaaagttgaattaaaaatagtctcgaaagtgaaattgaactatgccactttgttctcaactttgattcattttttttttttattattattaatttgcatcttctaaagtgggtatctaacattaccaacattacttagtccggtaaaaaaaatggacttgttaaagagtaaaatttaagcgcataagattctccaacgtgtggaaatctccatgttattatttgtatgtatactttgcatttattaagttatgtttctaattaactataatagaaagaaaataataatgaaaaggttatactagtaacttgataaaaaaaattatactagaatttgaaaatatttttgttttacaattttttaaatcacaaaagtgaaagtggaatttctttttttttttctttatttttgaaataaaattgtgttctctaagtactttgtttttcaatttttttttttttaaagaaagggtgtttcataaattttttttatttttttattttaaaaacaaaaaataaaaatgggtatgaggtgtgggtttgagggttagggcccgatacatgacgtattcgagttcaggggctagggcttggtataggtttgggttcgagttagggtccgggtcgagattcaggatccgggtcagagttagggttcgaggtcttgggttgggggtggttttaggtccaggtttggggttcgaggctgaggtttaggtccaagttcaaggttgacgtctaaggctgggttcgagatcgaggttcgggtccgagccta

SEQ ID NO: 36077 - DNA, 1670 bp, Cannabis sativa
attttaaaattaataatatttaatataatgataattattaaaatttgaaagcataatagtgatttaaataaaaacaaaagttactattatattttgtattagtaattaaaaaaaatattattcgtgttaaatttattttcgaataatttacgtggcaacatttaataatttattattttttttataataaaaattctcttataaaatagatataaatatatgtatgtaaatattaggtattacaatactaagatacgcaaataaccaaacgttatacgtacctgacacacgtggatttgcgtttaagatacacgtacgttaaattctcgttcttgcatgcatgcatgtataatttcataatcgatctccatattctccaatctattgggagagtttaatattatatatatttacatgtactatatatatatatatttatatatacatgtatacatattagttaaagagataattatattattatattatatatttgaatgatcatgagatctgaggagaattttttgtgcagagcgtgtgcaaaccgcgtaactctgcctcatgtattattaagtcataatatctctatctacattattatttatatatatatatcataattgtatttgtatctatgtttttttgtgtgtgtaaattaactaatatatatgtttatttatttcggcttgtcgactgatatatatgtatataatgatatatatacgcggtgaatacatgggaactagcttatttcaattaaaaatacttatagtttatgtatataattatgaatatgtataaatatatagtaaatatactgtacagttgaagggtaatgtaagatatgacccatatggggacctttattatggtcgtctactcgattaaaaattacaccaagtgtaccaatttggatttattaatataagaaaaaccgattggtcttgatgatattaatatctccattgaattccaaattttgaatccccttttctcactataaaaaatgttatttttaccagtacagttcactattgagtttattgtgctggtaaaagttatttttattattacattttacaaactgcgttggcaaaaaaaattaaagttttactagtgcacatttacagtggctaaaatttaacttttaattaccagtatatttatacgctgacatgagaaaagttatttttaccagcgcatttcattttgtgtacagttttaatacgttaatttctcaatcctttttgccaacacatcagaaataaattccattttaccagtacaatactaaacttaattttaccagcacaaaaatatcaaaagttaataataacaattgtagtattatcaggtgttcatcaaacttcatactaatttattttgtacttttatatagtaattagtcacatatttatatattaaggtagcgtttggttaaaagtagtgaaaatgagtggaataaaaaaaatatattttatttatttgtttagttaaattttaaagtattaaaatattttcattctaatattattaggcactatatcaactagatatcatgtacaacaaattaatgtttgggtaacaaatccaccttcgtaattagttacaatcaatattagttcttgagttacatattttactagaataaaaaagaaaagaaaaagaaa

SEQ ID NO: 36078 - DNA, 2158 bp, Cannabis sativa
  modified_base (825)..(825): a, c, t, g, unknown or other
gttgatctgtagctgacccgtccatgtgtaatttctaggttggtctgtcttcattgttgttcagctgggattcttgtactggctctaggttgtcctttaagctactttcttctttgcctgtgcactcaactacaaagtttgccaatgcttgttccttttgacttgttgttggggttgaaagattatttcatattgaccaaactctactgcctatttgagtaaccgtccaaacgcgtcaggtttttgtaatacttggcataatggtttgtcagtgtatacccgaataggatgagcctggaagtagggctttcacttccttgttgctaaaattaggcagtaagtaagcttttctatcaatgggtaccgtccttcagcttcaacaagtcttttgttgatataatagattagatgctggatgttgttttcttctctgatcagcacgacactcacagtatattttgtaacagctaagtatattcctaattcttctctgtccaggggttttgagagtacatgaggttttgcaagttgtctctttagttcttgaaaggcattgtcgcattcctccgtccatttcaatttcttgttacctcaaaggatgttgaagaaaggaacacacttgtctgttgactttgaaacaaatctactgagtgcggctatctgactagttaagttttggacttctttagttttttttggcgatttcatatccaggagggcttaaatttttctggatttgctttgatacctcgggcattaacaataaaactaagaaacttacctgagctgactccaaaggagcactttaagggattgagtttcatnttgtattttttgaggattttgaagcactcgtccaggtcatctatatgccccctagccttcctgaatttgacgagcatgtcatccacgtatactttcatattttatccaatctagtctttaaacatttgattcaccaacctttggtaggtagctccagcattctttagaccaaacgacatgaccttgtaataggacagacccatatctgtttggaaaattttatgttcttggcctggtggatgcaatctaatttgattataccccaaatagacgtccataaagcttaggatctcatgcccggctgttgcatccacgagttgatctattcttagaagtggaaaacagtctttggggcatgccttattgagatcggtaaaatcaatacatactcaccattttatgttgggcttgggtaccagtacggggttagctacccaagccgggtaaaaagcttcgatgatgaacttgttattacacaacttttctacctcttattttaatgcttgtgcccgttctttgtctaataatcttcttttttattgaacatgatagaagttcggatcaatgtttagggcgtgagatattacagaaggattgataccgaccatgtcctcgtgtgacaaggaaaaaatgtctaggtttgctcttagaaattttattaaggctaattttacttcgagcaacaaacctttgccaattttgagtttcctggtcaggacatttgggtcgatttctatctcttccaattcttctactggccccacatttgtatttggttccccaagtcagggatcaacatcttcgtccccgccttgggaaacttcctactgagcagtacgtttccccttgtccaaactttggccggaggaattctcttttttgaccttggtcagggcaaggttataacattctcgtgcaactttttgattcccttttaggcaccctaccccattctttgttgggaacttgatgcacaaatgaaaaactaaagtgacaaatttcaattcatatagggctggtcggtctaacatgacgttgaaagcaaatggaacatcaattatcaggaattgtgccatcacagttatgctcttcggagcttgcccaacattgaggggcgaatggatttgccccaaaggtgcaacactttggctagaaaaaccatacaccaattgagtacatgggattaaatctttaagttggagccccatattcacgtatgttgtcttaaacaaaatgtttgaagaggctctattatctgtaaagaccgcttagtttaaatttggaaattagcagataagtaaggtttaactatgaattagttattaattctcaa

SEQ ID NO: 36079 - DNA, 1383 bp, Cannabis sativa
tacaacccccatatatcgttgtttaatatgtcatcccaatcctccttattctgtttaccacgtaaaagaaccccaagtgatttaatagctaaaggaagcccattacacttttcaacaatttttcgaccaattacttgtaaatcagtgtactcgtgcgtgttgacatcgattgtagcacatctaacaaacaactgccaacctttgtcagtagagatagtgcttagggagtaagttgacaacttatttcccataattgatgcaaccttattgctacgtgtcgtcacaatgatcctgcttccatgcaaccctgatttgaaacaactgtttaagacatcccacttggaaggatcctcatcccaaacatcatcaacaacaaacagaaacttctttgtactcagagccttctttacttcttcttgaagatcatacggctcctcaatttcacattttaccgaagtgaccttctcgacaattagtttcattactttcatgcagtcaactttgtcatctcccaccgtaatccatactttggtatcaaaaaaaatttcaactctgtcatccttgtatacgagttgagcaagagtagtctttccaataccgcccatccccactatggggatcacagacaatttgtcaccaccacttgggtcatctgacagaagcaacttaataatagcttctttatcatcatctcttccataaacatcagattcttccaccgaaggagtacatactctttttggatgattttgtttttctatacgtttcaaaccaagatctttattgtctagaagaagcttcaatttcccaagtgtctcttctatatcaggtttgattgtcttatcaaaagaagttaaatgagttgatgagatgagtctcatgagtgcctgacaagtattatacagaaagagtgaggaattgtattatattctcatatattagaaaagactcatataactatttgtggtgtacaaattcttttacaaacactctaattcaaataaactgctcaaaccttaataagaaaggtaattgatttattattaccttgctagtacaagtgcagccgctatgagattcacgaggaccaccatcttccagatcattttgccatgcttcagtgtcgatcttgtaaaccaagtcatctgcatcataaatggcatccttgagatcatcaagccacttcctgactcttgggtctttgatgagcttctcctcagcatcaatgagcaacagatcagcagaggacagcaaagttttcaactccttcaacagcttcagaatggcctcttttcctttgaagaaatccttgacctcagtggttaactttttcaccaaaggattaagcaaagcggagagaagcgctcctccaaccacttcagc

SEQ ID NO: 36080 - DNA, 1558 bp, Cannabis sativa
aagtgttgtaagggcaatgcctgcatcaaacatttggtcagtgcaactttcatcaacatagaatttccatgttagttctttgggattttgttcctgctcttgctctagctttttctctggctcattttgttctccagagtcttgaggggtctcaagagtcgagttggtgcactcagctacgaagtctgcaagggattgacccttcatgactgttcttagttggtatgtggtcttgaactggcctagctcaataaactatttaagtagtcagcttcatgctttaggtttctccaaaaccttctgcaacgattgattggtgtacacctttatggatgccatgagcaagctgtaggttaccttctccatgagtgggtatcaactttctatgtcgattatccttttgctgatgtagtatacagggtgttgtacactgccttcctcccttgtgagaaaagcactcaaagcatgctatgtgactgttaggtacatgcctcgttcttcatagtgtaaaggattagacaacactggtagttgggccaatttcttcttcaactcttggaatgtgttttcacattcctctatccactcaaattttttgtttccactgagaatgtttaagaagggtatgcatttgtctgtagacttggacacaaatctgcttagtgcagaaatgcgtccagttacgctttgtacttccttgacagttgtgggcgacttcatgtccaaaaaggcttggatcttacaaattgtaattttattcataattatcataaatcattacagagataaatacaaaatttatatattaaattcactggtaataaggtcgtaaatgttcactattccaatggttctttattagcaagccaataagccaagctaatttgtaaaccccagttctcatgatagcttcaataacatatggaccttcccagtttgggttaaaccactgcagcagctggatctcgcgtatttgtaaatacacatcttaacaccaaatctccaactttaaaaagtctttttcagactcttttgttaaaatatctcatgataagatgttgataagttgcattggttatttgcgactcattatgcctttcttcaggtagacccaaggacatattcaaaagttcttggtcctcctgattatagaaattactcctgttcgacgcaatgttaacttctactggtaacattgcttccaagccgaatgccaaggaaaatggagtgtgtcccatcgctgctttctcttagttctataggcccaaagcacctgtggtagcttgtctacccaccttcctttagcagcgtctaacttctttttaattgtatcttttaaggttttattaacagcttctacttgtccatttgcttgaggtctcaatactgatgagaagcttttaataattttattcctttgatagaattcagtgaatgattctccattaaactgagtttcgttgttagatactgttttgattggaattccaaacctaagttcttgataataaggtgaagaacttttttgtatgtgatggaaactagaggtttagcctct

SEQ ID NO: 36081 - DNA, 1079 bp, Cannabis sativa
  modified_base (45)..(61): a, c, t, g, unknown or other
gtacataaacaatcactgaaatagcaaaattgaatgaaattagannnnnnnnnnnnnnnnnaacaatctcaatagttcgaggggagtttctaacagccaaaaaaagttcaggggcacaatttagtacatgtcaaagttcggaggaaaaattactaattagtcattatttaattaaaatgataattatttcaaaaaaaaaattaaaatgataattattaaaataaaagatctactgatattttgatattcggttattatatatttatatttgaatttaaattttaaattcaaatcaaattagatatatctttattttgataaaaaatcagtttaggatctattttatcatttaacaaaatagagagtacaattagtaacttttctaaaacgtaaaatctaaaataatatttatcccattatttataaaatcaaattatatatttacacctataataacatgtcactctcacgatacttgtcactataagattccccatagcatttctctttatcaataggtcgtttgctgaagtattaagctcaaatggtctgcgctcctttagttggctttaattgttgtggtcggtagtaacgttccaattctacaaatggtatcatcttatatgattctacaaatggtatcaccttaaacccacgcggcaaaaagctataaatgtaaaacgagtactatagtcggactataaatatatatatatatatatatatataattcagtcttttatacatatataatttgatcattaaatttgattttggtgtgtactgtgtactaatattcatttgttcatattaataatgtgtttatgactagctaatggcttttccttgagtcttcttatactcgggagccaaacgaatcaaaccaagcaaaaaagaaatgatgatatatagaaaaagtcatgattatatctatagccaccaatgcatgtttgaaatgaaaaaaaaaaaagtgtttgttttctttattttatttccatatttttatttttatgcatcctttgtttgaatttgttttaattctgaaaaggagaagttattatgaataataataataataa

SEQ ID NO: 36082 - DNA, 1840 bp, Cannabis sativa
tagataccactcggcctgagtctgctcggccagaggacatcagggtggtttgggaatttctagatgtgtttcctgatcaacttctgggtttaccactgcagagagaaattgattttgtcattgacttggcacccggagcaaaaccgaattctaaggcccctcatagaatggctccagcagaacttaaaaaactgaaaaatgcaacttcaggggttgcttgacatagggctttcacgacctactgtgtcaccctggggagctcttgtactgtttgtcaagaaaaaaatgggtcattgtggatgtgcattgactaccgagaattgaataaattgacaatcaagaataagtatcctttacctacgatcaacgatcttttcaatcaacttcaggggaagacggtgttctcaaagattgatctccgatagggctatcatcagttgagaatctgagaggaggacattccaaagacgaccttccgtactaggtgtgggcattatgaatttttggttatgtcttttggactaaccaatgctcccgtatcttttatggatctaatgaatagggtattcaaggattttctcgatatctgtgttattgtatttatcgatgacatcctggtgtactctcaatcagaagaggagcattaggaacatctctttatggttttacagaggctttgagaacataagttgtacgccaaattaaagaagtgcgaattttggctatctcgggtgtccttccttgggcacattgttagcaaagacaggatcaatgtggatccgggaaagatagaatccgtcagggattggccaagactgaaaatagttatagaagttagaagtttcttgggtctggttggttattaacgtcggtttgtagaagggttctctaaaatttcaacacccttaaccgagcttgcaaaaaagaatcaacattttgtgtggacgaacaagtgtgaagcaagttttcaggagctgaaacagagattaatcacagctccaatgttagctctaccttctgataaagagaagtttgtggtttattgtgatgcatccatacagggtatggggtgtgtactgatgcaggccgatcgggttattgcctatacctctcgtcaatagaaagagtatgaacaacgatacccgacccatgacctacaacttgccgcagtagtttttgctttgaagatttggcggcattatctctacggagagatatgtgaaatttatactcaccataagagcctcaaatacttctttactcagaaagacatgaatatgaggcagaggcgttggttagagttggttaaggattatgactgtgaaatcttttaccatgaaggccaatgtactggctaatgccctgagcaaaaagggttccgagcaggtaactagtatgattcagatttcaccacggttagttgaggacatggtcagatcaagcatcgagtttgttgtaggcgaacttcataacttgacactacaattaaagctgctcagttaactgatctagaattaatgaagatcagggaagagatttcagctggtcaagctagagattttacagtgtcaaatagtggatgttgttgtttaagacaagagtttgtgttccaagtagtgcggaacttagaaacgaaattcttgaagaggctcataccactccatactccttgcatcccggaaccaccaagatgtatcaagatcttaaatcctacttctggtggagcaaaatgaagaagaatgtggtagaatttgtatcacgatgcctcacctatcaacagatcaaggctgaatatcagagaccgacaggtttgttacagcctttgacacttcctgagtgg

SEQ ID NO: 36083 - DNA, 1566 bp, Cannabis sativa
aatctctaaattgttgataattgaagacaatactcataggtggattttaatatttatttacttcgagagagataatagtgtaacttttgtattatgcacttttcattttactcgggtataattaaattgttttcattgataaaaatatggtagtatcgataaagcggcgatattcctgcaaatagttatttattttcatttaagatgattagatataatgtgcataattaatttaattaaaaaaatctacttatgaaaggtataaaattattttatttatttaaaactacacctctgcaatataatctattagttggctagcaatacatgaaaatattttttccacaatatctacgaacatgcagataggctttttgtattgtcatcaagttcaacatatgctataaaatcctttatgtaaagaccgcctaagattatcattttgaattactattcaattaaggttatgtatgagatttaattaatatttacaaaatgcatattgtggaaatatatttaagttcttatatgttattatgctatttacgtaaatatttcaatttatgtgttgtgttcggaagctgtggaaaataacgttgggcctttagagagttgcgtttatatgtttagaatattattttcggggtgtcattgttgggtattggaggtgttggaattttcggagtttggtaaatgactagtttactcttgggagtttttactcattttaatttatctaaagggtaaatcggtcttttttcctaagtggttatttgtcttgtagtgaatttggggggctgattatattttggattgggttatatgtgattgaaaagaaaaaaaattaaaaattaaaaggaaataaaaaagaaaacctagaaaattcatttactcttcactcctctctctctctctccttcgaacctcactcattctcagcccaaagtttggattttcatagctgaattcaggagtaatcaagggtgttgaagcttgtgtttaaggtattgtgtttctagtctttctctttttagtaattcttaagtctaagctaggttttgaagtaaaggttgtaggaatttgggagctgtggctataattgttgttttaattagaattttggagtttgcttgaggttatttaggtggatttgagttgtttttgggtgtggtagtgagattgtaacaaggtttgagtttatgaactcaaaccttgacctctaatggtatcttgagattttgtgtcatttattgtattctgctgcttgaatatgcttcattatagtgcatacatgtattctggaagttttgggaagttttggggttgatttgaattaaagggatcggttttggggtttccagcttagaaccagtcgaccgattctgggagacctctagcaaccggtcgaccggttggtacccaggaactggtgttccggttgggaaccggtcagccggttggggctttttcccgaaccctaattttccctgtttttgtgttattttaggtgttagcatcctatttatcgataggattattcttagttttgattttaaatcctcgata

SEQ ID NO: 36084 - DNA, 1412 bp, Cannabis sativa
ctccttgtaaatgatatttcagtaaactaatataattgttgaaatgagtactctaccatttaatctcgtttagccaagctcgaaagaaatcatcattttatttctattcatttatagaagctgtagactctctatctatgattagcgctcccactcaattttactaccatgttcccaagatgtaagtattggaaaggtctaatcagtcaattttaacgaataagtcaaagaacacaaataatacaattgaaccataacctaaccatctcaggattgagattattggtctaagatcaactaagttatatttacttagaaagatattatggtaagtttatgatatcttttctatgtaaatatcggtctagttcaatgtataacaatacattcaatacaagcttactttaccaatatagaagagacataccattatccaagtgtaagtaaaccacattattgattatcatttcagtgcaaatcttgtgtactgattaatcgtgggactaaagtttaatcacataatcttgattacttttactgtgtagacaacacaataatcataaataataatgtgataaggatttaaatgaatttataaatcaacaaataatcatgaagcaaacatgtgaaccaagtattaaacaagcagtaaaataattctatttcgttattgataaatgaaattcaagataacattgaaatattgttttagttcggtcgtgaaacccaaaaaaactcccacttgcactaacataaaacaataagtacatttcaattaatcctaggttctcttttgtgcttttcaaatacaatctctatcaaagtcttggtgaatgggtcgactaggttgtcttcaatatcaaccttttctaccagcacttttcctgttgccacatattctctgatgatgtagtattttctctcaatgtgtttactcatcttatggcttcgaggctctttactgttggctatagcagcagtgttgtcacaaagaagcactagtggtttttctatacttagaacaataccaagctctgtaaagcactttcttagccagaccagttccttagcagcctcaacagcaactatgtatttggccttcatggtagagttagatattgaggattggttgacacttctcaaaacaactactccactcccaagggtaaataccatcctagatgtagtccttttgtcatcaagacaagcttggaaatctggattgatatagcctaatgcatttaaagtacaacccttgtagactaacacataatctcttgtcctctttaagtatttcagaatatgcttgactgctgtccaatgttctctttttgggtttgattgaaacctgctcacaattcccacttcatagcaaatgtctggtctactgcacaacatagcatacattagac

SEQ ID NO: 36085 - DNA, 1040 bp, Cannabis sativa
aagtgcaattaagactatgcagatagtagggccaaaactaatgccaccacctaacctagtgcctataaggtaaagaaaaaataaagacttttttggcattaaattgatgtttgctgtctctttcagttttccttttttcttttcgaaatacactgccagttgcatatctcccaaaatataagtaattattataagtatgattttaatcaaaaaataaccataaaaatattttattatataattttattgagatcctattttttattgatggtaaagtgctaacttagaaatacacaacatattaaataaattaaaaaaaatataattgtgtatttttgagtgtgcacttatttaacgggcttaattagcacttcacaactaaatattcttatatattattacatgcatgttttgtttttttttccaaaagtacataaggatagttgaaatccatgtaaataatttttttatatatatattgtaattactattaataaagtactgtaatttttctaatgtcaacatttatcataaattctcagtgtaattatataaagtactatattatgtactatattagtgttataagttttgtctttctcagtaagactttttatgtcaacatttaatcataaattgttagtgtttatgactattataagctttaaacatcacaactataaaattactcaaattgaaattaaagcaagaaattgttttgacacaagaagttataatgaggtttcactagtttattagtttatttgagccaaagatactacaaaacaggtcaatttctcatcatctttagtacaaaagttaatgaacttaatagccttttataagctacggttttaaatgttatttgcttcctattaattttaatttaacgatagtattttctaatacttaatattttggtgttgttttttggttttcaaataatatttcattattccaaatcgaaactttagctctcttagtaatacttaattaagctccttcagatagaatatcaattagaaaaatttattcaaatt

SEQ ID NO: 36086 - DNA, 1706 bp, Cannabis sativa
gcatttttatttttcaaaactaaattttttaaaaacaaaaattttactttcatttagtgattgaaaaattaaaaaacaaaagtattaccaaatgacacctaaattcaaaatttcatattaggaacaacgtttagttgggagggataaaaatataataggaatgggaatgagaatgagaataaagataagaatggaatggaataaaatttaaaaagtataaaaaattgattaaaaaaattattaaattttttcaaatcttgtattggaatggtctttgcttctattttaaaatagaatagtcattccactaaaatgatggaaaggccattctatcaaaatagtaatccaatagttttaaatgcaactaaataaagaaatggaatgaaaacaattttctttccattccattacattttattacctccgaccaaatgccactatagtttttaaaattactacctctcaatcatgaaccaattatgaaagtgtatgtattgttagtgaacaccaataccacatggtttatcttacttaaaggccaattattaatactatactttgttgcctcttcgagagttggccagtctccatgttagaaatcaactatcaaagttgcatatggtattctgggccggccctgaaacaaagtggactatagaaaaaaaaattatttttgggctcttatgttagaaaaaatatagtattttttaaaattagtaaaaaagaatataattttaaaagggaaattttttttgggcccctgggctaggtgggccctaggcacaggcctagcccgcctatgcccaaagtcgggcctaatggtatcttatttagctcttcttgaaaacaaattaactcataaaagtaacagatcacttatcgatcaaatgatgaggtaacacaacagtttaaacctactcatagagtctcatccacacgtatttcagtatgaaattttattttttacttgaaagaaataatcttttttatctcattagtcacattagccgggtgtaaacaaaattcactaaaaaaaaagaaataaagactcgatgtgacttattactttaaatttagatctatcaaacaaatgtgattgtagagtcaaatagtctgtgtacaagggatgtcaaacacaattcgtatggtctctcaatttaattttttggtgaaaatttgttgtttattattatgtgagttgtctaatgttttcttacttattgttaggcactctgctaatagtattgctcgttgtattgtaaatacatccggttattacttaggatataatttgggagtggatgatatcatctgatttcctttccgtggttcagaaagaacttttgatttactacatttgattcaaaaaaaataaaaataaataaataaacaaactaactagattcattaagatgtttctttttggttcttcactcttccgggcctaacgatcaaaagttaaattgaaaagaagttcttttttatattcattaataaaaaaaatacacttatattatattttattaaaatatacatatttttaatgagtgggttgtctaatatatctatactctctatttaagtctaacatatagattatattaatctatggggtctaatgggaacatcatctataaaagtatgtatatattaaagaatataaaaattaaagtacaaattataacaaataaaataaagtgggtata

SEQ ID NO: 36087 - DNA, 2409 bp, Cannabis sativa
  modified_base (2353)..(2357): a, c, t, g, unknown or other
tgtttattattggattattaggttttaaattatatttttttctttttaatgaaattagcctaaatagtggctaaaatggattggattcatatccattggacggatccaatccaatccaataaaaaaaccaattaaagcatccaatgaatggaaccgatccaatccaataaatccattggatcggatcggatcagatgactcaattcaattggattggatcggatgggtccaaatccattagatgtgatccaatgaacaccccagtggaataagttaattctatttattattattattattattattattattttgaaaaagtaattctatttattattatttatcaatataatatatatttgaacagattaatcatattattaattgtattaatgtttttttttttgacgtgaattgtattaatgttttagttttgactttactttttattttcttataacttttgtttttattttgtctgatatttttgacttacggttgtatacgttatttatgatttaatttttaacttatatataaattttacattaaatgttattataacttttaatttgcattaaatttggtaattttctttctcacttgtttttaacagtaattttatggctatttttaaagttgctttaataaattgaatcaaaatatctttcttatatgatgaaaaaaaaaaactcctttttatagaattttcacgtgcttttattttaaaacttgtgcttctttagagattttgtgctatcttaagtggttttttgagccaattaagattattatactatattttaaatgattttgtataatacacttttttcttttgatagttgcaatttctaaagattaagtcgtcaaaagtctacttaaagataaagtggccggcattttgctcaaagaaagtacatagaattttctaaataatttttttcactgttaaaagtatattaattaggtgtaattttctcaaaaaaaaaaaattaggtgtaattttcttcatatcatacatttattttaatattaatttcttgataattgtgtttaatagaaaattttaatatatttggtagcggtggactacatgggtaggaattaggtggttatagagtagtcaaaataattgaactttcaaaaaaaatttgatataccaatgttttagtgataaatattttgatttgatcagtattaattagggctgagcaaaaaattcaaaaatctaaataaattgagtacaccgactgtccaaacaccgaaaaaactaacaccgaaaaaattgaaactgaaaaaactacttccggttataaaactgtctttgtacaatcaattttagtatcaatggcaaaccgaccgattaaactgagaactgaccaaacatatatattatacactatacatatataatataattacttttatacatatttaatatacaattttattaaattagtcttacttatctttttcattcaaagtctcacttttctatttctttatattattataatttgatgtatttatgtattatatacacacattcataaaataatatgagtttcttaatataattcattatcatactagtagcacaaataatttgaacaaatttaaaaaaatttattttacattagttatttaagtgagaaagtttttgttcttaaattgtatgatatttgatataatactttagtttttttagttttcagataactatagcaaatttaaagacttgttttaaaaaatgatgaagttaggtatggtcggtttaaaccgaccaaaccgtggattaaaataatcgtttttttaatatttatataatagtcaattaatttctggattataattttgaaaatcgaaaactaaattctgaattttttgtgtataaaaaaccgaacattgcttacccctagtattaatttaattgggttatttctcattttacattaaattttacggttataggtgttttatttattattattttacactttctgctatcgaagagaagagatattcagagtacaattttaaacatattagtttctatttaaggtgatactattttaatctgatcaaggatctcaaagataagtttttacatgtttaaatatttcatttattgccaaataaaaatagttggacattttattacaatataaaattttataatatttgattattttgggtgctaataatcatcgttatatatatattatttattattttgtaggtttgctttaattgatcatataggtgctatgtagggcagtctcaagttattttatctatatttttaggataatttaggtgttgtttggtaacatttttgttttttaattttttnnnnncaaaatgaaagtaaaatttttatttttaaaaattatgtttttgaaaaataaa

SEQ ID NO: 36088 - DNA, 1928 bp, Cannabis sativa
gtggaaggcatgggcaccacctatactcagttccagtagatccctatatattaccatccacccttcacgctagctcttagagatatagctcaaaggatcgctcagctaccggatcatgcccagaatatcactttgttgacctcggaagccaactttgtggagtacgggctttatccaaaggatttcattccacagcctatgaaggagaagaagaggaaatccagtgctggccgggatgagggagctcatcaagagaatgaaagcgtgaggttaagttgaagggaggtgcaggagccaagcagtatgcttgggagcattttgagcaggaagatgtggttgaggaagagcaggagactctgctcaaaaggaagaagaaacttctgaccgggcacaggcctatcgaacaaacgattcagatcagggagcccagtttacatgttcgaccatccactccattagtaggaaagaggaaagtcgtcctagaggagcaagaggactcgtcggatgacgatgccccttcagtagttgttcgggtagacgccactaccaaagtgcagcgtactccatcttgttttcaaccatcttaattatcatgccttcatatttttcatgttttttttaaccatgttactttcattttgtgcagacatgtctcagaaaatgcttgaggctctgaagaagagagtggaaggaagttcgggcttatctcctccggctaagaggtccaaaggcaatgagacaactccgtctagggagaagacaccagctgaaatgctcattgatctctctgaggaacaaactgttgtggaccctcctgtctcaaaaatgactaaggccaaggactctcgaggaggtagctcggataggccagagcaatcgaagggcggatccaagctgatcaaggcacctgccccacctctagtgctacacccgaagaccaaaagaggcaaagacatgctcattcactatgtgactcgatcggtccctgaggcgaacgagcagctggctggggcagacaatgacctttccctggagttggtgatgggaggagctctgaaggagtttgcaagagtaagtctttcctgacattttccctttatccttcttcatatagttcatattttaacactctttctccgtatagaatggtctgaagatagcttacgcttattcctgggccaaatcggctgcctctaagaatgccgccatttccaacactatactggcggaagtggatttggctaggaatgatgttgatgaagccaaggttcagcttggggctgtccggatgaaactgggagaggtcaacaagaaacttcttgctactgagaagacggtggccgaactgactaaagatctacaggctttcgatcaacttaaaactgccattgcctccttgtcaaaagaagtgaccagccttcaggaagaaagggaggttcttcaagctgttttccgtaggttggaagaagataagaagaacaaggaggaggagcttaacagtgaggttgagaagtacaagtcagaggccgagcaacaaaaaatgaagtagcgaggcttggtgggaaggtaaatgccttagagacagtgggtctcgagattttttatgatttctagaaggctaatcctcaagcaaattttgatttcctaggcgataccaaagacatgtttctcgagtactatgtttctcaagtggcttatggggaacccgagacttccacttctacctctggccagactgttgacgtgccctccatccagaaaaacgatcatccacctccaactaacctagaagacccgtacaaagagcctagaactccagccatttgactacttgctttttctatcttttattttatctatctggccataagaccttttttaagacaaggtgaccgaccaagcagtctttaaacttggaattatttttc

SEQ ID NO: 36089 - DNA, 2354 bp, Cannabis sativa
  modified_base (1474)..(1480): a, c, t, g, unknown or other
atgaaaattattttctttctattccatttcattacctctaaccaaacgccatcttagtgggtaatatataaattttatacattagtttcacattctcaacatgtaattttcttacccatattgtcattgtcatgcaaattaaaacttataacaaatacactctaagagaatattattaattagttttatcgctgtacctaatatcaatgttgtttcattataattgagcattgaaattttttttattggcatatttaataaaataaacaaaaataatgtttgtaatatttttcgaagttgcccttatatgtttattatttaattttaaaaatatagtttctattttttttgtgtgaaaagattttcaaaatcagattttatactcttttgatttattgtgaattaaatatgagtttttcttttatagaatatttgattttatcctttgcttaattcttattcatattttattcatttttatctgatttcttgaccaaaaaaccgtgtacagctataaatgataatgtaatcaaaattactttatttatttatagaaactttgctaaaaaactgtccaagttcactgtaactgtttgaacggactgattgtctgtttaaatagattttgacttttctatttgggaagattttcatttaaatgatctgatcgtttcttggttgtttgtccacgacctaaaaatattctaaagtgtataaattcatccttaggtcactggttttggttagctctcttggtgtatcaattctaaattacttttcaaagttagagagtgttttctttgttgtgtgaagaacttgagtccaacaagttcttagtattttattattgtgttattctgtactgcttcttgttgaaattgtacaggttgaacactttggatattgttactgcttcttgttgaaattgtacaggttgaacactttggatattgttaattaagcttcgggagaagtcttgttcgtgagtcactctttgggaggaagattgcaagttagacattctttgggagaaagattgcatgtgagacactcttcaagatgaagtgtgcaagtgctacgaattgaaagaagttcaaggtctcgacacttcagaaatttgattagaagaatagattttattctctgagtgtggtatcgtagactagaaacaattcgaaagagttctgatacctcgtataaaatattgtgtgttattttattttctgcatttttactttttgcagtatatttctgttcaatcaaattttgtgtctaataaaacataattctatattatttaaattatttgataatttcacttggtaattataaaaacgaaatttcaaacagtaataacatttagcacattttaaatgtatcattttacaattaattaaaaatactcagtacaaattattagtggtggtaggcaccacttataagttttagcatttatcttattattattattatnnnnnnnattattattattatattataataagtattatatttattatcagctgagtgtggcaattggtgtggatagatagagaaccacccaccgaggcttcacactcgtttcacttctcctgtgcctcacaagtcacaatatcatttttatttttattttatataaaaaaaaaaatgaaaaaaaaaaaggaaagaaagaaatgaagaaagttaagtaatagtgaagaaagatatgatttttatttcttttttcattacaccacagccattattgctttataccactaaagtaccacttctactactactactactactactaattcaaggaaggaggagaggactcatcgtgaccaggaagtaccccacattcctattctttcttacggaaaagggttttccttcaaatcccaacttcttcaatcttcaataataataacccaaaaacaacacaaacctcatcactctctctctcttacgcggaaaaggtgcattttttcccatgttttctctgttcatgttggttgtgaggaactgggttgtgtaattttattgggttttcttgttttctgagatcggaaatcggaaaagggatttctttttttttttggtggggaattggggttgaagctaatttaggtgtggtgggcggagatggagtcatcactgggtaattcagaaatgtatggaagaattaataacagtacgaggagatttggaattcaaattcctgagtcgaatttcataagggcgccattgactgcatttttggagcatacgggtatatttggaggtggagggagctctgtttctcaggcaacacgtggtttggttgggagccggcactctctgattcgtaactctcttcaggaggaggacga

SEQ ID NO: 36090 - DNA, 2006 bp, Cannabis sativa
  modified_base (41)..(47): a, c, t, g, unknown or other
cgtgagagcgagcagatggaggttgtacatgtcggggcggnnnnnnntggagcgtacggtctttgggacatcagggcttatttcgtaaggtcgctaggattaaaacttttgtatatgcatttgtgaaacttttgtaaatgcttttgtaaacgggatcccggaattatgtatgtatgctattttatgtttttaattatttaagcaaaattttaattaatcacgcttttcaataaactcgttgagtagaaacgagctgcacagtcagttaaaaaatcacgttaacatgcctaaaatagttagggtgttttacctaaaatgatagaaaagtcattctattggaatgttattataatattttaaaatacaactaaacaaaagaatagaataaaaattattttcattccatactgttaggtctcttttgacaatattaaatgtcaaaatattcttaatttattatgaataatttatggacataaaatattcttattttttcttgtgtgtttatcacgttttttatggttgtatttttatttaggaaactttgcattaaaaagagagaattctctttataaaaagtttgtttaaattggcatatttttggtataattaactctaattgtatggtgattaatttgaacgattttctatgtatattgtagattttctaacctttttatggcagaaaatgaagtccaaattgtgatcttagacttatataaaaagtttcctttttcgacccaatctgccactatagacttcaatcttgttgctacaaatcaagaattatttcaaaaaacttttgtacatctatacaaacgtgattgtgactatctctaggatttatatgatctataaataggacctatagagcagccaaacgttctcacctccttgagcttcattttttatattttcatctttgtgagaagagagtttctttttgtgaaaacctagagtgttcaattgggttttattctttgtttattgttcgtatattattcttagaatagtttgaagaactccattgaacaagagaagggtcttcgggagaagacttatcaaagccttactttaggaggaagtaagcactcacatatcaaaagacaaagggattcgctatttagtggtgtttagaaattagattggcaaactaaattacaagtaatgcgacaaagctataaagagtctagacttgtttaagtcaattgtatttagtaattatttgagactattctaattgatttcatgatctgggtgtggcgccgtggataggagtgtttcaaagaacactaataccatgtataattctcttgtgtcaagtttttacattgcgtactgttatttctattttacttatgcaaatttgtgttatgcaacaacaaatttctattctgttactacagatcgaaacagttctgttttaattgctagaatttaataaatatattagcattttcaaaaacacggtttttcaattggtatcagagagggacactaaactcttgtggtcttttaatgttttcttgtgtttttgtaatatgtttctctttgtagaaggaagttctattattcgtcctccacttctaaataactctaactatatgtattgaaaggttagaatgagggcattcatcaaatcccaagatgaggaagcatgaagatcaattctttcaggttggtctcacccttttgtgaaagatttagaagataatgaaaaactaaaacttgaacttaatggcctaatgaagatgataaattgcctgcttacaataataaggtgttgcatgctatatttaatggagtaagtgagggttttgttaaacttatatcttcatgtgaatttgctaaagatgcttgacaaattcttcaaactaaatttgaaggaacttttgatgttaagcgttctaggtttattatgctttagacaaaatttgataatcttagaatgtctgaatctaaaactttgtctgagttttatggaagattatatgatatagctaatg

SEQ ID NO: 36091 - DNA, 1828 bp, Cannabis sativa
aatctctgtaattaaaaaattacgattatttactcacttatagcaaaatttaaattttatactaatatagattagtaagatcataatcccactaattacctgattaacccattaaataaatataaactctaattatttaccattaggcttatcgagatattacaaacacggagtcattaaaagcttttcagcggttgcatggccgcaaacaaatggacaagcagaagccgtcaataaaatactaaaagtgtaacgccctgatgcttaggcgcgctacagtgatttttcaaataacatactaccttgctaatcaagggttttctttaaaaatcatgtcaaatcaaaacttgaataaaattaataaactttatgaacttacaaatgtatatatattatataaccgggatcccgtgctaaaacttctataaatattttgaaaatatttttacaaacttgtcgcatagcgactacaaaatatatcctaagaagtcccgccaccccaaaagtagaacgtaaaaggggtcgatcgatcaattaaggaattgaagggagtaaagaagagagagagagagagagagagagagagatttaccaagaacattctctgtaaaaacactctcataaataacaaagactcattaatgtctgatatatgtaaaaatcacctgcattaaagcttctacagctcttctcattctatcatttaattggttaccgaaaatttcgatcaacacatacatataacataattataaaaatgataatcaaatgaaaaaaaagatattttatgagcttaaattaattaacaacaatttattataattctcacaattttgaaattaacaaaattgacatgcttagactcacgataggtgagtgcataagcactcgactaattattcactaacataattatattataaaaaaaaaatgtcaatcatctatacaataatattatgacatgatataattatgtttcaattgataatcacacataatacaattgtgagattataaatagtaaaaaataattcaccttaatttaattatgtgattatgagtcaattaaacatttaaattgaccaaaataaaaatataaccacacaattaaatgaaaaaaattaatatagagcaaaatggtgaaaattttgtccaaaaggaaatttccacgcgcccccaaacgccatacaaattgttttagtttttttttttttaattagggctggaaaacaacatgtccttttggacaaacaactgtcgtttgcgatgaacgacaggaccccctttgcgccaaacgacgcgtcgttcgttgggggtcgttcaaccttctccttcgcctgactggccacgattcaggtcctcatggctcagtttcagacccgctcaaaaaactagcctccaggggcgattttcaccggcgatcagagagcttttcgtcctcttttaatttttgttagatctcaaacacgaaaaacatctggaaataacccagaaattgattgcacgaatcacgtcaaacccagtttagacccatttgaaaatgaattatctaaccacaattttggccatcgtttatggggtttttcatccccgaatcattttcgatcagcttcgagcttcatttgcccaaaaaacattaaaaaaaactcgtatgaaaacaaacaatccttagcaaaaataaataaatttccctccagaaccattccttccaaaaatgtgccttgatactcaaattaaacaaaattttgagtatctccaaacagttcatacaccaccattcgtaataacagtaaataataataaaaaaaagggtaatttgcgccaaaac

SEQ ID NO: 36092 - DNA, 3786 bp, Cannabis sativa
  modified_base (205)..(223): a, c, t, g, unknown or other
agagagagagagggtttgtgcgacgtcgaccaactccgcctccacctttaatttgggtgcttcggctccgatggtgagacaagagagagaaagagagggttgtgaggggttctgtagaaaaagaagaagaaagaagaaagaagaagaaaaaaaaagtaaaaaaaatatatatatttaatttttttaaattttttaattttttaannnnnnnnnnnnnnnnnnnaaaattaatattacgtggaccactgaaaatttgccacgtgtacaagtgtgtacatgtggacagtacactgtagcacttaactgcgatttttggacggaggtatacagtgcaaaacagaatagaagttcagtaggttttgccgccaaaattttaacttttgtgttacaaaacgtaaagttcagatattttagctgccaatatcccattaatgtattattgtctttttgaactttttattttgttaaaattgatccttgaactattcacagtattgtaaattagttcttctatcacgttgcaaacaaacttatttttatgcttaatttaacaacataaacaatcatagtagtaatattttttttttttgaataacagtattagttatattagttattagtattggtgaaacctattgtatgttattttgattatattcttccatattccctaaaatgtaatgggaaattctccaaacaccggatcggagcgccaagtgttacaatttttcttcctttataaattataattgcaaagaataatatttaaatactatagtaatagaatattactaaatttactatcttaaataatagcaaattaattcatatgtaattatatcatgatactgaacattgtttgtatgtaataatgtaagcatcaattattatagcaggacaaggaaaatgtcactatttatccaatatttacaatgaaaaaagatttaaaagaatagaagaaacaaaggacaataataagaagtaaaaaaagaaaacaaattaataaataaataattggcatacaatgtatgtgtttctatatatttatgatcttttctttagtttattatggtcgactaaagtgggtggcactggtgggacttgccaatgtctccttcctccaatgggatcgtgccacgtttcttcatcttctgcactctcttcttctacccaatcatctatcaccatagtctgctgatagtatcgaaaggccacaaacaacatgaacactgaaaagcaaagatcaaaaaggtcaaactaactaaacatttttttttcttttttcggtttatatattataatgcataacctgaaactcgaacttgagatctctaacacacatacatataaccacttgaactaacctgaagtggttaaactaactaaacattttgataagagaaatgttaaaagcactcattgctcaataacaatactcttttgataaattgcattgcactaaagtatttcttttatttatttttttcagtacctgcccaaatgcgagcgacgatagacgatagattccatacaagaagaaaggccgcgacggtcacagctttcttgtgagagcaagaatcccaggcatcgcgaaagcgtcgaacccaaaatttagctgcaataataaaaatgtgtcaatattagcaattaaaaattctttaaggttaattttggaaaaaaaaaaactttagagtggataatgagtttaaatgttaactatatttgtacaaacttagctagtcttggacttagttggttgaagcaaaatgccaattcaatgagggcaaaaaagaagaagatggatgaggatgaatctagatataatagagactttaatgggcaaccattttcttttctttttttcaaagaaagacacacttttttcctttatgtttatagaaggaagggaccacaacaacaacttcacccatcttatttatattcactacaatcctttcttaatatattatttaaattagatttttattttttagtattgttttccaaaataatgttagtctaaagtgttaaagtttatacaggatgcatactagtcatttggataaaattttaataatgtttttttttaacatagaatcccttttaaattaaactatatgcagacaaatagcttagaattactaaaagtaaaagccaattttattttaattatgtctttatttttgaaaggggccaaattttttttatcaaaacaaaaaaagtggtactcgcacacctagtttctcataaaaaaaatcaatacaaacaatagcaataatttctaacatttattttcaatcgaccaaaagaaaaaacatttattttctcaatgttgaggtggaggactacactttcagcattaagagtcaagaattaaagaaccacagacagagtgtgacataacaccacaagggctctccaacaaactctaatgtaaccttttagccgttagatcaatctagatcttatagccgttaatcaacagtaaaggatctcaattaaaagtccactttattgacaaaggaacatgtagagttaaagacctatgtcatgtgaccactcaaatatcataattgaacatcattaaataaaaaaaaataaaaacaacatcattaagaattttgataagctcacaaaaaatttatgatagcatataatcaaattttgttagccaactcattttgtgacccatcaaatcttcccctatgtttttcttttagaaaaaataaaaaacaaattttttacctaatgttaatttcatgtcacacccactggtgattatgcagaaactgaaagtccaataatggtggaccacgtgtccacaaggtgtacgtgtgaatcatatgagtcatttcatgctttgaactaacaaacaaagatattattaactttccaggaattttaccgtatgcacttatctgagcagaatacagagaacagacttttggtacggtgaacaccccaaaaaatcctgtgacatttagcacaacaaagtgtcagtaaaacattaaaagttttcttgggagattttggcatttttctatggatctctacttggctgtcaggaaaagaaattcacttgttgaaaaacagtaacttctggggtactgtagttgaattatccaattgtgggagttaagcaaaatgaggaaagagaacaacaaaactggaaaaagggtaaaaacaaggttgaaacttttaaatgttcagttggtcaagttaaaacacaaacttttgttcacactagaaatgattgtgtatgaaaaactgactttattcttatcaaacttacccaatttcgccattgtccaaatggttatggagctgccacacctggccaaaacaaagagcaatactgccagctgccattgtcacagattcccatccttttagtagtcttcttaagacaaaagtagattcaaatataataataaaataagaagaaaacgaaaaggtctttaccttcattgtagtagaaggatcaccagaaaataaagccttgagctttagcaggaactcatttaagtaaggaagcacaagttttagtaaccaaattgcttcttcttcacccagtacatatcttttataatctgtgtctataactcccctggtgatgttaaaagaaaagcaaatgtcatttgtttggtcaacatgagaaagttaatttgatcaatttgttaatggttgatgtaataaggaattacctgcagataatagctctgaagaggaaagtggcagcaagataaacaaggcccatataggaaagaacagaaataaagctgtaga

SEQ ID NO: 36093 - DNA, 1440 bp, Cannabis sativa
attgttatggatcaatcaggtacgtatgcctaattattatatattattattgtgttctatactatatacaaattgatcttgggtttattattaatttttctaacataagcaagcatctcgtatttacaattttcttgattctttggctggctgtgtgttaaagggcttgtattttcgaaagcgatcctttgttgaatcaagatatcaaagagtggctattttgtgtggaaaaaaaatcttatgggagaaaaaaaaattaactctagggttggttggtgcactacaagaaatgtcacttttaccagcacagttcgctactgtgctggtaaaagtaatttttaccagtgcattttgcaagctgcgctggcaaaaaggtcaaaattttaccaacgcacatttgcaatggctaaaatctaacttttaccacatttacgcgctaggaaaagtcatttttgcaagcacttttcattttgtgctggcaaaagttctaataccaacaatgatttgccaacacattaaaagtaaattctattttaccagtgcaataccaaacttttgccaacacaaaaatgtggtggcaaaagtgacacttcttgtagtggcgtgtggagaatgggaagggcattgctatttgttctgaaaattggaatccttcaatgccttttgttttgtcagctcctgctcaaattgatggatctagcaaggtgtgggtgttacggaaagatttagtaggataatgtgttcattcgatctattttcttgcctcgtgaagctaaatctatcatttctattcattggtcctcacatgatgtgcaagataaaattgtatggaactttgagaattcaggttggtattctattaagagtggttattggcttggccttctcaatctggctgctccttgtgcttctccgtctggtggcatatctggttggtagaaaaatatttgatctcttaatcttccttcaaatgttagactctttgcttggcaagcgtcccgtaattggattcctactaaaattaatctagcttgtcatggtctgtgttatctgatgggttatgtactttgtgtgggttgaaagatgaaactattcatcatgctctttgggagtctactacattgttatattgcacgaagctctgtgagtttgtgttgggggatcgtcttgttcattgtgtagattttcttgactttattcataggtctattgatgccctttcaaaggaaataattagttatggtaattttatggaggatttggttcagacgtaataaaatggtccataataacgtcaaattgactcttgtgctaactgtgtattgggtctgtgattatcttgggacgtttcataacaaacaagctttggcagtgtctccctctccctgtatgaaggcataggcagtagacatctctactggtgggacaatgtcttggaca

SEQ ID NO: 36094 - DNA, 1680 bp, Cannabis sativa
ccatgtgaatcactagaaacatgtaaagtgtatgcttaacccaataacgaaagtttcttaagggaaccggagcaggctaccatgagacaaaagattttctttccaaaaagattctctttggaactattatatgttcaaagtttaatattaaaataatttaagagtttttgcttgaatttgtccgtgtcaacaaatgtcaacaaataactcgaaatgcctcgaagtccttagcgatcaagataattgttagtctagcctgtaaattcttagatggggtcttaaatgtgagtatgttgaattttgtgtgaattgtttagagtaaaatattactcagcgagtttaccaagtttctcgattaacttgaaattttgtatctattcttgctcttatcaataaactagctttacaagcaatttagtcattcgaaaagatcaagaatgaagaatccatcattttttttcttcgctttttcaggcagcagttccacgcatactcgaggaaacagaagagattcacttcaaaagaactaattatttacttaagaagagctcagatatttgctgggattggataaaggagattccttgcattacatgtccacaaaaaccagaaggatctatggttgtaatggtgagaaaaatcgacacaatgctcagctcgatgccttgaaatcgaagattttataagaactacttatgcttatattcttttcaatgaatgctgcaggtcaagttgaacatctcattactagaagacattagtgatgatattgatttttgcttcaaattggctaaagaggaatctgtgatcatccttcctggtaagaaatgaacttcatgttttaatctagcttgtaatttgcatgtcaaaccgaatatatgtcctgttgcgattgcctaatcaagaaggttttatagctcaaatgatcagacatgtagtttgctctcaaaggttcaacgaatcctttctgagtacttacataacaattgttatagttttctcgaaccccaaatatcataaggttaagcgaaaatcctagttgaaaaataaaaacaaggacctaacacgagaattgctatgcaatgctgcaatcccaacgcgaatgtgtgtggctcaccgagcttgtgtcgctctattcgcctagtagaatccatctaagaaggggtgtttcttttttttttgtagggacagcagttggactcaaaaattggctgcgaattacattcgcagccgatccatcctcactcgaagaagcattaagaagaactaagagtttctatcaaaggcatgccatgagagtctaaacattcatatcaaagatcaaccaaaataggaaaagtgaaaaacttttcttgcaattctttacacaatggtgttatccttatttggtcttaatatcaacacatatatttatatatatgtgtatgaccttattatataatgtaaaatcaattgttctagttaaaattaaataaaatccactatcaaaaagtcttaggccaaagattgtttggttctaacttctttgttgtgatagtttattcattatgttatttctgtttgtgtactgaaatggattatgagcaataaaatatatgaatttgttctacaaagaagtttctataccaccttataaattgattttaggtataatttggggatttttcataattaaccaaa

SEQ ID NO: 36095 - DNA, 3130 bp, Cannabis sativa
  modified_base (2197)..(2209): a, c, t, g, unknown or other
gaaattaacatcaaataatgtgaaaaaaaattaaaaaaaatattaagattaattttttaaaaattatttaagtttattttttttaataataaaatgtatttataattttacggagtgcatatagaagtcccaaaaataaaaatgatattaaatataggttattacctaagtgagggcatcctttttgctcctatacgatgagagtaattttttagccattgattttgcatttgatggttgtaatttgattagttataatagagttggatgtattttattcttttcattattattattattattattattatttatttatttttaaatgtagtcacgattatgagaattaaattttcataatatttaaaaattagaatatgaagagaacaagtaaaaaatgtaatttatagagcaaaaatataataatgttaaacatcagaaagtaaaaaaaaatagcaccaatttgtgtctttttccttgtatttttcaaaacatcattttattatatatttaggacatatagtacttgttttgtcgtgataggtggagacattttattgtacattgatggatgatccaaggtaataagaaagtatggaacatgatagtaaaagtaaaagtggaacctacacaattaacatgtctatttaaattttattaatattttaataattaatcttctattttcttttactatttttttagtttatgcaaatttttcacttttaatttagatttcttttaaattaacaaaataataataataataacaattagttttactttttctttttgaatagttagccttttttttttttttttgtttttacatcaaaaacatttgtatgatagtttggagacatacacttggtctcttttttacataaatttattctaatgaagctaaattattatgtggaagtactcttaacgattatactccataatgaaaaccattatccttattaatttagaaacaaagccaattttatttttaccaatatttataaatcaaatctcatattttaaagtgtccctaaaatattatggatctatattttgtgaaaatacaaaaactacttgttgatttcaaatttagtaaactgacagcaaagttttatttatgattgacaatcaccgcatgtaaattgtaaaagtaaataataaaattgatacaacgatttatagaagttcaaccccttattttatgggtaataacctactcctatttttgttgtattaatttaagagataacaccacgcaaattacaagttttgaccttgtaatttctagctatggctctctttgaatgttacaatgatgagaactgatgtataacaattctaaacaagtgagatgagaaaatagattaatgactagggaatggcgtgtgagagaggagtgagagtgccctagggcttgagggacttggaattcaggtcccatctcactttacgtaatgccctttatatagttttagggcttacaaaagatcaatctttaagtaagtaaatatcccttaaaaatagaaaaaaccactcttaagttataaaaataactaattaataatccttaaaagataggtagataatttagggttgaattcctactttcgtggattgttggagttgccctatcactgaaatcgagttgtgacccgtccagaaagatggatgtggaccccaccattcaattaggcttcctttggtgctctttatctgtgctggccgacctatcttttgcttggggctagccgacacatagactttcttggtcggccagggtgtggtccaaccaaaccctcatggttggccattttctcgtaacttgatcttgcccaagtgtttggattccttgtcaattgatgtattgtgcatggtgactttggtcacctactaacactttgtattccatgtggcatcggtcttgcctacatggacatgtcacgtcatgtgggcaaaaattgggataattggatagctgtaaagcacattctcagaggttcactagtggaaatataattcaagatcccttctgaatttgcacgcaactttctaattctagaattaacacataaaggaaaccaacattcgatcagtttggaaagttaagattctataattgtaaatcatgtttctaaccatccgcattattagattcccaaaacagacgttgtaagaatcatcttctctgagnnnnnnnnnnnnntgaatcaaagaaactaataatatgaacaagagttcatgataacttcatatttaggccaatctactattggtcatcattatgatatgaattaggtctttatgataaacgtcatgttaataaagacaatttcattcacattggtctttgtcatatataatatctattatatacatcaccttcacttagatgtctcactacatcagtaatttgaatcaagattacttgcaatgtagaacaagcatcagtgaacagtattagtaaccattaattaaatattccataactttaatatattgttgattattttattcatacctaagtggtcttaattatctatacaactacaaggcacaacctcatatatgaataaaaaaatttctgatatttaatacaaattattcaataataaatattaataatttaacattcaagcatatatcaaaatgttcagctctttattaataatcacaattatctttacaggctttttcagggcataaatcctaacagttattgtcaccagtggctcagcttctatccacttagtgaagtagtcgactgcgacaacgatatattgtactcctccttttcccttaggaagttgattggtgaggtctattccccacataacaaagggccaaggagactgcatcaatgtgagctcgtttggtggagctctcaagatctttaagaatctttgacacttgtcacactttctaacatatttcattgagtcctcaatcatggtaggccaaaaatacccttgtttgagtatctttttggacaagctttgccctctagcatgattgccgcaaaaaccttcatgcacttccaccaatagcctcttggcttctgtcttagtggcgcaccttagaagtggcattgtgaagctacatatgtacattactccatctaggatta

SEQ ID NO: 36096 - DNA, 1123 bp, Cannabis sativa
tcaattattcaagaataaaaaaaaaatcaagagaatagcttctctttctctctagtctctttctctctctctcgagctccacagaagccaactagggcttgtgattctgcagcctaattctggaagcttagcaaattttttggtgaattaattcaaggtaaatatcttagcaccttttctttgtaatttcttaggtttcaagcaagatttatgcatgaattttgggttaaggttgttgttgttgtgttttgttttcattgaagtgttctgaagttggaattatgtttattgagctgatttgaagctagttggttgcttgatttgattgttagacaaagtttgagttatagaactcaaactttggtctttaatggtagattttgattctcaacttgtttaattgttttattgcttggaatatgtttattgtggtatatatagtaggtctggaaggtttggttgagtttggggttgaattgagagagtagtgaaattttgaagttttcctatactgaactggtcgaccggttcagtgggacctgtaggaactggaattttggttggtccccaagaaaccccacagaaccagaattccggttggggaaccagtctaccggttggggtagttttgggaaccctagtttttcccgtttctatagtatttagggtatcaccatgttgtttatcgatagagaaactcttagttttaagttttagtcccaggaaagtgatttggcgtgtcactcaccagttttacgaataatgtgatttaggggcctgtaattcgtcgagcaactgttccactcgggttggccggcacacttgaattcggaaacaatgtaagattagtataatgatatgcatatgtatttacatgttcagtgtgcatgttacttaagcctgttagattacattataatagtgatatcagtatgtttagtattatattggatattgataaatgtatgttggcttaagtactattcaacaatatcacatcggtacgactagagtacgactagcgtatcgagtataggcatggtcgataatactgtacttcttgacagtatcacatcggtatggctagagtacgactagcgtatcgagtataggttgatattat

SEQ ID NO: 36097 - DNA, 1511 bp, Cannabis sativa
  modified_base (285)..(294): a, c, t, g, unknown or other
gagaattattacatatatatatattttttaaatttataatttggatagctctagtagtgtttctatatatgtagcttgctttgtagattttaattacaatttaagttatttggttagttgttatgtaatttttgtaaaaatgaaaaaaaaaatgaaattttttattttaacacttcaattttttttttattccacgtagtatcgcttatagtaacggaacaacctaaatcgcaagtaaaattcgtagagcaacctatttcaacaacccaaactgtaaatttaaannnnnnnnnnttaaaaaaataatatatgaaataattaaaaaaaactatataaaaattaaaaaaaatctcataatattatttattctgttctgaactatttgcactgagctttgttaatataataaaagtaattattaataatatagcaatatattgctttattacattgggtgggtgatgctatttttgttcctttcttatatatatctttactctcactaaactaaactaaactaaaccatctggaacattcacatatactacatgatttttctcatttgaaggatcgatcatattctaattttgggtaagcgcttataattcgtgagttcatgatcatacttgtatatatattgtttcatatataaataattaaactatttgtatttgtagctaatgtagcagcaaccgatcaagaccctgaaagaaactcatgatgtatctaccaataagctaaaccttattcgtttcattggttttctgaaaccatacctacctaatttccacattgtatacatttctggtatgtatctacgtacatatctgtcttaatgtatatataactgaaacaactctttttctttattcccttgctttaattaataaccagaacatatagtcaataatttcaacttgatgcccagaatctgaatgaattaattgaatatataatacatatattatgaattgtatattatctagagtatcataggcatgcatcactataagataatacattttacgaataattagtaattttttatgatttattattattaaattataataggtggaactggatacttaactatgtatatatctataataattatttaggagattttgtatttaatttttatacaatagtacttaactgtggaacaatgttatttctttaaatctagtaaactttatttatctattaattttaattattcatttttttaattaatttaggttgttttcctatatttttaactatttatattaattttttaattttatcaaaataaaaaaataagaacaattatttgtataacttcgagcaattaactttgatatttacttttctaaaagcagaatgatattttaatgctatattttaataaatttgaatatttttttaaaagaaaaataaacattaaatatttttgtggcaatatatcctattttatattaatatgaaagacatttataatagggaatcgttcacatatttattatatc

SEQ ID NO: 36098 - DNA, 1502 bp, Cannabis sativa
aatacaatacaatccaatacattacaatacaatacaatacggcgtaccaaacgagccctaaattaattttttgtcaaaataaaacttaataataactcgatctaaggtgttatgacaaaactgcttgtactttttgcatccgttcgtactaagaattatcttcaagctagttatattaaaacaaaattatcgaaagttgagctcgtagttctatttgtattattctgaaaaatatatgatctattttgttatttaacaaaataaaaagtttaatcaataatttttataaaatcgatatggctgaatgcagtggctttctgtccaagctcatacattgattaacacaatcaattataaattaataattagctaactcatttaagtacgccaattaaaattaatggacttgataggtgacttgactcgtattcattcaatgtatgatacaaattcatctaccaaataacaaaaattaaaatcatttaaaaactaaaaagtttggatttttgatttgttttctttcttatgaaaaaatttctacttttgcaaatgtataaataatgtttttagtttttaccatccattttgggtgtttttttttttttttttctggtgctctgcccatatgcttttcgcatctttagacttaagacttaagaggtccactccacatttgattaattaatattaataatgagggtaatctttcaatttaagtaataaaattttcgtttacagagtattaatttttctaatcaaacccgttcattcactgggtttcaagttattgcagctcaattgtttggacatatgatagtgtagatgtggcataagcctaagaggcttttgagctaatcataaattgtatttctgtgttttacacaatcaatttacaatgttatattggtacaataattatgaatgtgtcatttctcaagttgtttgtcttttttgtttcttactgtgctatcagtatagtgatatatatgctttattttatcatccttgacatacaatagtactattatgagttcttctccttctacattctctacttatataaacgtaatcatatcagctgcttaattatcatgcctgattgctgctacctagtcttaatttaaactattattaaaataacctaatattattttttaaaaaaattagaaacaaatgaattaagcctttgtttaaatactacatggagacaaactatacgtacgcattaagaaatttattactatgatttaaataaaaactgtaatatttttattcaaaatatataacaaacagacacgcaattgaagtttatattaatctacatgataaccatatatagaagcaaacaagtatggtataaaagcctatatgcagcacctttgagtcattgactgggttaagagaaagttgagctaagatgagatgagtgtcaacagattgggttttgtaattgtaggccaatatcattattattcctccctcctcttttttttttttttttt

SEQ ID NO: 36099 - DNA, 1401 bp, Cannabis sativa
tataaatatttgtctgttaatggtgtgtttcatgactctattttttcatacctcttttacgaataattttggatttaatagggagctgcgatcatcaatttgtcaactcatttgtagtacaaactgcaataattaagcagcaataatatgttttgtgatgcgatattaatgtatttatttcaaattttgtggcttcgatgtttaatacctgtttcaatttgaatttgaatttaatggggagctccgatcaataatgtctcatctatttattgaatgatctacaacattcaaatgacaatttttgaatgagtgatgatacctcaattctttatgagattagaattttgaattgttgatacctctgtgtaagcagatttgattaatgagaatttgttgttgatggattcgcctctgttgatgtttgttttttgtttatgtaagtctgattattagagtaggtgtgtttgttgttgattgttcattgaaatgttgttgaatttttgtttcagaaagctttaccgagcatcaatggttgctctgtttttttttcactgggacgaggatggttaaggtgtcgaagaaggtgacaccgtattttatgtaaattagattagccttaccgtaataagttgtaattagcgtgtaaccatatgtttatgaaacaaccaaaaggatttgtggaacctggacacccaaatcatgtctgtcttctccacaaggctctctatggattgaaacagcaattaatgtaagcagttgttaagatatcttaaaggaaccttgactaatggtttctggctgtctccaacagactctgcattttcatggttacagttatgctgactgggccatttgtatggacgatagaaggtcaacgggtggctacgtgattttttgggcaataatctcatttcttggtctgctaaaaagttaaaagtagttgctagatcctccactaaaagtgaattcaaagcattagctaatgctgctgcagaagttaggtggatcacttcccttttgtctgagctgtaagtgtcaattactcaaccccatgttctttgggttgataatcaaagtgcaacatttctagctgctaattctgtgtttcatgcacgcaacaaacacatcgagatcgatctttattttgtcagagagcaaatcttagctcaataactctttgttcgatatgtaccttcgctggatcaagttgcagatgctttgacaaagccactgactacaaacaaatttctatacttaaagaacaaacttcatttagctacctcttcgtttcatttaagggggatataaaccaattaacaattagttagttaattggttaataaagtggcagttagtagttaggtcatgtgttgtaattggccactaatagaggaatagaca

SEQ ID NO: 36100 - DNA, 833 bp, Cannabis sativa
acaaaacccaacaatgaatgcattgtactagaattaatttaaaacaaccaacaaggtaccatcaataaaagctgacttgtcacgatagaaggaccaacatcggcctcttcctgtgttcaagtaaacacccgagcaggaatcaaagtgtcatctttcttctattctgatcactgtaattgtggataatttatattcaaatggcccattacccccactggaagcaggctctagcttaacatttgtcctgatagcatctcttgcacctcaggcactttggataggttcgccaattttcatttcaccttgtcgaaaaccttggtgaccttggaatctcttgtttggtcccatagttgacggatcattaggcctttcttatcattgttagggtcagcacccttaccgaaaaaaacatcagatgcttgtttccatgaatctctccgcatactgtttctcttttgaatttgatcttctacacccttagcagcaagggttagctcaactacttgagcataagtgcggacaactcctagttatttggcagctacaattacatctcaaacaatatgttctttcaatcctcaaagaaacttggcctctctagctgcctcagtggccatttcatctaaagtaatctgtgctaaccaatcaaatttggtggcatactctatcaccgccacattaccccacattagccatataaattctttccgatttagcagcttgaataaatttgttgtagtacttttaatagaacaaagtctagaaagtatcccagatcatattattcagattatagccctatgatacaatgtcccaccaaatgcgggcatctc

SEQ ID NO: 36101 - DNA, 1650 bp, Cannabis sativa
  modified_base (1362)..(1374): a, c, t, g, unknown or other
catagtcggtgtctaaattagggaattggacctagacccggacccaaacccgaaccagaaccagaacccagaggcaaacccatagcagaaccttgtcttggacctagaccttgattcagacgcggatcgggatctcgacctaaactcgaataggaacctggacgtagaccgggacttgaacccagactcaaacttgaacctgtattggaacctagactcagatcgaaactcgggatcaaaacccgaacctaaacttggacctagaccgggaactaggatccaacctagatgggggacttgggtcccaaacgcgaacctggacccaaacctggaccaaggatccgaacctagatggtggacttggacccaaaactaggccccgaaactaggaccgagacccaaaactcgaccccagactcgagacacgagacaagaccttggacccgaaacacaagacctaactactgggacacaaccccaaaagttgaccaaaagccaaacataggatgcggcccaagacccgagactacaactggaataacgtggacccggatctgtatccaaactcgatcttgaacctagaattagaatcggaacctgtttgggacttaaacacagacttgggacactaacaagacccaaacctaaacccaaactcaaaccagaacccataccgggactttgaccctaactgggacctaaaccaagaccgggacttggacccagacccagacctaaaaatttggggcccgacctaggacctaagaactagactcggacctgggatccaaaactcgaacccacactaggactgggacttgaactcggacctgaacccaaatctagacactgactacaggttgggtccaagccccgggttgtggtcaagattcagatcccaatgttgggtctcggtctcattccaatttggatccttggtccaagtatgtgtctgtgtctgggttgtggtctgggactgagatcggggtcgggtattgtgtcccagttccactccttggtctcaattctagttctaattttgactttgggtccctaatctaagtctaggtcatcgctccaggtcaaagtctccaatcccggtctgggtccttggtctgggtctgggtccaagtccatgtttgggttttggtttgacaaagtttcccgagtcccgattcgagtttttatatgggtctgcgtcctggtctgggtctgggtctgggtcctagttagattccagtacccgaactcaaacccagacttgaactcgaacccaactcaagagtatgggtctgggtccaggtcagggtctgggtccgagtctaggtcttgtttttatggatagtatggaaaaaattaagnnnnnnnnnnnnntacagaactcaattttgatttaatctgaattagttatgattttttgaagtttcaaaaaatatcaggaatcgtgcatcatcacacgcacgcggatgaagggcaaccttcagacagcacgcgttcagacacggtttcttgtctgaaaccgagtctcgcgggcgtggataggctacatgcagcctcctgcgctgaggatcctcggccgtgcaccctgtcttgcgcgcgcggacagtatgcaatgcatactatccctacagctggcaattttttcatttt

SEQ ID NO: 36102 - DNA, 1090 bp, Cannabis sativa
tttctgtgttgaataatcatcgtgaggctcaaatttggttaacgaaaatctgcgttaacattaactttgctgaaattctgtgaagttttttttgtagcaaacatgtcagtagtaggttgtgtaaatttcttggacaaaagatgggctaacacttcattaaatgtggtggcatttttggagatgacgtggcattctaggagtggtggctggagcaaatacttggagagactagatccattttatgtgtagggtttatgttgggcaaagggtacaaaatctaaaatgttctcttgaagaaggcagcctccattgtgagaaaataggaagaagaaaaaagaaagaaggaattctgccatagaacctctgttcgtacagagcaagaaagagagaataaagaagaaaaaggaagagaaaagaggagaaggacaacaagatttcagcatctaccttttggaaaacttctcctccattgttgtttgttatttttttcttttttttctcctctctaactctaccattcaaaatccatggctgaattttacattgtaatggtagtttataagttagctatgagctaaactttttatggttttaattgttgaagaaccctatgttttagtttagtattttttttatgcaaatatttagtaaaaattctcatgttcattcaagtgtgctttttgttaatttcttgatattgattggccaccaataacttgatgttgagttatatttaattctggaaaggttaaatgtaatggacttaacttggatgacacaagttcttaatcttattagattagattagagataacataggaatatgttatatccttgtgtaacatttgagaactgtgcttggaaatggtattcttgagcttgattgtcataggaatatgttttttgattaggttcaaaaattgattgcataaaatttggaagagttttatgcactttattggagttcttgttaacctaggatttttgctaaagttttgcagcagcaaaacgcacagtttctgctaaacataaggggattcaatagttcaaacctttcacatttcaatagtttacaactcatttttatttt

SEQ ID NO: 36103 - DNA, 1211 bp, Cannabis sativa
atttacttattttacaagtaatagacatagttagttggatatatatatttgatcaattagtcaatggtgttttcttgccaaagatgccaaaatgcttctttaggttttagctatgagatttttaataatataatgtagtgtttgattcattgtcaaaagataatagaatgtaataggaattgggaaaataaccagctttttttttttttttttgtgaaatgattatattttttatgtttaaagttttttttttctacggtattttatgaaaatacagatattaataaaaaaactatatgaaagtaacaggaaaacaatatcaaaacattataaaaataatatacaaatataaaaaaaatcaacaaaataacaagagtacaacataaaaatacattaaaagatcatatttttctgtaaaataaaattttaaaaatggtaaaaatatttaaaatctagtacaaacgtatttttgtaattttttttttttttgctatttttgtgtatttaccactgaaagggataattacataaggtaccattttttgtaaaaaattatatttttacgtttaaagaattttttttttaacatttttattgatttctatagaaacaacaagaaaactacataaaagtaacatgaaaatagcatttaaataacatcaaaataacaaaaaaaataacatgcatataataaaaaaatcaacaacaaattaacaagagtacaatataaaccgtattttctgtaaataaaataaaaaaatcgtaaaaatatttaaaattctataaaactgtatttttgtattttttttttgttatttttgtatatctgtgaaattatccctttatgaaattatccctagtattattggataggcccaactcaagaggagggttccaagatatacttgccatatagtttggcccaattttattcagaaaacaaaaacccatttttcattttcagaaatatcatattttagatttctacgataatatatattaagagcaatataatatttttctttaaaaaggttcaattttaatgaagcatttttggaaagataatagaattgagtgatgtattgataaaacaatggtatattatttcgttcttacataaatgaagtaatgatgattttgtaagtatgaaactgtattattttttcatataagtaaatagtgcaataataattacattgtaaagatattat

SEQ ID NO: 36104 - DNA, 2864 bp, Cannabis sativa
tgagtagatctaaggtcctggtaaaataattctaacataaggtgcaaggatcgtgcatacccagaataacaattttaaaagataaagatctgatgcatttaggtttcctaggattcctagatactacaatggatactagtcaaccaacgtcatttggacctgaaaatacgagatttgtgtgcgagattctagatgtatttccagaagatttacctagattaccaccttcctaagagagtgagttcgtaatagagttggttcgaggagcgaaaccagtatcaaaggcaccatatcgaatggctccataagaattgattgaatttaagattcaactctaggaattacttaacttgggatttaccagaccgagttattccccttgcggtgctccagtgttatttgtgaaaaagaaaggtgggtagcttcaaatgtgtatcaattgtcaagaactgaataagcttactgttaagaataaataccctctaccccaaattgatgacgtatttaacaagttgaagggtaagacaatgttttcaaagattgaccttttctcaggttaccatcgatttagagtttgagaagaggatatctgaaagactgcattccgtactaggtatggacattacaagtttctagtgacgtgccccagctacattcatggatcttatgaaccatgtattcaaagatttcttggataaacttgtactagtgttcatttatgacattttggtttattccaaattgaaggcagaacatgaactgcatctcagattagtacttcagagattacatgatcacatgctttatgctaaattcaagaagtgtaaattttggttatcacttgtctctttcttaaggtacatagtggataaagatgggatcatggttgatctggaaaaaattgaagttgtttgggattggcaaacagcaaaattagctactgagtttagaagctttcttggtttagctgggtactatcgtcaatttgttaagggtttctcgaaaatagaaatacccttaacaaaaatgacccagaagaatatgaagtttgtttggacagattggtgtgagaaaagtttcaggagttaaagcaacggttgattattgctctggtattaactcttccttctgataatgaaaagtttgtcatttattgcgatgctacgagacaaggtctagactgtgtacttatgcaaactggaaaggtaatagcttatgcttctcaacagttaaaagagtacgagcagaggtaccctactcactatttagagcttgttcctgtagtatttgtgctaaagatttggcgacattacttatatgaggagaaatgtaagatttacactgatgataaaagtctgaaatacttctttacccagaaagacctgaatatgaggcaaaggtatttgcttgagttggtaaaggattatgattgtgaaatcctttatcatcttgggaaggccaatattgtaggtaatgccctaagtagaaagggtcaaaactaggtgaatacattgaagcaaatctccaaggaactagtcgatgaaatgacccaagccattattgagtttgtagtgggacagtttactaatattaccttgcagtctactatcatggaaagaattaaagaagcacaatatcaggacccagacttattgaagtctcgagacaagatttcagttgggaagactaatgattttgaagtggatagtaatgtgatgttacaatttatgaattgtgtttgtgttatgaatggctatattaagagggaaattccgaatgagtctcatacgactccttattctattcatctggggacaacaaaaatcaagatcttaagtcaatgtaccggtggcttggaatgaagaacaatataccaaagtatgttgcgaagtgtttaacttgttaacaagtgaaagctgaacatcaaaggcttgcatggtttcagcagccactaaaccttctagaatggaaatagaaagactttgccatggacttcgtagttggattacctaggactacgggacagtacgactctgtgtgggtaatggttgacatgtttacaaagtcagcgcactttttacctattcagacaaatttctccattgatcggtatggaaaactatacgttagagaaatagtttttgttcatgttgtctcaaagtccaaagtttttgatagggatccaaagttcacatctagattcttggagagcttacatcgagccatgggtactcaattgaaattcagtaccacattccatccttagagtgatggacagtccaaaaagatcattcagatcatagaagatatgctgcgggcatgtgtattagacattgaaggatcatgggtaaagtaccttcctctgatcgagtacttgtacaacaacagctatcaggaaacaatcaggatggctccttatgaactatattattgaataaagtgcagatcacctattcattgggatgaagtaggtgagagaaaaagttcttgggtcccgaagctgtctagagaacaagtgaggcagttgataagattagagtacgaatgctcgttactcagagtagacagaaaagttatgctgatccaaaacaatgggatgttgatttccaagttggagacatggtatttcatcaaatatctctcattaaaggtattaaacgctttggaaagaaaggaaaacttagcccgagattcaaatacctgtgatctttgaaactctactacgattgaggccagtagttctaactttattgtagatcatagtagtccactgatgcactaggactctaagaggtaaaactggtggaaaggtatgaagcaggatatagctagatttgttcctaggaatgcagtttgtcaatagg

SEQ ID NO: 36105 - DNA, 1638 bp, Cannabis sativa
  modified_base (1113)..(1117): a, c, t, g, unknown or other
cgaaagatgagaaggaaggctgcacggtgcatcatagtagagggaattatgtacatacgagggttctccatacaattgctcagatgtgttacccaagaagaagctgcacgaattttgtctgaagtgcacgatggattttgtggaaaccaagccgccgggcagagtttatctaagaaaattcaaaggcaaggttatttctggccgacaatgattgaaaattccaaggtccgtgttaaaaaatgtgacaaatggtagagattttcaaagataccgcgagctccgcccaacgagttgactcagatgcaaagtctgtggccttttgccatttggggaattgacctgatcggacaattattcaaaggcaaaggtggagtgtagtatgcaatggttgaagttgattactttactaagtggacggaagccgagccattggtaactattacatccaaaaaatttcaagactttgttgagaagaacataatctgttagttctaattctcatacaaaatagtcttagacaatggcaaacagtttgacagccagtccttcactaatttctgtgcgaaccatggtatcatcaaaagcttttctacagtggcgcatccccaagaaaatggtcaagttgaagcagtcaacaagacattgaaggatacactaaagaaaagacttgaggatgctaaaggaaactagctggaggagcttccttgagttctatggtcataccgaacaactgagaaaatggcagccgggcagactccagttgtcatggcatatggatatgaagcaatgctgcctgtagaactcgagccaccttcctacagaggattgacgtatagccaacaggtaaatcacatactccttgtcgaatcacttgatgaaatcgaagagaagcgaaccacggcaaatttaaaggtgatggcccatcagcaaaaagtagctcggtatttcaataaacaagtgaaggctcgaagattttatgtgggagatatggtcctaaggatagtatttctaaacaccaaagacagtacgacaagtgtactcggacctaactgggaaggaccatatcagatggttgaagttctcgaatcaagagcatacaaattgggtaagtannnnnaaaaaatgcaactcgttctggtaccaaggtatgggaacggggaacatttaagaaaatactacaaataaaagtactaggtcagatgaccatatcaagtagtaaacaaaaaggacatttattcttaagtgaatggccttttaggcggaccacgcccaaaggttcggacaaaattacaaagtactcaggtcggatgaacaccatctaaagtacaatttttaatttctgcaatttgctttatttcatgttaagctaaagatcaaattagatcaaattaatagcttttatgtaagttactacggtaacaaacacgttttcgattaataaatgaatgaagatgtttatttcaaaattctaattgagtcgaatttactagcatgatgttaatttaccatccaatgcgtacaaaagattttgtcaaacccaaaaccccaaacagaaaaaagagcatacttacaaaaaattataagtgaccaagattcataagtctgctcagtcaattgggggacacctatacttgtaca

SEQ ID NO: 36106 - DNA, 2640 bp, Cannabis sativa
  modified_base (1502)..(1503): a, c, t, g, unknown or other
ttttttttttttttcatttttattggtatgatgatataccttatttaagatgaactaaaaattttaaattatttttaaataatttataatatgaaaaataatattaaataataactatttgaaacttattcttcattaatatatattttgatttacacatggtcctaacataactatatataataagtgatagatttaaaatttttattttgtgaggacttatttattattaaaaaatatttatacttatattataatcactcttactagatttatttaattttatgggaacttttctactattttagtctataattattaaattaaaaaaaaaattacatttaattttttaaaagacaaaatttttgttagtggaggctatagcccccacatcaacactactaggtcactgaccataatataaagattagactaattaaaaatttcttttaaaacatattggtaaatttaccaaaagaaaattaagagcactttcaagaagactgcatttcccaattttactgctcctacgtgcttcaatgtagctttatataacacaccattttgttgtgtgtactacaatgcatgacatattgtagcatatggacatctcactttttttcttttttattattttattgtatataatatatattattttctttttattattatttcagaaaatagtaaactaatacacttctatttattttggcattaaaaaaaattaatttattttcttagtatattataattatttaatacattttataaacttttgagagatttaaaaaaataataggccaaaaatattgtattttattaaaaaaaataatatgataataaaaataaatttttatgaaaatactggataaaagtttacaattttattgccacatggaattttttacaaaaatactgttgttttataaaacaacttaaaataactgtaaaataaattaaaaacaatagtagaataacagtaaaaatttaacacaatatataatatgaaatttacacagtatttttgaaaaaaaatttgctctataataaaaaaaaattaaaattttaatatgtagtataaaaatctctaattaaaaatattatttttagtgtaaattttagtatttgtctttagtgtataaagagtttttaacagtaaattaaatttgatgaaaatgtgacactaaacactaaatttagtgtataaaatggagatgctgtgtactaaatatttatataaggaaaattttatttacaccccaaaaagttttaaaggcaccccattttgataatttttgttttatataaaatttatatttttaattgtactaattttttttaacttttttctttaaattcatattcttaaaaaatttacctatcaaacaaaaataaagtgtattttaaatattatgataaaaaaattaaaataaaaaattatgtgaaattttttaagagaaaaataaaaaaaaaatacacatgagttagaaaaaattatnnaaataaaatcaaaataagtattaagattaacataaaataatgtgaagaaaaaattttaaaaaaatattaagagtaatttttaaaaattatataagtttatattttttttaataatagagtgtatttataagtttaaggggtgcaaatataactcccttgtatataaatatatatatataatttgatttcccatttttgtccctgagcttcttcattctttatttgctcattttctctctcttaaaaatcactataaaccgcgttgttgttgtgtttcacaaaattaaaaataaattttatagtgtgggaaagcaaatgagtactaattaattagaccaaccaaaaaaagctctaaacctatatatatatatagtttgattcttttcttcattcatggcggtttaattatataccactgtaccataattttacattgatgtagatgatcatgatcgtggaggaagacttgctttgattacgaagtttttttgaagtgtttagtctctttcatctttctcagctacaaatttcacctttgtcttttctctgctggttttgattttagtttctcttccgcgttaacatgtcaattcactgagattcccctcaaaatcaacgcgtccgagagttcgtataaaaaacttctgcctcatttctcattttgaattaataatacattgaccgaaatattgattgatttgattgatttctcaagaaattttcgatgagggattttccgaagcacgagcgacgttgggcgtctgattcggttcctgttaaatcggcggtgagtgctggatcatcgccgggatacgattccagttcgactgcggcggaagaggagtttgttgaggttacgcttgatcttcaagatgataatacgattttacttcggagtgttgaaccggcgacggtgattaacatcgatgacgcaatctctgtcgttggtggtgccggaagtgaaactccagcttcggtgtcgagatctccgtctacgtttaggcggagctcgtccagtcggcttcgtcagttttctcatgagcttaaagcggaagccgtcgctaaggcgaagcaattttcgcaggaactaagagctgagctaaagcgattctcgtggagccaccacggtcacggctc

SEQ ID NO: 36107 - DNA, 1126 bp, Cannabis sativa
gtttagccgccaatatccctaaaacaaataataataaaaaaaatgattaaaaaaaactaaccatcttatacacagcctcaacaccatatgcaataacggctatatttgcaagtccaatcttagaaaattagaataaaaaaactaccaaaacaaacataaaccaacacaaaaacaaatgtaaaacaataaagcaaaaataaccacttaaaaaaaatataaaataaccatacacctcaaaactattttgtcagtgagctcaccgaatgtatttataagagaatgaaagtaaaaaaaaaaaaaaatcacaagcacaaccatagagaaggaagaagaaatatatttatagcctccatcttccacacccacagatagaaccaccacaacaacacgagaatacctagaaaataactattaattctagcgagatagatcaagaacagtgaaattggcatcaaataaatcatggtaaaataattgtaaaacagcactaaaataaataaaaaacaaaagaaaaaaggattaaaaaactagctaccttctgcacaacctcaataccagatgcaatagagacactatttgcaagcccaattacgaaaaatcagaattaaaaaaccacactcttttctttcccagaaatgtgactgaaaatttcaaaaattaaagaaaaaataaaaagaagatgaagaaaaggatcttaacatgaaataaattaaaaaaaaaaaacatatatgttaatggggagaaatagagggaacttaagagagtgaaaaaaaagataataacctatgaattttgaaaccaaaaaaaaaaaaaaacacccacaaagaagaaaatgaacatggagaaagaataatgagaagtaatgagaagtagtgtacataattggcctctcatcaaattaaattaaaagaaaaaagaaacaaatgtgacaaccaaatatcacatcaaatttatactaattcttttaagaaaaataatagatattaaatagggtcctattaaatgtgacacaagtgtcaaaatagggtattacaagttttatactacttataaaaagacagtatataaagtaacagtaaaaatattaaaaaaaaatgtatgtcgcagtataaaagtaaaaaaaaaa

SEQ ID NO: 36108 - DNA, 1429 bp, Cannabis sativa
ataggactaaaactttgatgcacataatcataattaatttccactgtgatgacatcactgcaattgtgaataactatatgttctggatctaacataaattgtatattaaactataaacataaaaataacatgaaaaccgaaatgacttctaatcttttattgatagcaaataatattatattgaaatgggttttctttaaggcataaaatcccaataaactcccacttgtactaacataaaactagaagtgcatttcaaccaatccattatcttgatattcatatcaagtgtagtgtgtttgactatacccaaataacagaaaatgtaaggttgtagcaagcaatatctttgttcaccattacttctttttgtgttcataaaattatggaacatagtttttctacatgtattacttctctagggatactgaatactttactgcttaaaaagtgcatctaaatgtacaaaagacacaattttaattctattcaaaatggaatagagataaaacagtcatgaattttcttcagtttgaataactttcaagtctcttaataaaagaaacttagttttttagcttcaccagtagaactaaattattatagatgagtttttacatgttccaaaataattcctccacccccagagtaatcaccatctcagtcattaagttttgagttagtgtagatataaggattttaaatacgcccctttcatctaacatgtagttaacttttagagattctttcttgattgtctccctatgtgcctgttggattacatctttgatggtgcccactcaacagtaggagtcttgtttaatgcattcacaagtgtccatttaacttcttaccattggtacttagggacatcttattgtgacattttatctttatctagaatcaataagttcctcttagactaagtcatcaacattacattctagtatttaacattaatgtaaaatacttgcttaaggttaagtaatcactagagataccataaaacatttcataaggaccaagaatggtgcttaagtctttctaaaagacattgcaaggtttcctatcttatcctcaatattctaataagttattactatccatgtgaatggttagattaactttctttagtattattttaaagttccttgcttgaaaatattattgtaagttatcactagtgtcatcaaaataataaggggctagaaaaaaaactcccactaagataaggtactgtgattctatatcaatggactttagtggtatctattactattgaaacatgtacaacataaaaataagttctattagtttggtagtttctatattatatctatgtctaatcaaatgtgtgttatagagatcatgtggtgtttcgaatataatttagagtttaatataaaagatctttgaactgcatatatca

SEQ ID NO: 36109 - DNA, 2038 bp, Cannabis sativa
aatattattattagactatttattattgtaaagagatattataataaaatgtaattattttttctaatttataataaaatagatttatttgcacccagaaaaatacacactctagtttattattttattttttattatatatatttttaatttatatttacttatattatatttttttcttcaatctcattttctaaaaggataaataacatatagtttaaacaaatgtattttaaatgctacgaccaaagcaaaaacttaaaatatatattttatttgagtaataaaaaattagaaggaaattattaaaattaatacaacttaattacaacaatagagtataggtatttataaattaaaaaaaataataaaaatctagctttaattaaaaaaaataatgttaatgtattattcttataaatttataactgtaattattgtgaaattaaatattaaaattatataactaaatttacatataaatataaaatttattatcgtaggttatttatttaaaattaaaattattttcagattcagttaaatcaatcatatattctaatactgttatattttcaaattctgtaccaatcacagattcaattttttaaaattcaaaaactgtttacagacactaagccaatcacattttcaaaatcatatttcgaatcacaaaattaaaattttcatttcagaataccaaattttgaaaacacagtttttaaatcacgaaccaatcaaccccttaattttcctaaggcatggctgagttttctaagttccatcgtccctatcaatttctatgttactgacaggcaaacaacctaaaacgttgccctacacaatgaatcatgcagtagactgtcaccgtcaaaaccataaaaaaactcaaaaatgcatggcatcataacctaaagtacgctacccataaaacagttgtattgcaagtacaagatagaagcacttatatgtacgagttgatattggcagtgttaggttcttttcagtgggatgaaccctcaccgaaaaagctttaagacaccttatcagcttatcgatgttcgcgtggaagtctggcgacaataatacagtaggtcaattggtctctaagagtgagtctgcttctggaaagtactttgaccagagttggagaagatggtggggaagtccgatcgcgtaattggacgtccaccaaaattttttgggtgttttgggtggtttactctctcggaaagcttgaacaaaaattcgaagtagcaaaaagtgattacaaatgaacccctcacatatttatattcaaaaatggtgatttgcgtatatcacatttaaggaaacacacctttcaacagtgcgagaatactaaaggttgtcattaaatgcgatgtacggaattaagacgtaatgatgattatatttgcctcgacaatctcactgacgtcatcagtcatcaatttgtaaactgaggcctcacacacttccccatgtcgcgtgacacacacagaccaagatatcgatggcttgtgtattccactcatggaatatgaaaggctcacaaacctccgtgaccttccatcttgaaattttcaaaaggcctaagttgctcatggccccacacactacaacgaatctggatggtggctacaagcctccacgactctcgagcccctaagacttgggagtaaatcttatccatattttttgaatagcagacacgtgtgttttgtgtcctaaattaacttacgggcccattcacaaagcccataaagacctcgacccaacccaagaatgaagtcggatgagaggtccaaattctcaagccttagttaccggtaaagctaaatcgacgaatctggaaggctaacacagtcagacaagtagtccaaggggtcgtgtcacgaaagtcaaccctttgggtatactcaaacgtggcatacaactgactctagatctcacaaaattaggaatttgtcccatgtgtcaatccttggaaaggcgcacaacacaaaaagcaaattacctttctaacaacaactgtaca

SEQ ID NO: 36110 - DNA, 1571 bp, Cannabis sativa
gacttgattatggcttcatcaatggcaaatggactgatttaatgaccacgcctgtgcttaaacatttggatttctatgcttcagatcatcgtgtcttgctggcagacatttctcaatccaacatacagcaagtcagaccttttaagtcccgttttagattcgagaaaatatggctgaaagaggaggattgcttagagattattggcaaatactggaataatttagcagtaagtgattcgactgctcaaactttggataacatctcttcatgcgccttccacttacaatcttggcatagacacaaatttggagatttacctaagaagataaagctttctcatgaaaaagttgaagcacttcaaaactcaaaccatactgatcatgatcatttttctcaacttcttgaaagtgagaaaattttagatgatctcttggcacaagaagaggactattggcaccaacgttcgcgttcctcatggttaaaatcgggagattctaacaccaagtatttccatcaaaaagcaagttcgcgaaaaactgccaacaagattaccaagctgacggattctaatggaattgtgcactcttctcaacatggcatttctaatatcatacaagaatatttctacaatatttactccactgaaggagttcattcggctgctacacaaactgttcttgcaacagttccttgcctagtctccactgaaatgcaggaagcactttccacaccttacattgctgaagaagtctaccaagctctgaaatccatgactgaggatggcagtccgggtttggatggcatgtcagtcatgttttatactaattattggcacattgttggggaaagtgttactaaaacagtgttgaaagttctcaatgaaggaggtgatccttcctctttcaactctacactcatcactttaattcccaaagtaaagaagccagtaactatgtctcaccttcggtctattagcttgtgcaatgtgttatacaagctggtatccaaaaccattgtcctaagaatgaagcctcacctcaactcaatcatctctgagtctcaaagtgcttttttgccttaccggttaattacggataatattcttgttgcttttgaacttattcactctctcaagcaccttaagagaggcaagcaaggatttgctgcaattaagctcgacatgagtaaagctttcgacagaatagagtggcactttattcagagcatgatgctcactatggggtttcctcctctgttggtcgatctcataattaggtgtatctctacagtttcatactcatttcaaattaatggagctgtccaaggcaatattgtacctcaacgtggtctacgacaaggagatcccttatctccatatctcttcattatttgtgctgaaggtttctcaagattactacaacatgaagagtgcaatggttctttacatggtttccagctttcacgcaatggtccctcagtctcgcatttattttttgctgatgatagtcttcttctctatcgggctaacagctcctctgcaagatccattcaaagagcaattaccacatat

SEQ ID NO: 36111 - DNA, 1023 bp, Cannabis sativa
atttctttataaatagtcactaatatataatgagttattattaatatataatttatttaaatacatcatcacactaaatttaaataaattatatattaatataaatctgcataactccaatggtatagcactcttctaaatattattgtaatgctctatttttaatagcaatagggaaataatgaaatttgtatgtaagttattttcttcagtatcatatactccaatatatgttcagttttcctttgttgttctacttttgtttttttaattgttctctttcttttcatttttgatattttctcctgtatgttctcttgctgtcccccagcttcccacatttgctgcatttgttatgttatttttttttccagtcagctcccatcctctttttttttttgtcttctaaatttcaccactttaatggaaggtaagactattactgtccatgattgtttcattctggttacctcaaacaaatatttagtggttggtttaacacatataatttaaaatcaacatttgttaaacatacgaaacaatagtggaacaacccaaaaacaacattaaaaaaaatcatgatagcccaaatattaatggtattaatgtttctgcttcatcttaccggatttaatggttgtttttcgactgttctggtgttgctgtggtggtgatgtctatgggtgtagaagatggagccctcattttttattttcggtgtttacaatataaaagaaaaaaaaaagtcccaaggtagtataaaagttatatttaccatgtggcagcatttttgtaaagattgggtcaaaatccagtatttttataagtttctccaattagatggataatttgccaaaaatatggagaagataaaagttcctttttatatcgatgggtaacagaaaatatgatagctataaaaaaaatgaaaatcccacaaataactataaatggcgtaaatacttaaatttatcatctagttacagataaatacctaatttatttttttagcggtaaaaatac

SEQ ID NO: 36112 - DNA, 1023 bp, Cannabis sativa
gaggcgatggaataatttttttcttaaggaaaatataattttacattaaaaatagggataattagaaaaagcaattttttttttaaaaaaaaattatatttttaagtttaattttttttatatatttttacaattttctttattgttataaaaaaataatatcaaaacaaccacaaaaattgacataaaaatactaaaaaaaataaacaatagtataataaaaaaaatacatcacaatagcctgaaatattaggtcatagaaaaaaaatgtggcattttttaaaattagtataaaaagatatctaattttaaaaggaaaattttttgcccctggactatggccctaaacacatgactaatatgcctatgccgagtaacgagcttaaaattactgtactttttttgtaaaaaaaaattgtaaaaacatttataattttatataattgtatttttgtaatttttttgtggtatatattaaataatccctttttgaattcaagtatttattagaattaaactcaacctatttatacaacaaattatattttttataattattattatcaaaggaaagaattacaattttttagagaaatttgcatatataattacaacaaatactaatgtcttacaaaaatatggcaattttagttttttttttttttttttttgtagtacaggtatttttttttatgttatttagttagttttttaattagttatttcactttatatgtattttagtttgaaaaaatagtccgtactaagaacacacctagctagaatcaatatgattgtaatctattttacaacaaaggtagtgaatattgaataaattagaataaatacaaatgattttaaagatcatcaagtcatttaattgagatagcctaaatgattaacacaaggactcttttttttttttttgaataaatggtacatatattagacaaataaagttagacctaactgtcattacataaaagtagttcaaggatggaatgaataggaagacatccaaac

SEQ ID NO: 36113 - DNA, 1330 bp, Cannabis sativa
  modified_base (806)..(813): a, c, t, g, unknown or other
aaaaaaaaaaaaaaaaaagaaaaaaaagataaggaggtattaccaccaaaaacaaagaagaggggttaagtgtttaacaattgaaacataggggaatttggccgcaaatttctcaaaagtaaaatataaagtaactttaccgcactttatattatttattaaattaaaatatataaaattatttgtgtggtgcatagtcatgatgattatagggatggtttaataggttaattttgtcgttttcttgtagctgaattatgttgttgtactgtgtgagattctcttttgagttgggtggcattaaagattaaagtggaggcaataaaaaaattaggcattatataaatataacatcaattgatcttttttcaccgtcaattaaggtggcttttggatgtgaatagacatcaaaataaaatagaataaaattaaatttaaaatatataaataaaaactaataaaaaattctataaatgtttttttttagccttaagctagaagagttaatctaaattcaatattttaaattgtaaccaaaaaaaaaaaatagaataatttttttcttcattccattctattttgttatttccaactaaatgtcacttaagcttttatgggtcttaaaattcaatcctttcatatggggagatatatataatttatagtataaatattaaaatttaacttaataaaaatttaatgacgtggaccaattatggattgtcatattacaatttacttcacttaacaatcaggtacctacagaaattttaaaaatataacttaagtattattattgttaaaannnnnnnntaaatatttatttacaattaaaaagttaaatttatattataaattacttttttttttgataagttagtaattatattgcacttaaaaaggattacaaaacaaaaagacaaccttaaaaaaaataataattacatctcaaaaaatttctcacatgtaaaatattataaacaagactagcatccaatgccaaaaggtatatgaacacattgcaaactaaaatgattgtcaaaaaagaggtgagaatggttatcattctccaaacaacaaatgccatagtgagtactaggtagcgtttggttggcataaagatatgttttgacacattgagaattagaaaacaaaaatattatttcgacatgataattatagatttttcaaagcaaatggaaaagcattatgacaaatatataattaagatatgagcattattattaagtaacagtagtgcttagtaccttctcgacatgtcgtgttgtgattggctagcgatactctttaaaagctattatattaaatt

SEQ ID NO: 36114 - DNA, 1053 bp, Cannabis sativa
aataaaaaataatttacagtataattatttaaatttaattttcggttgcagataaatatttaaatttaatttttgatgtaataatacttaagttataattttacaactttcgtaggtacttcaccttaagtcattatccacatgttattttttttattgatatatttaagcttaacgatcaagtacacctatatattatttttttaataaatttaattatactaaaataatatttatccaattactaaaattttatcattacattaatttatagatagtgtaatatatactgttgatacatattatataagagattgaaccaaattacacctagctatgtcatgaaagcttttcataatttttatatatatatatatttatatataatttaaaaaattctacaataaaattctcttaaaagtaggtatgtcaaaaagatctattaagttggagcggttggagctcctatccgacaaatcacttctgatccgaaatattctaatacttattggatctcgaatcaaatctgctctgcctcgcctaatttttttctagattagatctataatttgatgtagtttcaatatattttttttttttttaaaaaaaaaaaacttaattcaagactcggaccccgaacctggacccatatcccctgggacccggaatttggaccttgactgaactcactcaggatccacatctagacccgagacccgaacccagaactaaacttgggactggacccaaacataggcccatacttgagaccggacccagacccaaaaccagacttggacccggactcggacccagacccgaacctaagaccagacccatgagccggatctagacccaaacccaggacccgaactcagacctgtacccagactcagaatcggacccggagccaggacccaaactcggacctaggacatcactacaacaattatggttattagaggtggaccactttgctggtaataatctcttattccgccgctaaagagtaatactagcggggtccgccggtaataatccgctagtaatact

SEQ ID NO: 36115 - DNA, 1182 bp, Cannabis sativa
ccccaaccacgtaaaaaatctctctcctaatttcttacagctctctaagttattattattttattggttgccgaaaacctcggtcaaccgtactaaaataatttttttatattttagtgattaaaaaatattattagtggcagatttcatcactaatatttcctcagaatttaaatgggtgggaattttttcgtttgttttaagaattattatctgctaataataaaaattttgaaccgaatcccgttttccaccgctaatgacctccttattagtgggcgatagtgttaataagctttattgttgtaatgattatggcagcacatctcccttcccttatatataacgtgtaaaaggtatgtacgtgtttcttgcatcactactgcttattttatttggacttatttatctatctcattcacatcactcttataattcttaagtgaccactcatacatttatatatgagttttgtaaaattccaaagctaataatctttttattatgataattacatcattgaagattctttttactcatgaactatagaacgcgctttgaaaagaaaataataagaaagccaaatgagatggtgatggtggtttatgaatgcgatgtgttcgatccattaataaccattgcatataatatatatatatacatatttccaagaatggttaatgccatggacatacaaaattaattaattcttaattcaatctttatcatcaccaaagaagggtaatgcaccatgcacgtgatcccttgaccccactaccctctttactccccaacaaaacgtacgtaacaataacataatcttttgtctcatttctaaaatcagattttttttttgaataataaaatatgaattttgtataccttatacttaaaacaatttttagttttattagaatataatcttttttagttcattgaaatattataatttttttttttaaatatgagatagatccattaattaatgacatgtgtgagtagtttattcacaaattggtagtaatacgatcgaaaactttgtcggatggtggcatgggtgagacttcggctttgtatagaaggttagaatataagtgacgttaattagaagaaatgaaaacataaaattaaaaaagagaataagaataaaatcaaatcatatttaaaatacatataaaaatt

SEQ ID NO: 36116 - DNA, 1286 bp, Cannabis sativa
attcgacaataccatagtcttcacagttgctcattaatgaaccgaaatgccaattatagacaagcatccaatcgcgttgttggttctcatgtacagggtcactttaagaatagtaaggatccacttaacccaagacgcctcacaggattcatgcgtgaggaaataaaagttcaagtcagttattggaaagcgtgaaaaagaaaatagtgggctcaaaatttatatagaggaacagctaaagaaaattttgcattgctccctttttgaagcaagaaaatctaggtacagttacccacattgaacttgatttagaaaataaattcaagtacttttttcatggttttaggtgtggccataagaggattcactttcatagaaaagtaattggtatagatgcagcttggatcaatactacgcataaagatgtattattagtagccactacacaagatagtgaatatcatactcaccccattgcatgggatttggttgacagtgagaataacacttcatggacatggttcttagagaagttgaaggacttgatacctgatagtttagacttatgttttgtttctaataggtaccaaagtattaaacatgcaatttgtcgtgtttatgttatggcttctcatggggcatgtaattggcatgtaaaataaaatataaaatattatttcaaaagtgttgtcgagactaaattgtataagaaagttgcaatagcataccgtattgaagagtttaataaacacttcaatcagctatcttgagaatgatgtcaagtttagaaagtggtctagagcatattttggtggtaaccgatatgaagtcatgaccactaacataattaagtcagtgaataatttgatgtaaaaggtcagagagtatctaattattgttatgattgattttatctttagcacgatgggaaaatggttccttgaatgtcaacgggaagcatgtgtagttacaactccattaacatcaaagagggaagaaatattacgtaaaagatagaatgaagtctgttcattaataaccctccagttaaatgagaatgagtacaatgtgatgtgtggagaaatcgttatcatagtgaatttaaggtcaaagagttgcacgtgcaaagtttttgatattgagaaacttccatgtatccatgcaatagcagcaacaggaaaggcacaatcccgaaatactgggaaactcatatattctatgtgttcacactgctacacatcaaaatattagttgttagcaactatttatcatgtacctctaaactc

SEQ ID NO: 36117 - DNA, 3118 bp, Cannabis sativa
  modified_base (268)..(270): a, c, t, g, unknown or other
ctatttagataaattaatcaaaaacaaagtgtgaactgtgaattatgaatctatgaattcaagatccaataagtttatcgtgaatttatcaactaaatttagggaaattaccacatatactgttttttttaacttttttttctaatttacggtttgggtttctaaaatggttgcagcgctagttgcaatatgagtttctatacgatttttttttacaatttaggttgccgcagtagttgcaataagagtttctatgtagaattccgtnnnaatgcaaaaaaaaattattttgaaatacaaaattgaaaaagctccataaatttattacctaagtattttcatgtaactttattataaacttagaagtacacttttaaatttaaaaaatgctctttatataatatagatgtattatttattgttacaaccatagccgtcattcaacctttataggtgatctactaacgagaagataataatttaccatttaaccctaaacgtccttaaaatcttagttccttataaatgacacttccataaatggaagctatatattttcatatttataataaatactttcacttaattatactatcaagtcagaataaatttatatttttttattaataataaatggttataataaattgggattttaattagggcacaaaattctaacactttgtctatttccagttatactatgtcttagtcttgtattgaagggtctcaaaaatcccaaactatgttcaagttgtattatttatttcaacactcttcatggtaagccaagatgggtttgtttcctaattaaatgattgatttgttaatcgtactctcgtgtttttataaggttgatttattaagtgtttttcgcttacctagttacttcatgtggtcggtaaactgaagaagaacaagatagacaagtgagcattggagtcatctatttgtcagcttatatatgcgacctggctgtaggattgtcagttgtttttagtttgatgttttcaagatactttcaaacttatgtctcactctaaatattaattattattacctctttcgtaatcttttaagtatgcttatactttaaaaaagctttaatttatatggaatttttaatacattttgttgatgctgaaaaatggtcaacaccagctcgctagattgacgagatgaataatgagtcaagtaaatatttatgagagatatataaaatttatagtaaatcactaactatgtcgcgatgataatgaagctacgtccactttaagtttttatttctcacaaaaattacaagagaattgataaacaaaaaagctcaaatttttagagaagaaaagtaaagagatgtgctctcaccttatgggcacttaatagatagcaaaaaataagctaatggagttctctttttataagaaatgaggtccattaaaataacaataaaatattataaaaaatataaagaaatcactatggctaaaattaactattcatgaaaatagttaattttggatcttgaatcacggtcgttaaatcgtttttgggtaatttcagaaaaaaatcacacttgtcttggagacaaaatttgaacttgaaattttgagaattgcgatatgagtgagatacatgacttgaaagagctttgaaagtactttaaaataaaagtagaatcgcggcaatcagattaatattgaggaaattatagtcgttttactgaagatcgttcaacacacattgtctagattgacatactgacgtttacctagacgttgtgtgagtgaaaaaaacatctcagacttgtattttttgatgcttaagtaatatattgacatcacttagtcaatttcttaggagagacattgtcgttgatgcaatctgcttcaatatcgtattgtggaggagcagagtttggagacgataccctttcacaaccgtgagaatttggtgtttccatgaaagaaagttatttttcgtcaagcttggaagacaacgagtgcttgaacgaaactggttccttcgatgcccattggccaaaagtacttctcaagttgccatccatggagtttgaaacaaatagagaacgaagaacaaagaagagacaagtggaggaagacgaaaccctctgtatcaaagaacttgctctgataccatgttaagattcttaagagaagaaaatgaaagaaaatgatctctgttattgaattcttaatgagcaatccagttatatacaagagctcaattaagctaacataaccaactaacaaaatctaaacaacctaactaactcaaccgtgagagcaaagtaactaattctaactaacacaaagcctattctttaacatcacctttgcagatgcttttactcctctaaaaatggtgcctaattacagtctaatgataaaatcttacttcccaccaatcggggtcccacaagccacgtggttgtgctttaataggccttgtacattagtaaaaattagtggcaacaagtagtagtagtagagcattgttgataggcatcaataattattcttgcaccacctagaggtagcgatttgtaaatagttagcgatattctataatagttattaaattaaagaaaaataataaaagacacaattaattggtgcctagtacactcttatgtgtcaatatcactattagtccaactaagtatcgagtcccatatagtttaatataataacttttaagaagtatcgctagtcaatcacaatgtgacatgtctagaggtaatgcctaataacaatgctctaaattaaattatgtgagacatttacatttaactacacttttaggtagtgtttccttttatcatttatttctctttttctccgttcatgatattataagcaattttccaactcacatcatatatatatatgtaatgtggcatgcttgaaagaaagtctatatatggttgcagcataattttggcatgccttgatatgctccccgttattgtttaaactcatagaatttcgactaaaccaattgaaagttactttcacgtttacataatgagcctaagcctaagattacggatactatcattgctggatttaaaagccattttactttatttttttttttt

SEQ ID NO: 36118 - DNA, 1290 bp, Cannabis sativa
  modified_base (85)..(89): a, c, t, g, unknown or other
tgcctgattaggcaatgcaatactggattatcaaattaaagtattgacttgcctgattaggcaacgtgatgttatgaagatggtnnnnntatgaggtaacatatatataatttatatcagtaaatgaatatgaattctattattagaataatggttttgtattaccaaatatttgtatactgatgtttattcgtggcaaatgccagtagtgatttggatttcatcttatgaacaatgtgtgatggttttattcttattgtgtataaatgacaatatttgaataataaactatatgattgttatcattactttttttgctaagtccttgtgactcgcgggtgctatgtggtgcagtaaaggtaaaggaaagctagatcaactatgaggtgacagtcttctccaacaatgtacatattgatctaccggcctgcgtgtcgagttgcgaatagttgttttgggctggttgtatctgctgtgtattttgattttgtgtttaattggttgtcatatatattttttagcaaaactttttgtaacagagattcccagaacacgctttttatgctattataatgtccgtttttagtattttattttggtcaaatttttaatattatcacggttttaataattaattaatctattagtattaaaatagtttataaaattacacacacatcgtccctatagattagggtgttagaacttggtatcagagtagccatggttttaaaggtcctgaagactggtcgaatatgtatatttgctgggaggacaggtcgactcatggtataataagtatttatattattttctattggattacctgcctaggttattataaagtatgttgggaaaagttctatagtgatgattgtgataagagtatgtgtatggtatatgcatattgatatgatattcgtttgagtcctaaatggttagaagatgtggattaaatgtgtgatacattatgtagtaagggcaatcgaatagtctgattagcgagctggcttggggaaaacggtaaagaagagaaattttttattgccataatgctgggaacatgtaaattctgttatacaggatatgattagaaacaacggggaaacagatccgagatctgagagaataacatgcccatcttttgtcaattcatgtaccaccggtacttcatgttgtgccactagatgtggtggaatatatgaagccaacttactagagatcaggaagcaaaaactaaatgaaccaccaattatgggacaaaagaaaaaggttccagggtgaccttat

SEQ ID NO: 36119 - DNA, 1253 bp, Cannabis sativa
tcactcacatcttgttttgacttacctacatgtgttgcagcatacgctttaaaattggcttggctgcatcaattaaataaaggaagggtattagaaatattgttttcaaaaccaaaaaaaattagcgccaaaacatagggataaataacttactaatatttgacccaagcttcctttgcattctttttttttttcatctcagctgcatcttttttgtctacaacaggacccctcttttgtttaaatcctattgcaaaaacctattacacaagacaaaatatcttaaataaaaaatattcaaaacagtaaaatgttggaagacaatttttttgaataattcattgcaataatctaaaatttcagtgtattcatgacatccctacacttaatttcttgttttgtgtccaataacaagtaagcatctctttctatataatatcatttcactttatgtactatactctaatggtcaaatttacttttatcatacttataaaaaccaaatacattggagcaattagcctaaaacaagaatttgaaccagtaacatgttttatttaagaataccaaataatgtcattcatatacaacaatcaatctaaatatttcaagtaaaaccacctaaaagaagtagcacaaccatcacaaaaacaatatcatatttaaaaccccagttatcctttcatgttacagcaccataatagaaaaaatagttttctatactaattctttaatggaatcaatctaaaatttcagtaatatcccactattcttaatttatgtttatacagtgaaaaagaagtgcaagttcccataattaatattaaggaagatgtatcttcgatcaaataagatatttcatgtaagagcaccaaataatgtcattcatgtacaacaatcactctaaagattaaaagtaacaccaatcaaaagaactagcaacaccatgacccaaatcatatcacatttaaaaccctagttatcctttcatgttagagcaacaattacacagattaagagagatgtctctcttttcatgttacagcacaacataaacagacataaatcaagggtgagatctctctcctccatagttttcaaaactcatatattcattttaatgcttattacatgttacacaatcaagtactttaaaatgatgagaaagtcatttacatttgaaagaattccaatatttaaaaatgaaacaaagcaaaaaccattcctaaaatttagacatgaaacacaacatg

SEQ ID NO: 36120 - DNA, 896 bp, Cannabis sativa
tactaggctttcagaaagtacgaattaacgctaccaatgtcaatatgcctaaagtattaagtgcatgttgtattatggttagttttactttatcaagaacgttcgtgacttaagttatagactttgttgggctaactactctatttatcaaaataaatattagactcaaattacacacactacttcttatacacaataatatgtaattaattttaatcacacaatgaaaaatgatatgatcccacttaaatatgaatgactaatatttagtgcacattgctatgttaataaacgtgtatctagaataatcttttgaaaaccaatcaccaaaattttactttctttattctatacttcaaactcttaccttacttaacatacattaactttttttaaattaatatactatcaaaatctcactttctatattattttaatatgttttattaatttcaagtatataaatatccacaaaagttaaaacctaaaatagttaataataaatattatttaaaacaataaataatataataataatgtagagcataaatagtaataaattttaaaaaaactttaatttgaagaaataatttcaaaagtttaatgtagtgtacttttagttctttttttaattaaatttaaataattgtctattataaaatatattttatgagtacatatttatatttgaagaaatagtgtaattttaatcatagcaattggctgaaataaaagcctacaacttaattgcgatatcttcttcgttggaaacacaaccgattagaataagaaaaatgagccaatacatcgagcgcctgatttcttgattgtttgacaaaagaaaaaaataaaatcaaataaaaaaatattccatcatcacaattaagcttaataac

SEQ ID NO: 36121 - DNA, 1134 bp, Cannabis sativa
caaataatcaaatatacacagctgaataaataaaaaaatggtgagtataccttactttccataaataaaaaaactagatataatttctttcatatataattcaatcaacacaaaaatatagaaatcaaataacaattgagttgaagttaatattgaaattataaaatatttttgtcaaattaaaaatgttaaaaatagaattaacattataaatatgatttttcaagctcttgtacttcaaataagcctataaaccctaagacccctagctagttgaaatttttagaacaattgaactgtattaaaaaaaaacaaacatattgaattaattttagaataattgatataataatatggatggtagatcttgtgttggtgcaatccactacaacactaagataaatagtgggtattttatgtattattattttatcattgaatattgatagcaatgggtgaaaggtaagataattagaaagttccaaaataaataaacaaaattctttttttgactattggttttgttcccttttggtcccactttacaactaagcatatcactcaaaattttcaatttttttcaaatatttttaggtcccccatttgattagttttgtcaaatatcttcattttatatttttaaatttatgtctttctcattacatttgtagattttttttaggttccttacatttgtataatgggtaaaatactattggttataaattttttataaatatttggacatgtttccatcaataattcactattttattttatgatagtgatgacagcaaatatattgtagtaaaattattatttttctagcagttacaaatagccaaatgtgatatatatattaagttaattttaaaaaataaaataaatgataaataattttagtatttaatataaacaatgatatgcctacaccaaaaaaaaaaatgacaaagttttcaaacttatcaaattgttttatgatgatctcattaagctaaaaagcattaccacattatgtgtgtacaagtttattattacatacgagtttcgagtcatgttaccgtgactgatacagattgtcactcctaattaattatctaccttgtagaaggttaatgtgataattgactaaat

SEQ ID NO: 36122 - DNA, 2865 bp, Cannabis sativa
ccgaggtaataaatgtggatggtcccccactattcttagggcaagacgtatatcgttagtaactttcaacaatagtcggtataacttttacatttggaaccccttccttatagattggattacccataggttgatagttggtacccgccattccctgttcagcttagttgcactagttcatactatgggatttccgagcagcatgggactaacttggatagagtgaaccatctagattcatagtgggatttagatccaattaactcctatgacatattcatgatcacaagatctagggtgtttagtgaatactatagtcctccctcttcataatatgatgattatggtaacttcccttaagtggaagtttatttctcattttcctttttatgtatatatgactaagtattaatgtgtctctctgtctcacagatatggatgtagaaaatctcctccattctttgagcgaaaaagggaaaaaaaggattgttgcctcggaaacttcttcagatgtgaatgtggaacccctcaagagatctaagaaaaccactgaaaataagaagcatgcctcgcagactatagacctcgagacttttgaagatcaagtctaggttcacactcctgccattacacatgtcgaggaaccagttccataacctcactaggccaccacttcttcaagccaggcgcctaaaactttgcccatcgaggttgtgggcactagttcagagtattgtgcacagtttgcttcatcctgctagtgccatttatgatctttccagtctagcgactgggatttggtcaacaatggcagcccaacagagatgcttgagaggagtcttaccttcagtctttcggttagttttccttctttttttttcttttttttatcatttctttcaagaacccgcaaggattcatatgcatttttttttgtgtaggccaccttcttatcccatgtcgcccaaagtcgggatctccataaagtaaaacaacgagaagctgaacttcgcaaaaccattgagcaatgcgaggctgttgctaaagaatggaacgatgctcaaaaggagatttctcgtctgaataaggaggttgaggagataagaaagactcacaagacgaaactcgaggcatcccggaaggaagccaaggacaaatttgaagcatgccagaaactccaagacgaacttaacacaaccactgcgaagctcgagggcgctgaggccaatgccaaagaacggtgcaacactgttgccaagccatttaccgagcttggatggcaaatcttgagatggacttaagtttcttaggagagggcgccgaggaagtcctagtttattgcgagaaggccaagaaagaagaagaagaagtcgttgagactgaggaagaagaagaaccatccaagtctcctaccatgtaggcttggtttttatctctttttttataaatgcttttggccgagacaatggttttccccttgtggaaattttttgtaaagataaatttacattgttggatggccaactttgcttttattttatttcttttcatttattgcctcacgtctttatatttgaacttaatatgtttgcttatttgcgtttttaatcacaacttaaacaattatattttgatcaaacttaagatactttaggtaagcacttctattgatctcgtttttcctttaagatagcttaagtggtcattaatctactatgtatgtacatgagtagttatattctgctatgctttctattagcgagcagttcttattagttctacttggcgcgagcagttataatctgccatttgtaatttaataagcaaacttaagcgtactttaaataattcatcttatgaattactttgtacattttttgattgcttatatgaatagttagaccttctattcatattttaggataagtattatcttttcaaggcatctcggtacctcattaataatacatgcctacataatgcgagtcgttagatattcagcctcgcatgtagcttaatgtttttttatgagttaaatctcatttacaactgctacttcgagtttcctttttgaaaatgttcaatttttgactttatattgtccatagacagctttaatcaattatttggaaaaaaaaaattaaagtggagtgggtttgcaatgtatcatgtatttctagataaattccagttgatcatacacatatatatatgtccctcaagtaattttaaagagtaaaactttgtaattacttgaataatacttcaactttattaataataaaaatttacatcacaaagagaaaatacaacaattacataagtaaattggtaataaggtcacaaatgttcaatattccagtggtttttattagcgagctgttaagctgagctaatttataaaccctggttccaactattgctttgataacataaggaccctcccagtttgggttaaacactccagtagatgcatctctcgtgtttccaaatactcttcctaacaccaaatctccgacattaaagagccttttcttcactcttttgttaaagtatatcgtgattcaatgctgatattagttatttgcgattcagtacatttttcttcaagtagatctaaggacaatttaagaagttcttggttttcttcttgattgtagaaatatcgtctgtgggtcagaatattaacttctactggcagcattgcttccgagctaaatgccaacgagaatggagtgtgccctgttgctcttttctcagtcgttctgtgacccaaagtacttttggtagttcatctacccatctcccttttgtagcatccaacttctttttaatagtatcctttaaggttttattaatagcttc

SEQ ID NO: 36123 - DNA, 1785 bp, Cannabis sativa
  modified_base (907)..(931): a, c, t, g, unknown or other
aaaagaggtatgtttcaattaaatataaaattttaggtaaatttgatcaattgattaataaaagaggtatttttcaacttaccccttcaatttaatccacgtgggctttttactagtcatcaatttttgggataagttaaaaaatacctcttttattaatcaaataactaaatttacctctaatttttatttaattgaaacatacttctttttatatgtatttgtatcaaaaataccctgacataagggagtcacatgaagagtatcttaaagtgacagggacaaaattggtacaatatttaaaagaagaagtaaaaatgatagactttaaaaaagaagataaaaataaaagagaacaatataaaaagagtatagagtctaatttcctctcaatttttctcctaaacactattcctcagtttcttttatatttttcgtataagaaactagttaatagttaccaacggatgatcaaaggaaagacaaaatcattactgccttctcgctagtgtcagtacacacacatattttttttttatggtgctcactagaatttttatttctcgagtcgctctggctttcctatttacttaacactctcatgtatcactacaagaaatgtcacttttgccaacacatttttgtactggcaaaagttagtattccgctggtaaaatagaatttacttgtgctgtgttggcaaaagggggttggtaaatcaatgttggtattagaacttttcccaacataaaataaaaagcgctggcaaagatgacttttcccagcacataaatgcgctggtaaaagttagattttcgccactgcaaatgtacgctggtaaaactttgacctctttgccagtgcaatttgtgaaatgcgctggtaaaagttacttttaccagcgcannnnnnnnnnnnnnnnnnnnnnnnnacatttcttgtagtgtatatatttccttccttctttttaatttttatgtatacatatgttttcctttaatttctatgccattgtatgggtgatttctagtatctttttaatggtttttctgtgtcaaatgctgtttctttatacctttttattcttgtacaagttttcctttctttctctactacgtgcggttaataatatcgaagaacccttgatttaataaaaattcttgcatgtattttaaaaaaataacatatctcatcaccattatcaaaatgtataacaaagtagagagaccacatataatcacaaaataagcattaaatgcgtatcacatcgtttattagacccgtagctctcaatactaatcatagaaattaacattcaaaaccgaatagtcgcacttgataaccaccataatactgaggctcagattcaattcactcctgtacagattctagatctttcacctacaggtgagtacgcacctgatttacctataatgacatagagactaggtcgtggaacaacaatatgcattaatcatgatcaaaatgattctcatcagtataaccaaaagtaggataaataataagaataacaaaagaacatattctttttttattttctagaaaattcggcagcataacggttgtattttgaataaaccaaaaaatcataaactgcataattatttatacaaaaatacatttagcactcagtgctccagaacaatccaaaaaaccgtgcatattaagtttttaattttttaaacaatttgcaaatcataaatattagaatatgtctaatattattcaacacatataaatatcaagtctaataatcaagttgag

SEQ ID NO: 36124 - DNA, 1310 bp, Cannabis sativa
  modified_base (980)..(996): a, c, t, g, unknown or other
aacaagaaatttgaatggacggaggaatgcgagaacgcctttcaagagctaaaatggcaacttgcaaaacctcccgtactctcaaaacctctggacgaggaagagatagggatatacctggccgtcacagaacatgctgtaagtgccttactgattagagaagagaacaatatccatcatccggtctattacatcagcaaaagactcgttgaagctgaaggacgatatccactgatagaaaagctcacttattgcttaatcttagcaacaagaaagctaaggccttactggcaagctatccaaatcccacaatctctgtattctaaatatataatatatgttcttaccaactatagacattgtaagcaaaagggaaaccttccctcaagcatttagtcctataaatagtgatccattctcactgatagaggggttaagagaattagtcgagagaattgcttgagaaaaatctaagagagcatactcagagatttcattgtgagagcttcaagagaggaagcactgtattctttgttcttgagttaatacaatccaaggggagtaggctattaccaaactaacggggctgaacctctttaaaatcttgcgttcttactacttattagttcatactttaattatattttctgtcgcttactatttgactcattgtcgttagctaaaagcgaggtcaacattagatatttaattaatttaaattctttaaataaactgaaaatttgaacattcgttagatatttaaatttcagctagaatttaggatatttaggagatttgttagattttaaatattttcaaatattctctaacaatctaaattttaaattctagttaagatatattttaaatatttttttaaatagaaatatcttaacttactttcaagttattagttacatgtttgttatgtttgtttaattatttattcaaaatatttttacaaacttattatttatttnnnnnnnnnnnnnnnnnttaacttgttgacagatctaataatctgattttaatcaattgtcaatagatcttataaataagttgtaacaggtaaattttgcaatttctttcatttgtgtaaacttagaaacatgatagggctcatccaaattatttgacctgtgtgagcctatatgtatgcttttggacttagatgcatatatgaagcccatttaagtttacttaattaaatagactaggttactaaaccaaaatatcacgtaagatagttttatttaggctcaattagtttggatttattcaataaataacaattatttatttaatggtta

SEQ ID NO: 36125 - DNA, 985 bp, Cannabis sativa
aaataacaattaaaatacatactttgaattagacacaacccataaaattaactcaaaattactaaaatactaaaaaaccaacaaatatttcaacgtatgactagccaatgttattccccttttgctagtaacaacttactagcaccctatttgaaactgctgaaaataaaaacaaacagatcaaatttaaacttcaacttatcggtaaaattgtatgtaattgtaggccctccacaaaacaatctaaaaaaaaaaataaaaaataaaactccattaccacacaatataatgaaaaaatataaagtgaaaaaacgatggtaaatcaatccatactaaataaaaagacttaaaaagacttgaaatactaatctgttaaaagtcaaaaaaccgttgaagtagaaattatatgagcacaaatttgattaatgaaatgcatcattttattttaaaaaataattacataataattaatactactacaaaagaagcctttagagacgttttttttttttagcatattgaaaattttagaaagaaattttacgccacttatggcgtcggttatttggaaataaccgacgtaccaaaaggatttataaccctttgtcttcctcattcgatcagccaacccagaaacccacaaaccagagaaactccaaaccctctccgccaaccaccacggaaaataaacccccatttcaccattttttcaccattttagctcatttttaaatcttctattttttatacctaaagctatatacctaaaaatatcacttttttcctaattttttagggtaaaccaaaggtagaggtagtggatgtggtaattatacctccagcaccgtttttggtggagaaaatattgtatagcatcgtctattaatgtataaatctaatttctactaattttagtaatgtacattgctttattttttatttttttttaattttttagggtatttttttatattattaagattgt

SEQ ID NO: 36126 - DNA, 872 bp, Cannabis sativa
gtttcacatgaattaaataaaaaaacgataaatatcggcataagtatataaagttttaagtttgtaaataacataaacttaattttttacaacataagtactcaatgtttataaaattataattttcttaatgttttgtcaatacataccctattaataataactggtactacatgtttctgtttagacccaataatctagaatatgagtttgagtctatactgacgaaattagaaaaaaagtacagttttacaaacattaaattcctatgccactaaacataaatattcgatttatgtcatttacaaacttgaaactttaagtatttatactactatttacttgatgtaaaattattgagccatatataaaaatatgaattattcaactttttactaattaactttgagatagaaccttatatttctccgcaaaattcaagaataagatttgtagtattttttttaattcaaaataaattgccaacaaagaaaagttataacagagcaaagattgtaagtgggttgattttttttttttttaatttaatcttatattaaaatggtctaatttgttgtaatgaaatattatcaccaaaactgaaaatcagcagaaaattcatgcagataaaaggcatttatcatatgtaaaaaataaaaattgacatgtgtttcaaaagcaaaataagactacatatttttatatatttttgtatttatcatatgtaaggacaactaattaactcacctgaaaagcagagaagttgggtttgttttccccagaaaagaggtataaatgtcttgtgcttatttatcaattaatattacaagtgataacatagagaacttaatgcattttgcactacttataat

SEQ ID NO: 36127 - DNA, 1028 bp, Cannabis sativa
atttaagaaaagcctgttaagaagcatgttagtagcctgatagtagaataggcgcatgtttttaatttctaaataagcgacattaataataacgaaaagggagtcctagccctcaggatcgagaggaccgatagagcgtttctgtgcaccaagaacccggggaaaggggaagaaggagccagagatacccttcagttgacttaagacaccaaatcaacgaaaagcacggtgacttacgggatcacctggataaaaagaaacatataccagcagtcgccgcaggaacgccgaacgaaggaattttggcagagttggcaatactgcgcaaagacatgactcgggtctcccggaggcaaaaaggggatgactaagactccgattgtgaggaccgggagccatgcgcccgacacatttttgaggcggagctccccgaaaattttaagatgcccgagatggcagcctacaccagggattcaaaccccagcgatcacttgtctcgatttaaccgagtaatgacggttatgatagtcagtaatgatgccaagtgtttatgctttccactaacgttgggcggaacaacttgtactccttccagccggaatctgtacgagaaccccattctggaacgaattgcaacaagaaggagctgctaacctccaagatttccagaagagagtccgaaagtacatcaatttggaagaagcccaaatagtgggctacggaggatactatccaaccagagtggcaggatatgtacccggagttcaactctcgggaaccctacctcacgctactccacaaatgagcggtatacagttctccgctaccctaggatacaatcagagccaacccttggctcccgcatcttcgcattacgggaaccgcgcagggataagcgaataagccccgtctcactccggtcctgctgctagcctaaccgaccctcctcaaggctctcggagcaagaggtcctcaaaaggcagcaaccggacggaggacaagcgccaaaaaagggggtatactcccca

SEQ ID NO: 36128 - DNA, 1355 bp, Cannabis sativa
  modified_base (717)..(719): a, c, t, g, unknown or other
  modified_base (999)..(1008): a, c, t, g, unknown or other
gttaattttcattgatcgacaagccaaaactcataaaaaatagatatatactatagcttcgttttttttttcttaataaaaaatttgaagctaaatgtataaagtttgtaattggttagattaattagagttaggagttagttagttgtaagaatatgagctgtgattgtaactaacctcagctgatataaaaggctatactcgtgtactgttcaatgatgataatgagattttgtctttgattcattcctatactctttctttatgtttttcttctaatagattccaaactgatatggtatcagagcctccattaaagtgtgctctttcgttgctatcattctctgtctgctgcttatctgttcttccatggcgcacaaggaagagtgcaaactcgaagctctcgcgaagatggtgattcgaagtagttctctattctcggtgagaactcaagatcgacgaatgctaatgatctatccaattcttatttttctttccaatggtaacaatctaggagttgttttagttccaaagattctcataggaagtgagaattacattatatgtaggagatcaatgatgatcgcactggttcaaagattcttattttctttccaatggtaacaatccaggagttgtcacgttcgaccttgttgtctcttaaaggtcgttcgttatacttatatttttcaggcccaaacgtgaggagggtgtatnnnagttagtctcacattactaatgtgtggagataaattgttatatataagatgaatgggctactcctcccattgtcaattgatttttagatgaaacttcatttaccttattctcaaattctaacaaaaattaataaacaaataagtaaaacagtaaagattaaaaaaaaaaaaaagtgttaccaagaccgcttaaatcatttaggaaaattttataatgtactcttttaaaaaagattcaccgatatatttctatccgttttagtatccgaaataatttttnnnnnnnnnnttttctcatggtcatgtaaattagagttatttaagacatcctgcaaaattttaagaaatttgaaaaaaattaacacgccgaaaattacgttcaaacagtaagttgtgtgcgtgactattttattttatacgcatgtaaaatagactgtttgaacattattttctatattataaattattttgaattttacaaaattttgtaaaatatcttaaataaatataacgtacatgaatattaaaaaaattagattaaaaaaatgttttggatgccaaaacaagtagagaatgtatcattacatcttttttaagagagtaagagattgcgttctagaatatcccatcatttaa

SEQ ID NO: 36129 - DNA, 3266 bp, Cannabis sativa
gaagatgaagaggagggagtagccattaacgacctcagcctcgagaccacaaaaaaaaaaagaaaaggaagaggagagagcagccattaacgacccgagaacaagatttgtttttatttatcgaaattttttcattttcatcttcttattttgctttctccaattcattctctcttaaaatacaaagaaaaaaaaaaacccatctcccaaactggcgtccacaccacccttccgcaccactcaactccagcgttcacccaacgtcgacctccactcaatctcagtcaggtactctctctcatatattctctttcatgatacttgtattattgcatttgactaattggaatattgtgttgagattaatataatttataaacaatattttatttttatattttaaaacatattgatatgttaatcttattaatttttttatttttataaaataatttaattaatctgtatgcatatatcactataaaattaatttatagaaaaattatttagaaagaaagtagacaataaatttttaatcttttatgttataatttgatatatgtatttataatggtatttttaatctgtatatattttttgtatgttattttttacaatgttatatatttatatgtgtgtatgagtagtgtttaccgagattttcagaaactgaataattaagaactaaaaaaaattataaattgcagaaatagagagatgaaggttttttgcgtggttgaggtgtcaataaagcttagtctacgagtcagtctattagcctcttagggagagcttgatgtgtttacaatattttagtgggaaatcctaactctttactctaagtttctattggagaagaagaagacctacagtaatattggcagagttttagctgcgtaaattgtgatgccgctttctttatgagaattgagaggtatttataggctaagtggtgggtatggacatgcccatgacccgtctaaggtttctgctaaaaatctcactattggagtaaattacatgcaatgttagagctgagcgaatgaacccgtgggaaaccttatgcccgtacgtgcaacggatagataatgaggactattttgtaccacttggacccatgtcactcaaagattcaatctttaaaagtagagaccacgtattactcaaagcctgttcctttacaagtaggggtctgtaatatcctcctggcaaaaaggtggtggtggtacgtgcactatcatgcttgaatgtaggcgacaagatctgatccttgccaacaaaaagtattaacgtcactttggtgatctggcatgcataaaaggttgacattcgtgacaccccagaatgattgatatctggattaggctcttcgaatactcgtctggatatcatctgggttagtttctcttcttatacccctctgggtcgtccaagagaagcaatttgccttctgtgtttgagaagctaaggcgagcctaagtatgcttctgtgtgtctttccatcctggataattctcagttctaagaggctctccgtgataaagttgtatcaaagggctttgattaagaaattattaaattaatcttcctcattaaatgccgcgtgccatactttgtagaaatgtggataacatttacctccaagcttttgggacgctacgcgcggtcctaaagcttgcagcattcctctgcttcttggtgacacgtccttgacacgtggtgttggctggaatcgcagatgtatcccatgagttgtcattaagaatgggtcattaaccacatgtaccgttggtgtggcatgcatgggacacctttaatgcaattgcatagtgacacacacgtgttgggggcttattccttgagaggagttggaatgatggcaagacgattgatgtgacccctccaatattaaatatacgggatacgagacatgcaataataaatattaaacgtcttgggattttatgccctaaataaaactcatttcaatataatcttatttgctatcaatataagattagaagtcatttaagtttacatgtagtttttgttattacggttttaatatacattttttgttaaattcagaatatataattattcacaattaagtgatgtcatcacagtggaaaataattgtgattatatgcttctatgtctttagtctcatgatttatcagtgcactggatttacagtgacgtgataatcaatgataaagtttacttacacattgatatgtggtatgtcctttccaaggcattagcaaagtatactagtatcggatgtattaagcatacatcagagtggatcgatattgatagtggaaaagatatcataaatttatcgttatatatatatatatcttttttatgtcatatcagttagtgatcttagatcaaaagttctcaatcctgagatggttaggttctagcttaactgcattatttatattctttgacttgttcgttaaagctaaccaattagatcagcccaacacttacatcttgggaatatagtagtgaaattgagtgggagcgctaatcatagatatcgaatctatagcttctataactatttagaagtgaaatgatgattttctttgagtttggcttaacagacataaatgaaaaagctcttattttagtaactatattagtttactaaaatatcttatatacaaagctaagtgttttaaggataaaatacattaaaagatagaacggcaaatttgtccatactcaatgtaaatcatctaagaggatctttgattatttggatcgaaataatagataattgtagtgtatctatatttgctatatatatatatatatatatataacgtttcatgtaatcaggggtgtaattctaaatctatagtggagtcatgagaaattaataagttaggaaatttacttaataaattttaaatctacttattaggagcttggttacataggcctatggtccccacattgtctaggattgtgttgtcttgcggattcaattaattggttttaattaatcaattagaattctgaataagactatatttttttttttgtgaattttcactaagcaagggcttatttgagaagaaagggaggatttatgatttgtttattaattaagagactttgtaaggtctaattattaaataagttaaaggataattagtaatttttacccccaaactttgacatgtactaaaccatgctccctaaacttttttagccgttaaaaatttctcctgaactattaagattgt
